(19) United States
(12) Patent Application Publication
(10) Pub. No.: US 2026/0092266 A1
(43) Pub. Date: Apr. 2, 2026

(54) CRISPR ENZYMES AND SYSTEMS

(71) Applicants: The Broad Institute, Inc., Cambridge, MA (US); Massachusetts Institute of Technology, Cambridge, MA (US)

(72) Inventors: Feng Zhang, Cambridge, MA (US); Han Altae-Tran, Cambridge, MA (US); Soumya Kannan, Cambridge, MA (US)

(21) Appl. No.: 19/388,533

(22) Filed: Nov. 13, 2025

Related U.S. Application Data
(63) Continuation of application No. PCT/US2024/029759, filed on May 16, 2024.
(60) Provisional application No. 63/502,542, filed on May 16, 2023.
(60) Provisional application No. 63/512,416, filed on Jul. 7, 2023.
(60) Provisional application No. 63/512,455, filed on Jul. 7, 2023.

(51) Int. Cl. C12N 9/22; C12N 15/11; C12N 15/82; C12N 15/86; C12N 15/90

(52) U.S. Cl. CPC C12N 9/222; C12N 15/111; C12N 15/8203; C12N 15/86; C12N 15/902; C07K 2319/09; C12N 2310/20

(57) ABSTRACT

Described herein are engineered, non-naturally occurring systems and compositions comprising multimeric CRISPR-Cas complexes comprising a β-CASP polypeptide, a plurality of Cas polypeptides, and a guide molecule, packaging and delivery systems thereof, and methods of use thereof, for modifying target polynucleotides. In addition, described herein are engineered, non-naturally occurring systems and compositions comprising a class of small Cas proteins (Type II-B, II-C, and II-D Cas proteins) and methods of modifying target sequences using the Type II-B, II-C, II-D Cas proteins and systems thereof.

### CROSS-REFERENCE TO RELATED APPLICATIONS

[0001] This application is a Continuation application of International Patent Application No. PCT/US2024/029759, filed May 16, 2024, which claims the benefit of U.S. Provisional Application Nos. 63/502,542, filed May 16, 2023, U.S. 63/512,416, filed Jul. 7, 2023, and U.S. 63/512,455, filed Jul. 7, 2023. The entire contents of the above-identified applications are hereby fully incorporated herein by reference.

### STATEMENT REGARDING FEDERALLY SPONSORED RESEARCH

[0002] This invention was made with government support under Grant No. (s) HG009761 and HL141201 awarded by the National Institutes of Health. The government has certain rights in the invention.

### REFERENCE TO AN ELECTRONIC SEQUENCE LISTING

[0003] The contents of the electronic sequence listing (“BROD-5845US_ST26.xml”; Size is 96,007,958 bytes, and created on Oct. 29, 2025) is herein incorporated by reference in its entirety.

### TECHNICAL FIELD

[0004] The subject matter disclosed herein is generally directed to novel Clustered Regularly Interspaced Short Palindromic Repeat (CRISPR) systems, methods thereof, and compositions thereof, the CRISPR systems comprising novel multimeric CRISPR-associated (Cas) enzymes used for the control of gene expression involving sequence targeting, such as perturbation of gene transcripts or nucleic acid editing, or for the rapid detection of nucleic acids, that may use particle or vector systems to deliver the CRISPR-Cas systems and components thereof.

### BACKGROUND

[0005] Recent advances in genome sequencing techniques and analysis methods have significantly accelerated the ability to catalog and map genetic factors associated with diverse functions and diseases. Precise genome targeting technologies are needed to enable systematic reverse engineering of causal genetic variations by allowing selective perturbation of individual genetic elements and advancing synthetic biology, biotechnological, and medical applications. Although genome-editing techniques such as designer zinc fingers, transcription activator-like effectors (TALEs), or homing meganucleases are available for producing targeted genome perturbations, there remains a need for new genome engineering technologies that employ novel strategies and molecular mechanisms and are affordable, easy to set up, scalable, and amenable to targeting multiple positions within the eukaryotic genome and transcriptome. This would provide a significant resource for new genome engineering and biotechnology applications.

[0006] The CRISPR-Cas bacterial and archaeal adaptive immunity systems show extreme protein composition and genomic loci architecture diversity. The CRISPR-Cas system loci have more than 50 gene families, and there are no strictly universal genes, indicating fast evolution and extreme diversity of loci architecture. So far, adopting a multi-pronged approach, there is comprehensive cas gene identification of about 395 profiles for 93 Cas proteins.

[0007] Citation or identification of any document in this application is not an admission that such a document is available as prior art to the present invention.

### SUMMARY OF THE INVENTION

[0008] In an embodiment, the present invention provides a non-naturally occurring, engineered composition comprising: a β-CASP polypeptide; and a plurality of Cas polypeptides, wherein (a) and (b) are capable of forming a non-naturally occurring, engineered multimeric CRISPR-Cas complex in the presence of a guide molecule, and wherein the guide molecule is capable of directing sequence-specific binding of the non-naturally occurring, engineered multimeric CRISPR-Cas complex to a target sequence in a target polynucleotide. In an embodiment, the β-CASP polypeptide comprises an N-terminal β-CASP domain and a C-terminal adapter domain. In an embodiment, the C-terminal adapter domain comprises an α-helical domain having homology to the C-terminus of a Cas10 protein. In an embodiment, the β-CASP polypeptide comprises a plurality of residues capable of coordinating with Zn²⁺ ions.

[0009] In an embodiment, the plurality of Cas polypeptides comprise a Cas5 family polypeptide, a Cas7 family polypeptide, and optionally a Cas6 family polypeptide. In an embodiment, the Cas5 family polypeptide is a Type III Csx10 polypeptide, a homolog thereof, or an ortholog thereof; wherein the Cas7 family polypeptide is a Type III Csm3 polypeptide, a homolog thereof, or an ortholog thereof; and/or wherein the Cas6 family polypeptide is a Type III Cas6 polypeptide, a homolog thereof, or an ortholog thereof. In an embodiment, one or more of the β-CASP polypeptide and/or the Cas polypeptides has catalytic activity; wherein one or more of the β-CASP polypeptide and/or the Cas polypeptides lacks catalytic activity; and/or wherein one or more of the β-CASP polypeptide and/or the Cas polypeptides is or is engineered to have nickase activity. In an embodiment, the β-CASP polypeptide has catalytic activity. In an embodiment, the Cas7 family polypeptide lacks catalytic activity. In an embodiment, the catalytic activity is RNAse activity.

[0010] In an embodiment, one or more of the β-CASP polypeptide and/or the Cas polypeptides further comprise one or more additional modifications that increase nuclease efficiency, target polynucleotide binding efficiency, or reduce off-target nuclease activity. In an embodiment, the β-CASP polypeptide and/or one or more of the Cas polypeptides is/are further linked to or otherwise capable of associating with a heterologous functional domain. In an embodiment, the heterologous functional domain is a nucleotide deaminase, a transposase, a reverse transcriptase, a recombinase, a methylase, a demethylase, an acetylase, or a deacetylase.

[0011] In an embodiment, the β-CASP polypeptide and/or one or more of the Cas polypeptides is/are derived from one or more bacteria and/or archaea. In an embodiment, the one or more bacteria each independently belong to the phylum selected from the group consisting of Bacillota; and DTHG01000077 4 candidate division White Oak River group 3 (WOR-3); the one or more archaea each independently belong to the phylum selected from the group consisting of MBU4492343 1/HEQ78297 1/Euryarchaeota; RLE40065.1 Candidatus Woesearchaeota; NHI92075 1 Candidatus Lokiarchaeota; and PKP54316 1 Candidatus Altiarchaeales archaeon; and/or the one or more archaea each independently belong to the order selected from the group consisting of: PXF52022 1/RJS85311 1/Methanophagales; and MCD4797691.1/CAG0966219 1/RLG33181 1 Methanosarcinales. In an embodiment, the one or more bacteria each independently belong to the Staphylococcus genus, and optionally one of the bacteria is 6NBT Staphylococcus epidermis; the one or more archaea each independently belong to the family MCG2727882 1 Candidatus Methanoperedenaceae, and optionally one of the archaea is WP 0972978485 1 Candidatus Methanoperedens sp BLZ2; the one or more archaea each independently belong to a genus selected from the group consisting of: WP 0972978485 1 Candidatus Methanoperedens; and/or the one or more archaea each independently belong to a species selected from the group consisting of: 4QTS (Csm3) Mathanocaldococcus jannaschii; and WP 012965105 1 Ferroglobus placidus, and optionally one of the archaea is WP 012965105 1 Ferroglobus placidus DSM 10642. In an embodiment, each of the β-CASP polypeptides and one or more Cas polypeptides are derived from the same species from one or more species. In an embodiment, the β-CASP polypeptide is derived from a first species, and the one or more Cas polypeptides are derived from a second species different from the first species.

[0012] In an embodiment, the composition further comprises one or more guide molecules, wherein the guide molecules comprise a guide sequence capable of hybridizing to a target sequence of the target molecule. The composition is optionally in the form of the non-naturally occurring, engineered multimeric CRISPR-Cas complex. In an embodiment, at least one guide molecule is a crRNA comprising a spacer sequence flanked on the 5′ and 3′ ends by direct repeat sequences.

[0013] In an embodiment, the present invention provides a nucleic acid molecule comprising a nucleotide sequence encoding one or more components of any one of the compositions of the present invention.

[0014] In an embodiment, the present invention provides a vector comprising a polynucleotide comprising one or more of any one of the nucleic acid molecules of the present invention. The vector is a viral vector.

[0015] In an embodiment, the present invention provides a delivery vehicle comprising one or more components of any one of the compositions of the present invention, any one of the non-naturally occurring, engineered multimeric CRISPR-Cas complexes of the present invention, any one of the nucleic acid molecules of the present invention, any one of the vectors of the present invention, or any combination thereof. In an embodiment, the delivery vehicle is a lipid nanoparticle, a viral capsid, an engineered retroelement vector, a polynucleotide-based nanostructure, or an extracellular contractile injection system.

[0016] In an embodiment, the present invention provides an engineered cell comprising the one or more components of any one of the compositions of the present invention, any one of the non-naturally occurring, engineered multimeric CRISPR-Cas complexes of the present invention, any one of the nucleic acid molecules of the present invention, any one of the vectors of the present invention, or any combination thereof. In an embodiment, the engineered cell is an engineered eukaryotic or engineered prokaryotic cell.

[0017] In an embodiment, the present invention provides an organism comprising any one of the engineered cells of the present invention. In an embodiment, the organism is an animal or a plant.

[0018] In an embodiment, the present invention provides a pharmaceutical composition for the treatment of a disease or disorder, comprising one or more components of any one of the compositions of the present invention, any one of the non-naturally occurring, engineered multimeric CRISPR-Cas complexes of the present invention, any one of the nucleic acid molecules the present invention, any one of the vectors of the present invention, any one of the delivery particles of the present invention, any one of the engineered cells of the present invention, or any combination thereof.

[0019] In an embodiment, the present invention provides a method of modifying a target polynucleotide, the method comprising contacting a sample comprising a target polynucleotide with one or more components of any one of the compositions of the present invention, any one of the non-naturally occurring, engineered multimeric CRISPR-Cas complexes of the present invention, any one of the nucleic acid molecules of the present invention, any one of the vectors of the present invention, any one of the delivery particles of the present invention, any one of the engineered cells of the present invention, any one of the pharmaceutical compositions of the present invention, or any combination thereof. In an embodiment, contacting results in modification of a gene product or modification of the amount or expression of a gene product. In an embodiment, the target polynucleotide is a disease-or disorder-associated target polynucleotide.

[0020] In an embodiment, the techniques described herein relate to a non-naturally occurring or engineered nucleic acid-targeting composition including a Cas polypeptide including a RuvC domain and an HNH domain, wherein the Cas polypeptide is less than 850 amino acids in size; and a nucleic acid guide molecule capable of forming a complex with the Cas polypeptide and directing sequence-specific binding of the complex to a target sequence in a target polynucleotide, wherein the Cas polypeptide is a Type II-B Cas polypeptide selected from the group consisting of (SEQ ID NO: 189-269), or wherein the Cas polypeptide is a Type II-C Cas polypeptide selected from the group consisting of (SEQ ID NO: 4583-8895).

[0021] In an embodiment, the techniques described herein relate to a composition, wherein the composition includes two or more nucleic acid guide molecules capable of hybridizing to two different target sequences or different regions of a target sequence.

[0022] In an embodiment, the techniques described herein relate to a composition, wherein the nucleic acid guide molecule is capable of hybridizing to one or more target sequences in a prokaryotic cell.

[0023] In an embodiment, the techniques described herein relate to a composition, wherein the nucleic acid guide molecule is capable of hybridizing to one or more target sequences in a eukaryotic cell.

[0024] In an embodiment, the techniques described herein relate to a composition, wherein the Cas polypeptide includes one or more nuclear localization signals.

[0025] In an embodiment, the techniques described herein relate to a composition, wherein the Cas polypeptide includes two or more nuclear localization signals.

[0026] In an embodiment, the techniques described herein relate to a composition, wherein the Cas polypeptide includes one or more nuclear export signals.

[0027] In an embodiment, the techniques described herein relate to a composition, wherein the Cas polypeptide is catalytically inactive.

[0028] In an embodiment, the techniques described herein relate to a composition, wherein the Cas polypeptide is a nickase.

[0029] In an embodiment, the techniques described herein relate to a composition, wherein the Cas polypeptide is associated with one or more functional domains.

[0030] In an embodiment, the techniques described herein relate to a composition, wherein the one or more functional domains includes one or more heterologous functional domains.

[0031] In an embodiment, the techniques described herein relate to a composition, wherein the one or more functional domains cleaves the target sequence.

[0032] In an embodiment, the techniques described herein relate to a composition, wherein the one or more functional domains modifies transcription or translation of the target sequence.

[0033] In an embodiment, the techniques described herein relate to a composition, wherein the one or more functional domains includes one or more transcriptional activation domains.

[0034] In an embodiment, the techniques described herein relate to a composition, wherein the one or more transcriptional activation domains includes VP64.

[0035] In an embodiment, the techniques described herein relate to a composition, wherein the one or more functional domains includes one or more transcriptional repression domains.

[0036] In an embodiment, the techniques described herein relate to a composition, wherein the one or more transcriptional repression domains includes a KRAB domain or a SID domain.

[0037] In an embodiment, the techniques described herein relate to a composition, wherein the one or more functional domains includes one or more nuclease domains.

[0038] In an embodiment, the techniques described herein relate to a composition, wherein the one or more nuclease domains includes Fok1.

[0039] In an embodiment, the techniques described herein relate to a composition, wherein the one or more functional domains have one or more of the following activities: methylase activity, demethylase activity, transcription activation activity, transcription repression activity, transcription release factor activity, histone modification activity, nuclease activity, single-strand RNA cleavage activity, double-strand RNA cleavage activity, single-strand DNA cleavage activity, double-strand DNA cleavage activity and nucleic acid binding activity.

[0040] In an embodiment, the techniques described herein relate to a composition, further including a recombination template.

[0041] In an embodiment, the techniques described herein relate to a composition, wherein the recombination template is inserted by homology-directed repair (HDR).

[0042] In an embodiment, the techniques described herein relate to a composition, further including a tracrRNA.

[0043] In an embodiment, the techniques described herein relate to a composition, wherein the Cas polypeptide is a chimeric protein including a first fragment from a first Cas polypeptide and a second fragment from a second Cas polypeptide.

[0044] In an embodiment, the techniques described herein relate to a composition, further including a nucleotide deaminase or a catalytic domain thereof.

[0045] In an embodiment, the techniques described herein relate to a composition, wherein the nucleotide deaminase is an adenosine deaminase.

[0046] In an embodiment, the techniques described herein relate to a composition, wherein the nucleotide deaminase is a cytidine deaminase.

[0047] In an embodiment, the techniques described herein relate to a composition, wherein the nucleotide deaminase or catalytic domain thereof is covalently or non-covalently linked to the Cas polypeptide or the nucleic acid guide molecule, or is adapted to link thereof after delivered to a cell.

[0048] In an embodiment, the techniques described herein relate to a composition, wherein the nucleotide deaminase or catalytic domain thereof has been modified to increase its activity against a DNA-RNA heteroduplex.

[0049] In an embodiment, the techniques described herein relate to a composition, wherein the nucleotide deaminase or catalytic domain thereof has been modified to reduce off-target effects.

[0050] In an embodiment, the techniques described herein relate to a composition, wherein the composition is capable of modifying one or more nucleotides in the target sequence.

[0051] In an embodiment, the techniques described herein relate to a composition, wherein modification of the one or more nucleotides in the target sequence remedies a disease caused by a G→A or C→T point mutation or a pathogenic SNP.

[0052] In an embodiment, the techniques described herein relate to a composition, wherein the disease is cancer, hemophilia, beta-thalassemia, Marfan syndrome, or Wiskott-Aldrich syndrome.

[0053] In an embodiment, the techniques described herein relate to a composition, wherein modification of the one or more nucleotides in the target sequence remedies a disease caused by a T→C or A→G point mutation or a pathogenic SNP.

[0054] In an embodiment, the techniques described herein relate to a composition, wherein modification of the one or more nucleotides at the target sequence inactivates a gene.

[0055] In an embodiment, the techniques described herein relate to a composition, wherein modification of the one or more nucleotides modifies gene product encoded at the target sequence or expression of the gene product.

[0056] In an embodiment, the techniques described herein relate to a composition, further including a reverse transcriptase or functional fragment thereof.

[0057] In an embodiment, the techniques described herein relate to a non-naturally occurring or engineered nucleic acid targeting composition including one or more polynucleotide sequences encoding: a Cas polypeptide including a RuvC domain and an HNH domain, wherein the Cas polypeptide is less than 900 amino acids in size; and a nucleic acid guide molecule capable of forming a complex with the Cas polypeptide and directing sequence-specific binding of the complex to a target sequence in a target polynucleotide, wherein the one or more polynucleotide sequences encode a Type II-B Cas polypeptide and are selected from the group consisting of (SEQ ID NO: 108-188), or wherein the one or more polynucleotide sequences encode a Type II-C Cas polypeptide and are selected from the group consisting of (SEQ ID NO: 270-4582).

[0058] In an embodiment, the techniques described herein relate to a composition, wherein the one or more polynucleotide sequences are codon optimized to express in a eukaryote.

[0059] In an embodiment, the techniques described herein relate to a composition, wherein the one or more polynucleotide sequences is mRNA.

[0060] In an embodiment, the techniques described herein relate to a composition, wherein the one or more polynucleotide sequences further encode a reverse transcriptase or functional fragment thereof.

[0061] In an embodiment, the techniques described herein relate to a vector system including the one or more polynucleotide sequences described herein.

[0062] In an embodiment, the techniques described herein relate to a vector system, including: a first regulatory element operably linked to the polynucleotide sequence encoding the Cas polypeptide; and a second regulatory element operably linked to the polynucleotide sequence encoding the nucleic acid guide molecule.

[0063] In an embodiment, the techniques described herein relate to a vector system, wherein the first and/or second regulatory element is a promoter.

[0064] In an embodiment, the techniques described herein relate to a vector system, wherein the promoter is a minimal promoter.

[0065] In an embodiment, the techniques described herein relate to a vector system, wherein the minimal promoter is Mecp2 promoter, tRNA promoter, or U6 promoter.

[0066] In an embodiment, the techniques described herein relate to a vector system, which is included in a single vector.

[0067] In an embodiment, the techniques described herein relate to a vector system, wherein the one or more vectors includes viral vectors.

[0068] In an embodiment, the techniques described herein relate to a vector system, wherein the one or more vectors includes retroviral, lentiviral, adenoviral, adeno-associated, or herpes simplex viral vectors.

[0069] In an embodiment, the techniques described herein relate to a delivery system including any system described herein and a delivery vehicle.

[0070] In an embodiment, the techniques described herein relate to a delivery system, wherein the delivery vehicle includes lipids, sugars, metals, proteins, liposomes, nanoparticles, exosomes, microvesicles, nucleic acid nanoassemblies, a gene gun, an implantable device, or a vector system.

[0071] In an embodiment, the techniques described herein relate to a delivery system, wherein the delivery vehicle includes ribonucleoproteins.

[0072] In an embodiment, the techniques described herein relate to a cell including any composition described herein.

[0073] In an embodiment, the techniques described herein relate to a cell, wherein the cell is a eukaryotic cell, a human or non-human animal cell, a therapeutic T cell, antibody-producing B-cell, a stem cell, or a plant cell.

[0074] In an embodiment, the techniques described herein relate to a tissue, organ, or organism including any cell including any composition described herein.

[0075] In an embodiment, the techniques described herein relate to a cell product from any cell including any composition described herein.

[0076] In an embodiment, the techniques described herein relate to a method of modifying one or more target sequences, the method comprising contacting the one or more target sequences with a composition of any of those described herein.

[0077] In an embodiment, the techniques described herein relate to a method, wherein the composition further includes a recombination template, and wherein modifying the one or more target sequences includes insertion of the recombination template or a portion thereof.

[0078] In an embodiment, the techniques described herein relate to a method, wherein the one or more target sequences is in a prokaryotic cell.

[0079] In an embodiment, the techniques described herein relate to a method, wherein the one or more target sequences is in a eukaryotic cell.

[0080] In an embodiment, the techniques described herein relate to a method, wherein the one or more target sequences is included in a nucleic acid molecule in vitro.

[0081] In an embodiment, the techniques described herein relate to a cell obtained from any method described herein.

[0082] In an embodiment, the techniques described herein relate to a cell or progeny thereof, wherein the cell is a eukaryotic cell, a human or non-human animal cell, a therapeutic T cell, antibody-producing B-cell, a stem cell, or a plant cell.

[0083] In an embodiment, the techniques described herein relate to a non-human animal or plant including the modified cell or progeny thereof as described herein.

[0084] In an embodiment, the techniques described herein relate to a modified cell or progeny thereof as described herein for use in therapy.

[0085] In an embodiment, the techniques described herein relate to a method of treating a disease, disorder, or infection comprising administering an effective amount of the composition of any one of those described herein in a subject in need thereof.

[0086] In an embodiment, the techniques described herein relate to a method of identifying a trait of interest in an organism where the trait of interest is encoded by one or more target polynucleotides, the method comprising contacting the organism or a sample therefrom comprising polynucleotides with non-naturally occurring or engineered nucleic acid targeting composition of any one of those described herein, wherein the composition is directed to the one or more target polynucleotides by the nucleic acid guide molecule, whereby one or more target polynucleotides, and thereby one or more traits, are identified.

[0087] In an embodiment, the techniques described herein relate to a method, wherein the one or more target polynucleotides are modified by the non-naturally occurring or engineered nucleic acid targeting composition.

[0088] In an embodiment, the techniques described herein relate to a method, wherein the method is performed in vitro, in situ, ex vivo, or in vivo.

[0089] In an embodiment, the techniques described herein relate to a method, wherein the organism is a plant, non-human animal, or human.

[0090] In an embodiment, the techniques described herein relate to a method of producing a plant having a modified trait of interest encoded by a gene of interest, the method comprises contacting a plant cell with a composition of any one of those described herein, thereby either modifying or introducing the gene of interest, and regenerating a plant from the plant cell.

[0091] In an embodiment, the techniques described herein relate to an engineered nucleic acid targeting composition including: a Cas polypeptide including a RuvC domain and an HNH domain, wherein the Cas protein is about 950 amino acids or less in size; and a nucleic acid guide molecule capable of forming a complex with the Cas polypeptide and directing sequence-specific binding of the complex to a target sequence in a target polynucleotide, wherein the Cas polypeptide is selected from the group consisting of (SEQ ID NO: 8899-9520).

[0092] In an embodiment, the techniques described herein relate to an engineered nucleic acid targeting system, wherein the Cas polypeptide is less than or equal to 780 amino acids in size.

[0093] In an embodiment, the techniques described herein relate to an engineered nucleic acid targeting system, wherein the Cas polypeptide has no association with Cas1, Cas2, Cas4, or Csn2.

[0094] In an embodiment, the techniques described herein relate to an engineered nucleic acid targeting system, wherein the Cas polypeptide is capable of forming a complex with two or more nucleic guide molecules, wherein each guide molecule is capable of sequence-specific binding of a target nucleic acid sequence, wherein each target sequence is different.

[0095] In an embodiment, the techniques described herein relate to an engineered nucleic acid targeting system, wherein the target sequences are on the same or are on different target polynucleotides.

[0096] In an embodiment, the techniques described herein relate to an engineered nucleic acid targeting system, wherein the guide molecule or the two or more guide molecules are capable of sequence-specific binding a target sequence in vitro, in situ, ex vivo, or in vivo.

[0097] In an embodiment, the techniques described herein relate to an engineered nucleic acid targeting system, wherein the guide molecule or the two or more guide molecules are capable of sequence-specific binding a target sequence in a prokaryotic cell, eukaryotic cell, a virus, or a combination thereof.

[0098] In an embodiment, the techniques described herein relate to an engineered nucleic acid targeting system, wherein the Cas protein is operably coupled to one or more nuclear localization signals.

[0099] In an embodiment, the techniques described herein relate to an engineered nucleic acid targeting system, wherein the Cas protein is operably coupled to one or more nuclear export signals.

[0100] In an embodiment, the techniques described herein relate to an engineered nucleic acid targeting system, wherein the Cas protein lacks one or more catalytic activities.

[0101] In an embodiment, the techniques described herein relate to an engineered nucleic acid targeting system, wherein the Cas protein lacks nuclease activity.

[0102] In an embodiment, the techniques described herein relate to an engineered nucleic acid targeting system, wherein the Cas protein is a nickase.

[0103] In an embodiment, the techniques described herein relate to an engineered nucleic acid targeting system, wherein the Cas protein is operably coupled to or associated with one or more functional domains.

[0104] In an embodiment, the techniques described herein relate to an engineered nucleic acid targeting system, wherein the one or more functional domains is/are one or more heterologous functional domains.

[0105] In an embodiment, the techniques described herein relate to an engineered nucleic acid targeting system, wherein the one or more functional domains has one or more activities selected from deaminase activity, methylase activity, demethylase activity, transcription activation activity, transcription repression activity, transcription release factor activity, histone modification activity, nuclease activity, single-strand RNA cleavage activity, double-strand RNA cleavage activity, single-strand DNA cleavage activity, double-strand DNA cleavage activity, nucleic acid binding activity, transposition activity, reverse transcription activity, or a combination thereof.

[0106] In an embodiment, the techniques described herein relate to an engineered nucleic acid targeting system, wherein the one or more functional domains is capable of cleaving the target polynucleotide.

[0107] In an embodiment, the techniques described herein relate to an engineered nucleic acid targeting system, wherein the one or more functional domains is capable of modifying transcription or translation of the target polynucleotide.

[0108] In an embodiment, the techniques described herein relate to an engineered nucleic acid targeting system, further including a recombination template.

[0109] In an embodiment, the techniques described herein relate to an engineered nucleic acid targeting system, wherein the recombination template is operably coupled to, complexed with, or is associated with the Cas protein, the nucleic acid guide molecule, or both.

[0110] In an embodiment, the techniques described herein relate to an engineered nucleic acid targeting system, wherein the recombination template is a homology-directed repair (HDR) recombination template.

[0111] In an embodiment, the techniques described herein relate to an engineered nucleic acid targeting system, wherein the nucleic acid targeting system includes a tracrRNA.

[0112] In an embodiment, the techniques described herein relate to an engineered nucleic acid targeting system, wherein the Cas protein is a chimeric protein including a first polypeptide fragment from a first Cas protein and a second polypeptide fragment from a second Cas protein.

[0113] In an embodiment, the techniques described herein relate to an engineered nucleic acid targeting system, further including a deaminase or catalytic domain thereof.

[0114] In an embodiment, the techniques described herein relate to an engineered nucleic acid targeting system, wherein the deaminase is an adenosine deaminase or a cytidine deaminase.

[0115] In an embodiment, the techniques described herein relate to an engineered nucleic acid targeting system, wherein the deaminase or catalytic domain thereof is operably coupled to, complexed with, or otherwise associated with the Cas protein, a guide molecule, or both or is capable of operably coupling to, complexing with, or otherwise associated with the Cas protein, a guide molecule, or both after delivery to a cell.

[0116] In an embodiment, the techniques described herein relate to an engineered nucleic acid targeting system, wherein the nucleotide deaminase or catalytic domain thereof has been modified to increase its activity against a DNA-RNA heteroduplex, to reduce off-target effects, or both.

[0117] In an embodiment, the techniques described herein relate to an engineered nucleic acid targeting system, further including a reverse transcriptase or functional domain thereof, wherein the reverse transcriptase or functional domain thereof is optionally operably coupled to, is capable of complexing with, or is otherwise associated with the Cas protein, the guide molecule, or both.

[0118] In an embodiment, the techniques described herein relate to an engineered nucleic acid targeting system, further including one or more nucleic acid guide molecules, wherein each of the one or more nucleic acid guide molecules is capable of capable of forming a complex or is complexed with the Cas protein, and wherein each of the one or more nucleic acid guide molecules is capable of sequence specific binding of a target sequence in a target polynucleotide.

[0119] In an embodiment, the techniques described herein relate to an engineered nucleic acid targeting system, wherein the engineered nucleic acid targeting system is capable of modifying a sequence of the target polynucleotide.

[0120] In an embodiment, the techniques described herein relate to an engineered nucleic acid targeting system, wherein the modification is (a) insertion of one or more polynucleotides; (b) deletion of one or more polynucleotides; (c) conversion of a C•G base pair to a T•A base pair; (d) conversion of an A•T base pair to a G•C base pair; or (e) a combination thereof.

[0121] In an embodiment, the techniques described herein relate to an engineered nucleic acid targeting system, wherein the modification alters a transcription product of the target polynucleotide, a translation product of the target polynucleotide, or both.

[0122] In an embodiment, the techniques described herein relate to an engineered nucleic acid targeting system, wherein the modification alters transcription, translation, or both of the target polynucleotide.

[0123] In an embodiment, the techniques described herein relate to a polynucleotide including one or more nucleic acid sequences that encode one or more components of the engineered nucleic acid system of any one of those described herein.

[0124] In an embodiment, the techniques described herein relate to a polynucleotide, wherein the polynucleotide is codon optimized for expression in a eukaryotic cell.

[0125] In an embodiment, the techniques described herein relate to a polynucleotide, wherein the eukaryotic cell is a human cell or a non-human animal cell.

[0126] In an embodiment, the techniques described herein relate to a vector system including: one or more vectors including one or more polynucleotides of any of those described herein, and optionally one or more regulatory elements operably coupled to one or more polynucleotides.

[0127] In an embodiment, the techniques described herein relate to a vector system, wherein the one or more of the one or more vectors are viral vectors.

[0128] In an embodiment, the techniques described herein relate to a vector system, wherein the viral vector(s) is/are a retroviral vector(s), lentiviral vector(s), adenoviral vector(s), adeno-associated viral vector(s), herpes simplex viral vector(s), or a combination thereof.

[0129] In an embodiment, the techniques described herein relate to a delivery composition including: (a) an engineered nucleic acid-targeting system of any one of those described herein; (b) one or more polynucleotides of any one of those described herein; (c) one or more vector systems of any one of those described herein; or (d) a combination thereof; and (e) a delivery vehicle, wherein a, b, c, d, or e, are associated with or operably coupled to the delivery vehicle.

[0130] In an embodiment, the techniques described herein relate to a cell or progeny thereof including (a) an engineered nucleic acid-targeting system of any one of those described herein; (b) one or more polynucleotides of any one of those described herein; (c) one or more vector systems of any one of those described herein; (d) a delivery formulation of any one of those described herein; (e) one or more polynucleotide modifications produced by an engineered nucleic acid-targeting system of any one of those described herein; or (f) a combination thereof.

[0131] In an embodiment, the techniques described herein relate to a cell or progeny thereof as described herein, wherein the cell or progeny thereof is a prokaryotic or eukaryotic cell.

[0132] In an embodiment, the techniques described herein relate to a tissue, organ, or organism including: a cell or progeny thereof as described herein or a population thereof.

[0133] In an embodiment, the techniques described herein relate to a pharmaceutical formulation including: (a) an engineered nucleic acid-targeting system of any one of those described herein; (b) one or more polynucleotides of any one of those described herein; (c) one or more vector systems of any one of those described herein; (d) a delivery formulation of any one of those described herein; (e) a cell or progeny thereof as described herein; (f) a tissue, an organ, or an organism of any one of those described herein; or (g) a combination thereof; and (h) a pharmaceutically acceptable carrier.

[0134] In an embodiment, the techniques described herein relate to a product produced by a cell or progeny thereof as described herein or a population thereof, a tissue, organ, or organism as described herein, or both.

[0135] In an embodiment, the techniques described herein relate to a method of modifying one or more target polynucleotides, the method comprising contacting the one or more target polynucleotides with an engineered nucleic acid targeting system of any one of those described herein, wherein the engineered nucleic acid targeting system is directed to the one or more target sequences by the guide nucleic acid guide molecule(s) of the engineered nucleic acid targeting system, whereby one or more target polynucleotides is/are modified.

[0136] In an embodiment, the techniques described herein relate to a method, wherein the modification includes: (a) insertion of one or more polynucleotides; (b) deletion of one or more polynucleotides; (c) conversion of a C•G base pair to a T•A base pair; (d) conversion of an A•T base pair to a G•C base pair; or (e) a combination thereof.

[0137] In an embodiment, the techniques described herein relate to a method, wherein contacting occurs in vitro, in situ, ex vivo, or in vivo.

[0138] In an embodiment, the techniques described herein relate to a method, wherein contacting occurs within a cell.

[0139] In an embodiment, the techniques described herein relate to a modified polynucleotide or modified cell or progeny thereof produced from a method as described herein.

[0140] In an embodiment, the techniques described herein relate to a modified cell or progeny thereof as described herein, wherein the cell is a eukaryotic cell or progeny thereof.

[0141] In an embodiment, the techniques described herein relate to a modified cell or progeny thereof as described herein, wherein the cell or progeny thereof is a human cell or progeny thereof or a non-human animal cell or progeny thereof.

[0142] In an embodiment, the techniques described herein relate to a modified cell or progeny thereof as described herein, wherein the cell or progeny thereof is a plant cell.

[0143] In an embodiment, the techniques described herein relate to a method of treating and/or preventing a disease, condition, or a symptom thereof in a subject in need thereof, the method including; (a) administering to the subject in need thereof; (b) an engineered nucleic acid targeting system of any one of those described herein; (c) one or more polynucleotides of any one of those described herein; (d) one or more vector systems of any one of those described herein; (e) a delivery formulation of any one of those described herein; (f) a cell or progeny thereof as in any one of those described herein; (g) a tissue, an organ, or an organism of any one of those described herein; (h) a pharmaceutical formulation of any one of those described herein; (i) a product of any one of those described herein; or (j) any combination thereof.

[0144] In an embodiment, the techniques described herein relate to a method of treating and/or preventing a disease, condition, or a symptom thereof in a subject or cell thereof, the method including, modifying one or more target polynucleotides in or from the subject or cell thereof by contacting the one or more target polynucleotides with an engineered nucleic acid targeting system of any one of those described herein, wherein the engineered nucleic acid targeting system is directed to the one or more target sequences in one or more target polynucleotides by the guide nucleic acid guide molecule(s) of the engineered nucleic acid targeting system, whereby one or more target polynucleotides is/are modified.

[0145] In an embodiment, the techniques described herein relate to a method, wherein contacting occurs in vitro, in situ, ex vivo, or in vivo.

[0146] In an embodiment, the techniques described herein relate to a method, wherein contacting occurs ex vivo in a cell obtained from the subject or progeny thereof and wherein the method further includes administering cell or obtained from the subject or progeny to the subject after contacting the cell or progeny thereof with the engineered targeting system.

[0147] In an embodiment, the techniques described herein relate to a method of generating a modified organism, the method including: modifying one or more target polynucleotides in a cell by a method as in any one of those described herein.

[0148] In an embodiment, the techniques described herein relate to a method, wherein the organism is a non-human animal.

[0149] In an embodiment, the techniques described herein relate to a method, wherein the organism is a plant.

[0150] In an embodiment, the techniques described herein relate to a method of identifying a trait of interest in an organism where the trait of interest is encoded by one or more target polynucleotides, the method including: contacting the organism or a sample therefrom comprising polynucleotides with an engineered nucleic acid targeting system of any one of those described herein, wherein the engineered nucleic acid targeting system is directed to the one or more target sequences by the guide nucleic acid guide molecule(s) of the engineered nucleic acid targeting system, whereby one or more target polynucleotides, and thereby the one or more traits, are identified.

[0151] In an embodiment, the techniques described herein relate to a method, wherein one or more target polynucleotides are modified by the engineered nucleic acid targeting system.

[0152] In an embodiment, the techniques described herein relate to a method, wherein the method is performed in vitro, in situ, ex vivo, or in vivo.

[0153] In an embodiment, the techniques described herein relate to a method, wherein the organism is a plant, non-human animal, or human.

[0154] In an embodiment, the techniques described herein relate to a method of identifying a polynucleotide modifier, the method including: exposing one or more polynucleotides to one or more candidate agents; and detecting one or more modified polynucleotides by contacting the one or more polynucleotides exposed to one or more candidate agents with an engineered nucleic acid targeting system of any one of those described herein, wherein the engineered nucleic acid targeting system is directed to the one or more target sequences of one or more modified target polynucleotides present in the sample by the guide nucleic acid guide molecule(s) of the engineered nucleic acid targeting system, whereby one or more modified target polynucleotides present in the sample are identified.

[0155] In an embodiment, the techniques described herein relate to a method of detecting one or more target polynucleotide present in a sample comprising polynucleotides, the method including: contacting, in vitro, one or more target polynucleotides present in the sample with an engineered nucleic acid targeting system of any one of those described herein, wherein the engineered nucleic acid targeting system is directed to the one or more target sequences of one or more target polynucleotides present in the sample by the guide nucleic acid guide molecule(s) of the engineered nucleic acid targeting system, whereby one or more target polynucleotides present in the sample are identified.

### BRIEF DESCRIPTION OF THE DRAWINGS

[0156] An understanding of the features and advantages of the present invention will be obtained by reference to the following detailed description that sets forth illustrative embodiments, in which the principles of the invention may be utilized, and the accompanying drawings of which:

[0157] FIG. 1A-1F—Design and implementation of FLSHclust algorithm for clustering proteins. (FIG. 1A) Schematic of applications of protein clustering in biology and bioinformatic. Archetypal examples of biological systems that could be found with genome mining approaches for CRISPR are shown, including CRISPR-Associated Rossmann Fold (CARF) proteins and transposon linked genes. (FIG. 1B) (SEQ ID NO: 9521-9522) Conceptual schematic of locality-sensitive hashing. In contrast to standard hash-based bucketing, locality-sensitive hashing allows similar, non-identical objects to be bucketed together. The specific family of hash functions shown in the example is randomized positional masking (bit masking) on sequences. This family functions by dropping specific positions in each k-mer, where the positions are randomly selected per hash function. (FIG. 1C) Schematic of the steps of FLSHclust involving locality-sensitive hashing. First, all k-mers are extracted from each protein. Then for each hash function, the hash function is applied to all k-mers and k-mers with the same hash value are grouped and then processed independently to determine which sequences will be aligned in the next step. (FIG. 1D) Optimized hash functions with no false negatives as calculated using Markov Chain Monte Carlo compared to standard randomized hash functions from the same family. Probability of bucketing two k-mers together in one of the L hash tables as a function of the number of mismatches between the k-mers is shown. The parameters used for the Locality Sensitive Hashing (LSH) family functions are L=24 hash functions, k-mer length k=12, with 3 positions dropped per hash function. For the optimized hash functions, the target number of tolerated mismatches is 2, such that the family has no false negatives in identifying matches between k-mers with up to 2 mismatch positions. (FIG. 1E) Comparison of clustering algorithms for deep clustering of a sample of 1M proteins from the UniRef50 database and the full UniRef50 database (51M proteins). (FIG. 1F) Comparison of cumulative distribution of the number of proteins that are clustered with another protein as a function of the protein's percent sequence identity to its nearest neighbor. This metric was computed using a subset of 1 million proteins compared to all 51M proteins in UniRef50.

[0158] FIG. 2A-2C-Discovery of hundreds of rare novel CRISPR systems with a sensitive, scalable CRISPR association pipeline. (FIG. 2A) Schematic of CRISPR discovery pipeline using no all-to-all comparisons. (FIG. 2B) Comparison of naive and enhanced CRISPR association scores for identifying CRISPR694 associated clusters. Left: known Cas genes; right: all clusters. (FIG. 2C) Selection of CRISPR-associated clusters. Left: relative count of Cas (blue) vs non-Cas (gray) clusters as a function of enhanced CRISPR association score. An empirical threshold of 0.35 enhanced score was selected for identifying CRISPR-associated clusters. Right: relative count of all clusters with N_eff≥3. Dotted line demarcates the 0.35 enhanced score cutoff. ˜130,000 clusters with an enhanced score≥0.35 passed for further analysis.

[0159] FIG. 3A-3J—Multimeric Cas (also referred to herein by a proposed designation of “Type VII Cas”) system. (FIG. 3A) Locus diagram of the experimentally studied candidate Type VII Cas system. (FIG. 3B) UPGMA dendrogram from HHPred pairwise alignment scores of related Cas7s. (FIG. 3C) Phylogenetic tree (FastTree) of β-CASP proteins from both bacteria and archaea, including the β-CASP proteins linked to the candidate Type VII Cas system, which form a distinct clade. (FIG. 3D) Top: diagram of the domain architecture of the β-CASP protein (also referred to herein by a proposed designation of “Cas15”). Bottom: superposition of Cas15's C terminal domain with the Cas10's C-terminal from PDB: 6NUD showing the Cas10 interface with the target RNA. Both share the 4-helix bundle found in Cas10 and Cas1 1 that are known to interact with the target strand. (FIG. 3E) CDS target strand preferences of the protospacer matches for the CRISPR array of the experimentally studied Type VII locus. (FIG. 3F) Targets of the protospacer matches for the CRISPR array of the experimentally studied type VII locus. (FIG. 3G) (SEQ ID NO: 9523) Small RNA-seq of Type VII Cas7-Cas5 RNP pulldown along with the DR sequences. The apparent Cas5/Cas7 complex co-purifies with a processed crRNA as shown. (FIG. 3H) Size exclusion chromatography of the Cas7-Cas5 copurified with an expressed DR+spacer+DR or copurified with an expressed truncated DR+truncated spacer. (FIG. 3I) In vitro reconstituted Cas15 and associated effector complex RNP cleavage of Cy5-labeled RNA targets, in the presence or absence of cognate target sequences. Based on chromatogram peaks, complexes are expected in fractions 2-4. When the full crRNA is present (top gel), bands corresponding to Cas5 and Cas7 are present in fractions 2-4, suggesting they form a complex. In contrast, when only a truncated crRNA is present (bottom gel), no bands appear in fractions 2-4, suggesting complexes only form in the presence of a specific crRNA, suggesting a specific functional association of the Cas7-Cas5 proteins in this system with the crRNA component encoded nearby. (FIG. 3J) Target RNA cleavage by Cas15 and associated Cas7-Cas5 RNP at various temperatures. Cleavage is apparent in a range from 37° C. to 52° C.

[0160] FIG. 4A-4B—β-CASP system (FIG. 4A) β-CASP effector modules identified in this Type VII Cas system. All enhanced CRISPR association scores are shown below the system name as determined by the pipeline with the numerator indicating the number of CRISPR/divergent DR associated loci and the denominator indicating the effective sample size of the cluster. β-CASP (Metallo-β-lactamase) identified as novel CRISPR effector domain which was added to known CRISPR effector modules. (FIG. 4B) General evolutionary mechanism that likely gave rise to the β-CASP system-exaption of β-CASP effector domain (small pentagon) by an alternate system.

[0161] FIG. 5A-5B—Complete FLSHclust algorithm. (FIG. 5A) Complete outline of the FLSHclust algorithm. Unlike with typical LSH, which often requires materializing the entire set of L hash tables, FLSHclust only needs to materialize one hash table at a time, storing all potential matches in a reference database. As memory and disk space permits, up to T hash tables can be materialized per iteration, potentially reducing runtime. Time complexities shown (big O notation) are assuming the use of hash join implementations, however if merge join implementations are used, additional logarithmic factors are included in Step 2. (FIG. 5B) Pseudocode of the FLSHclust algorithm.

[0162] FIG. 6—Empirical scaling of time. Subsamples of UniRef50 at various dataset sizes were randomly generated and used as inputs for various clustering software running on the same 32CPU machine. Run times were plotted on a log-log scale (circles). Linear curves were fit to the linear scaling algorithms (Linclust, FLSH), while quadratic curves were fit to the quadratic scaling algorithms (MMseqs2, uclust) using least squares fit on the log-log transformed data (lines).

[0163] FIG. 7A-7F—Performance benchmarks of various CRISPR finders against synthetically generated CRISPRs. (FIG. 7A) Description of all parameter sets used for generating the 35 synthetic CRISPR array datasets. (FIG. 7B) Description of all of the CRISPR finder tools and their tested parameters for the benchmark along with their id/label (condition column). (FIG. 7C) Average runtime per ˜20 kb sequence for each of the CRISPR prediction tools. (FIG. 7D) Average recovery rates of all tools vs each of the synthetic CRISPR datasets. True Positives (real CRISPR-like arrays) vs False Positives (tandem repeats) are differentiated in the subplot titles. Error bars show 95% confidence bounds as determined by bootstrap with 2000 bootstraps. (FIG. 7E) Average fraction of correctly predicted number of DRs with error bars as in FIG. 7D. (FIG. 7F) average number of indels between predicted CRISPR DR and true CRISPR DR with error bars as in FIG. 7D.

[0164] FIG. 8A-8G—Analysis of candidate Type VII Cas proteins. (FIG. 8A) Locus diagram of a candidate Type VII Cas locus in candidate division WOR-3 bacterium isolate SpSt-780. (FIG. 8B) Top BLASTP (against NR and PDB) and HHPred results for each of the four components of the candidate type VII system. (FIG. 8C) UPGMA tree of representative Cas7 homologs across type III CRISPR and type VII systems. (FIG. 8D) (SEQ ID NO: 9524-9540) Top HHpred result of Cas7 from candidate type VII Cas systems. The catalytic aspartate (red triangles) is not conserved and is mutated to asparagine, suggesting that Cas7 is not capable of RNA cleavage as it is in many type III CRISPR systems. (FIG. 8E) (SEQ ID NO: 9541-9565) Top HHpred result for Cas5, which is most similar to the type III-D Cas5 homolog Csx10. (FIG. 8F) FastTree phylogenetic analysis of representative β-CASP domain proteins from bacteria and archaea. Cas15 proteins form a single clade, shown in expanded section. (FIG. 8G) (SEQ ID NO: 9566-9602) Top HHpred result for Cas15. The N-terminal β-CASP domain of Cas15 is similar to the yeast cleavage and polyadenylation specificity factor 100. Catalytic residues that coordinate Zn2+ ions required for catalysis are marked by triangles.

[0165] FIG. 9A-9B—Structural comparison of AlphaFold2 prediction of β-CASP domain of Cas15 and human β-CASP domain-containing proteins. Superimposition of (FIG. 9A) AlphaFold2 prediction of Cas15, with only the β-CASP domain shown, and the X-ray crystal structure of the human Artemis protein in complex with a DNA substrate (PDB: 7ABS) and (FIG. 9B) AlphaFold2 prediction of Cas15, with only the β-CASP domain shown, and the X-tray crystal structure of the human CPSF-73 protein. Insets show the catalytic centers, which coordinate two Zn2+ ions (circles). Catalytic residues responsible for Zn2+ coordination are shown as sticks with shaded heteroatoms.

[0166] FIG. 10—Spacer matches for candidate type VII system. Four examples of spacers from CRISPR arrays associated with the candidate type VII system, with matching protospacers in predicted transposon genes.

[0167] FIG. 11 shows an exemplary Type II-C Cas9.

[0168] FIG. 12 shows results of determination of PAM of the exemplary Type II-C Cas9 in FIG. 1.

[0169] FIG. 13 shows purification pull down experiments to determine small RNAs associated with the exemplary Cas9 in FIG. 11.

[0170] FIG. 14 shows DNA cleavage activity of the exemplary Cas9 in FIG. 11.

[0171] FIG. 15 shows the structure of the crRNA (SEQ ID NO: 8896) and tracrRNA (SEQ ID NO: 8897) in the form of a complex.

[0172] FIG. 16 shows exemplary Type II-B Cas9 proteins.

[0173] FIG. 17 shows an exemplary method of identifying and characterizing Cas proteins.

[0174] FIG. 18 shows exemplary Cas9-t had interference activity with NGCH PAM.

[0175] FIG. 19 shows pulldown of the Cas9-t protein bound to ncRNAs revealed processed CRISPR and tracrRNA.

[0176] FIG. 20 shows the cleavage of dsDNA by an exemplary Cas9-t in vitro using an sgRNA (SEQ ID NO: 8898).

[0177] FIG. 21—shows a sequence view of exemplary Type II-D IntCas9s (light gray bar), direct repeats (DR) (black bar), and tracrRNA (med gray bar).

[0178] The figures herein are for illustrative purposes only and are not necessarily drawn to scale.

### DETAILED DESCRIPTION OF THE EXAMPLE EMBODIMENTS

### General Definitions

[0179] Unless defined otherwise, technical and scientific terms used herein have the same meaning as commonly understood by one of ordinary skill in the art to which this disclosure pertains. Definitions of common terms and techniques in molecular biology may be found in Molecular Cloning: A Laboratory Manual, 2^{nd} edition (1989) (Sambrook, Fritsch, and Maniatis); Molecular Cloning: A Laboratory Manual, 4^{th} edition (2012) (Green and Sambrook); Current Protocols in Molecular Biology (1987) (F. M. Ausubel et al. eds.); the series Methods in Enzymology (Academic Press, Inc.): PCR 2: A Practical Approach (1995) (M. J. MacPherson, B. D. Hames, and G. R. Taylor eds.): Antibodies, A Laboratory Manual (1988) (Harlow and Lane, eds.): Antibodies A Laboratory Manual, 2^{nd} edition 2013 (E. A. Greenfield ed.); Animal Cell Culture (1987) (R. I. Freshney, ed.); Benjamin Lewin, Genes IX, published by Jones and Bartlet, 2008 (ISBN 0763752223); Kendrew et al. (eds.), The Encyclopedia of Molecular Biology, published by Blackwell Science Ltd., 1994 (ISBN 0632021829); Robert A. Meyers (ed.), Molecular Biology and Biotechnology: a Comprehensive Desk Reference, published by VCH Publishers, Inc., 1995 (ISBN 9780471185710); Singleton et al., Dictionary of Microbiology and Molecular Biology 2^{nd} ed., J. Wiley & Sons (New York, N.Y. 1994), March, Advanced Organic Chemistry Reactions, Mechanisms and Structure 4^{th} ed., John Wiley & Sons (New York, N.Y. 1992); and Marten H. Hofker and Jan van Deursen, Transgenic Mouse Methods and Protocols, 2^{nd} edition (2011).

[0180] As used herein, the singular forms “a”, “an”, and “the” include both singular and plural referents unless the context clearly dictates otherwise.

[0181] The term “optional” or “optionally” means that the subsequent described event, circumstance, or substituent may or may not occur and that the description includes instances where the event or circumstance occurs and instances where it does not.

[0182] The recitation of numerical ranges by endpoints includes all numbers and fractions subsumed within the respective ranges, as well as the recited endpoints.

[0183] The terms “about” or “approximately” as used herein when referring to a measurable value such as a parameter, an amount, a temporal duration, and the like, are meant to encompass variations of and from the specified value, such as variations of +/−10% or less, +/−5% or less, +/−1% or less, and +/−0.1% or less of and from the specified value, insofar such variations are appropriate to perform in the disclosed invention. It is to be understood that the value to which the modifier “about” or “approximately” refers is itself also specifically, and preferably, disclosed.

[0184] As used herein, a “biological sample” may contain whole cells and/or live cells and/or cell debris. The biological sample may be a cell lysate sample, e.g., a crude, non-isolated, and/or non-purified sample. The biological sample may contain (or be derived from) a “bodily fluid”. The present invention encompasses embodiments wherein the bodily fluid is selected from amniotic fluid, aqueous humour, vitreous humour, bile, blood serum, breast milk, cerebrospinal fluid, cerumen (earwax), chyle, chyme, endolymph, perilymph, exudates, feces, female ejaculate, gastric acid, gastric juice, lymph, mucus (including nasal drainage and phlegm), pericardial fluid, peritoneal fluid, pleural fluid, pus, rheum, saliva, sebum (skin oil), semen, sputum, synovial fluid, sweat, tears, urine, vaginal secretion, vomit and mixtures of one or more thereof. Biological samples include cell cultures, bodily fluids, cell cultures from bodily fluids. Bodily fluids may be obtained from a mammal organism, for example by puncture, or other collecting or sampling procedures.

[0185] The terms “subject,” “individual,” and “patient” are used interchangeably herein to refer to a vertebrate, preferably a mammal, more preferably a human. Mammals include, but are not limited to, murines, simians, humans, farm animals, sport animals, and pets. Tissues, cells and their progeny of a biological entity obtained in vivo or cultured in vitro are also encompassed.

[0186] The term “exemplary” is used herein to mean serving as an example, instance, or illustration. Any aspect or design described herein as “exemplary” is not necessarily to be construed as preferred or advantageous over other aspects or designs. Rather, use of the word exemplary is intended to present concepts in a concrete fashion.

[0187] The terms “polynucleotide”, “nucleotide”, “nucleotide sequence”, “nucleic acid”, “nucleic acid molecule”, and “oligonucleotide” are used interchangeably. They refer to a polymeric form of nucleotides of any length, either deoxyribonucleotides or ribonucleotides, or analogs thereof. Polynucleotides may have any three-dimensional structure and may perform any function, known or unknown. The following are non-limiting examples of polynucleotides: coding or non-coding regions of a gene or gene fragment, loci (locus) defined from linkage analysis, exons, introns, messenger RNA (mRNA), transfer RNA, ribosomal RNA, short interfering RNA (siRNA), short-hairpin RNA (shRNA), micro-RNA (miRNA), ribozymes, cDNA, recombinant polynucleotides, branched polynucleotides, plasmids, vectors, isolated DNA of any sequence, isolated RNA of any sequence, nucleic acid probes, and primers. The term also encompasses nucleic-acid-like structures with synthetic backbones, see, e.g., Eckstein, 1991; Baserga et al., 1992; Milligan, 1993; WO 97/03211; WO 96/39154; Mata, 1997; Strauss-Soukup, 1997; and Samstag, 1996.

[0188] A polynucleotide may comprise one or more modified nucleotides, such as methylated nucleotides and nucleotide analogs. If present, modifications to the nucleotide structure may be imparted before or after the assembly of the polymer. The sequence of nucleotides may be interrupted by non-nucleotide components. A polynucleotide may be further modified after polymerization, such as by conjugation with a labeling component. As used herein, the term “wild type” is a term of the art understood by skilled persons and means the typical form of an organism, strain, gene, or characteristic as it occurs in nature as distinguished from mutant or variant forms. A “wild type” can be a base line. As used herein the term “variant” should be taken to mean the exhibition of qualities that have a pattern that deviates from what occurs in nature. The terms “non-naturally occurring” or “engineered” are used interchangeably and indicate the involvement of the hand of man. The terms, when referring to nucleic acid molecules or polypeptides mean that the nucleic acid molecule or the polypeptide is at least substantially free from at least one other component with which they are naturally associated in nature and as found in nature. “Complementarity” refers to the ability of a nucleic acid to form hydrogen bond(s) with another nucleic acid sequence by either traditional Watson-Crick base pairing or other non-traditional types. The percent complementarity indicates the percentage of residues in a nucleic acid molecule which can form hydrogen bonds (e.g., Watson-Crick base pairing) with a second nucleic acid sequence (e.g., 5, 6, 7, 8, 9, 10 out of 10 being 50%, 60%, 70%, 80%, 90%, and 100% complementary). “Perfectly complementary” means that all the contiguous residues of a nucleic acid sequence will hydrogen bond with the same number of contiguous residues in a second nucleic acid sequence. “Substantially complementary” as used herein refers to a degree of complementarity that is at least 60%, 65%, 70%, 75%, 80%, 85%, 90%, 95%, 97%, 98%, 99%, or 100% over a region of 8, 9, 10, 11, 12, 13, 14, 15, 16, 17, 18, 19, 20, 21, 22, 23, 24, 25, 30, 35, 40, 45, 50, or more nucleotides, or refers to two nucleic acids that hybridize under stringent conditions. As used herein, “stringent conditions” for hybridization refer to conditions under which a nucleic acid having complementarity to a target sequence predominantly hybridizes with the target sequence, and substantially does not hybridize to non-target sequences. Stringent conditions are generally sequence-dependent and vary depending on a number of factors. In general, the longer the sequence, the higher the temperature at which the sequence specifically hybridizes to its target sequence. Non-limiting examples of stringent conditions are described in detail in Tijssen (1993), Laboratory Techniques In Biochemistry And Molecular Biology-Hybridization With Nucleic Acid Probes Part I, Second Chapter “Overview of principles of hybridization and the strategy of nucleic acid probe assay”, Elsevier, N.Y. Where reference is made to a polynucleotide sequence, then complementary or partially complementary sequences are also envisaged. These are preferably capable of hybridizing to the reference sequence under highly stringent conditions. Generally, in order to maximize the hybridization rate, relatively low-stringency hybridization conditions are selected: about 20 to 25° C. lower than the thermal melting point (Tm). The Tm is the temperature at which 50% of specific target sequence hybridizes to a perfectly complementary probe in solution at a defined ionic strength and pH. Generally, in order to require at least about 85% nucleotide complementarity of hybridized sequences, highly stringent washing conditions are selected to be about 5 to 15° C. lower than the Tm. A sequence capable of hybridizing with a given sequence is referred to as the “complement” of the given sequence.

[0189] As used herein, the term “genomic locus” or “locus” (plural loci) is the specific location of a gene or DNA sequence on a chromosome. A “gene” refers to stretches of DNA or RNA that encode a polypeptide or an RNA chain that has a functional role to play in an organism and hence is the molecular unit of heredity in living organisms. For the purpose of this invention, it may be considered that genes include regions that regulate the production of the gene product, whether or not such regulatory sequences are adjacent to coding and/or transcribed sequences. Accordingly, a gene includes, but is not necessarily limited to, promoter sequences, terminators, translational regulatory sequences such as ribosome binding sites and internal ribosome entry sites, enhancers, silencers, insulators, boundary elements, replication origins, matrix attachment sites and locus control regions.

[0190] As used herein, “expression of a genomic locus” or “gene expression” is the process by which information from a gene is used in the synthesis of a functional gene product. The products of gene expression are often proteins, but in non-protein coding genes such as rRNA genes or tRNA genes, the product is functional RNA. The process of gene expression is used by all known life-eukaryotes (including multicellular organisms), prokaryotes (bacteria and archaea) and viruses to generate functional products to survive.

[0191] As used herein “expression” of a gene or nucleic acid encompasses not only cellular gene expression, but also the transcription and translation of nucleic acid(s) in cloning systems and in any other context. As used herein, “expression” also refers to the process by which a polynucleotide is transcribed from a DNA template (such as into and mRNA or other RNA transcript) and/or the process by which a transcribed mRNA is subsequently translated into peptides, polypeptides, or proteins. Transcripts and encoded polypeptides may be collectively referred to as “gene product.” If the polynucleotide is derived from genomic DNA, expression may include splicing of the mRNA in a eukaryotic cell.

[0192] The terms “polypeptide”, “peptide” and “protein” are used interchangeably herein to refer to polymers of amino acids of any length. The polymer may be linear or branched, it may comprise modified amino acids, and it may be interrupted by non-amino acids. The terms also encompass an amino acid polymer that has been modified; for example, disulfide bond formation, glycosylation, lipidation, acetylation, phosphorylation, or any other manipulation, such as conjugation with a labeling component. As used herein the term “amino acid” includes natural and/or unnatural or synthetic amino acids, including glycine and both the D or L optical isomers, and amino acid analogs and peptidomimetics. As used herein, the term “domain” or “protein domain” refers to a part of a protein sequence that may exist and function independently of the rest of the protein chain.

[0193] As used herein, when a protein (e.g., an enzyme) is mentioned, the term also includes a functional domain of the protein (e.g., enzyme). For example, a reverse transcriptase may refer to a reverse transcriptase protein or a reverse transcriptase domain. When a term refers to a protein, e.g., a Cas protein, a transposase, etc., the term encompasses both the full length of the protein as well as a functional fragment of the protein. The term “functional fragment” means that the sequence of the polypeptide may include less amino acid than the original sequence but still enough amino acids to confer the enzymatic activity of the original sequence of reference. It is well known in the art that a polypeptide can be modified by substitution, insertion, deletion and/or addition of one or more amino acids while retaining its enzymatic activity. For example, substitutions of one amino acid at a given position by chemically equivalent amino acids that do not affect the functional properties of a protein are common.

[0194] The terms “orthologue” (also referred to as “ortholog” herein) and “homolog” (also referred to as “homolog” herein) are well-known in the art. By means of further guidance, a “homolog” of a protein as used herein is a protein of the same species and performs the same or a similar function as the protein it is a homolog of. An “orthologue” of a protein, as used herein, is a protein or polynucleotide, respectively, of a different species that performs the same or a similar function as the protein it is an orthologue of. A homologous or orthologous protein as used herein is a protein that shares a common structure, as the protein it is a homolog or ortholog of, respectively, e.g., primary structure (i.e., a polypeptide sequence), secondary structure (i.e., a local folded structure, e.g., a-helix, b-pleated sheet), and/or tertiary structure (i.e., an overall 3-dimensional structure).

[0195] By means of further guidance, a “homolog” of a polynucleotide as used herein is a polynucleotide that shares a common nucleotide sequence as the polynucleotide it is a homolog of. Homologous genes, for example, can share a common ancestral gene. An “orthologue” of a polynucleotide as used herein is a polynucleotide of a different species which shares a common nucleotide sequence as the polynucleotide it is an orthologue of. Orthologous genes, for example, can share a common ancestral gene but occur in different species. Homologous or orthologous polynucleotides may but need not be structurally related or are only partially structurally related to the polynucleotide it is a homolog or ortholog of, respectively. A homologous or orthologous polypeptide as used herein is a polypeptide which shares a common structure as the protein it is a homolog or ortholog of, respectively, e.g., primary structure (i.e., a polynucleotide sequence), secondary structure (i.e., a local folded structure, via complementary base pairing, e.g., double helices, stem-loop structures, pseudoknots, and G-quadruplexes), and/or tertiary structure (i.e., an overall 3-dimensional structure, e.g., A-, B-, or Z-form double helices, RNA triplexes).

[0196] Homologs and orthologs may be identified by homology modelling (see, e.g., Greer, Science vol. 228 (1985)1055, and Blundell et al. Eur J Biochem vol 172 (1988), 513) or “structural BLAST” (Dey F, Cliff Zhang Q, Petrey D, Honig B. Toward a “structural BLAST”: using structural relationships to infer function. Protein Sci. 2013 April;22 (4): 359-66. doi: 10.1002/pro.2225.). See also Shmakov et al. (2015) for application in the field of CRISPR-Cas loci.

[0197] As described in aspects of the invention, sequence identity is related to sequence homology. Homology comparisons may be conducted by eye, or more usually, with the aid of readily available sequence comparison programs (e.g., homology modelling, see, e.g., Greer, Science vol. 228 (1985)1055, and Blundell et al. Eur J Biochem vol 172 (1988), 513) or “structural BLAST” (Dey F, Cliff Zhang Q, Petrey D, Honig B. Toward a “structural BLAST”: using structural relationships to infer function. Protein Sci. 2013 April;22 (4): 359-66. doi: 10.1002/pro.2225.)). See also Shmakov et al. (2015) for application in the field of CRISPR-Cas loci. These commercially available computer programs may calculate percent (%) homology between two or more sequences and may also calculate the sequence identity shared by two or more amino acid or nucleic acid sequences. In an embodiment, the homologue or orthologue of a protein has an amino acid sequence homology or identity, or a polynucleotide a nucleic acid sequence homology or identity, of at least 80%, more preferably at least 85%, even more preferably at least 90%, such as for instance at least 95% with the protein (e.g., a wild type protein) or the polynucleotide (e.g., a wild type gene), respectively. A protein or polynucleotide derived from a species means that the protein or nucleic acid, respectively, has a sequence identical to an endogenous protein or nucleic acid, respectively, or a portion thereof in the species. The protein or nucleic acid derived from the species may be directly obtained from an organism of the species (e.g., by isolation), or may be produced, e.g., by recombination production or chemical synthesis.

[0198] The terms “subject,” “individual,” and “patient” are used interchangeably herein to refer to a vertebrate, preferably a mammal, more preferably a human. Mammals include, but are not limited to, murines, simians, humans, farm animals, sport animals, and pets. Tissues, cells, and their progeny of a biological entity obtained in vivo or cultured in vitro are also encompassed.

[0199] Various embodiments are described hereinafter. It should be noted that the specific embodiments are not intended as an exhaustive description or as a limitation to the broader aspects discussed herein. One aspect described in conjunction with a particular embodiment is not necessarily limited to that embodiment and can be practiced with any other embodiment(s). Reference throughout this specification to “one embodiment”, “an embodiment,” or “an example embodiment,” means that a particular feature, structure, or characteristic described in connection with the embodiment is included in at least one embodiment of the present invention. Thus, appearances of the phrases “in one embodiment,” “in an embodiment,” or “an example embodiment” in various places throughout this specification are not necessarily all referring to the same embodiment but may. Furthermore, the particular features, structures, or characteristics may be combined in any suitable manner, as would be apparent to a person skilled in the art from this disclosure, in one or more embodiments. Furthermore, while certain example embodiments described herein include some, but not other features included in other embodiments, combinations of features of different embodiments are meant to be within the scope of the invention. For example, in the appended claims, any of the claimed embodiments can be used in any combination.

[0200] All publications, published patent documents, and patent applications cited herein are hereby incorporated by reference to the same extent as though each individual publication, published patent document, or patent application was specifically and individually indicated as being incorporated by reference.

### Overview

[0201] The present disclosure provides non-naturally occurring, engineered compositions and methods of using said compositions for nucleic acid-targeting and modification. In one aspect, a composition comprises one or more components of a non-naturally occurring, engineered multimeric CRISPR-Cas system. In an embodiment, a composition comprises a β-CASP polypeptide (also referred to herein as a metallo-β-lactamase fold like nuclease) and a plurality of Cas polypeptides. The compositions may further comprise one or more guide molecule(s). The guide molecule is capable of forming a multimeric CRISPR-Cas complex with the β-CASP polypeptide and the plurality of Cas polypeptides(s). In an embodiment, each guide molecule is capable of directing said multimeric CRISPR-Cas complex to a target sequence in a target molecule, e.g., a target polynucleotide. For ease of reference, this new CRISPR-Cas system may be referred to as a Type VII CRISPR-Cas system.

[0202] In an embodiment, the composition further comprises one or more functional domains associated with the Cas polypeptides or other components, enabling various modifications of target polynucleotides. In an embodiment, the functional domain may be a nucleotide deaminase, e.g., for modifying a single nucleotide or base pair in a target polynucleotide.

[0203] In another aspect, embodiments disclosed herein include applications of the compositions herein, including therapeutic and diagnostic applications. Methods and systems for the delivery of the compositions is also provided, including to a variety of cells and via a variety of particles, vesicles, and vectors.

[0204] In another aspect the present disclosure is directed to delivery compositions used to deliver one or more components of the Type VII CRISPR-Cas system to a cell or population of cells in vitro, ex vivo, or in vivo. In another aspect, the present disclosure is directed to methods of modifying target polynucleotides using the Type VII CRISPR-Cas systems and/or compositions thereof disclosed herein, including the use of the Type VII CRISPR-Cas systems and/or compositions for diagnostic and/or therapeutic uses.

[0205] In another aspect, embodiments disclosed herein provide non-natural or engineered compositions, systems, and methods for nucleic acid modification. In general, the compositions and systems herein comprise a subset of newly identified Class 2, Type II Cas polypeptides that are smaller in size than previously discovered Class 2, Type II Cas polypeptides. In some embodiments, the compositions and systems comprise one or more Type II Cas polypeptides that are less than 850 amino acids in size and one or more nucleic acid guide molecules. The relatively small sizes of these Cas polypeptide may allow easier engineering, multiplexing, packaging, and delivery, and use as a component in a fusion construct, e.g., fusion with a nucleotide deaminase. In some examples, the Type II Cas polypeptides are Type II-B Cas9 or Type II-C Cas9 polypeptides.

[0206] In another aspect, embodiments disclosed herein provide non-natural or engineered compositions and systems as well as their use in methods of modifying a target polynucleotide. In general, the systems include a Cas polypeptide that has a size range that is smaller than canonical Cas9 polypeptides, e.g. less than 950 amino acids in size, and in some embodiments, less than 750 amino acids in size. The large size of existing CRISPR-Cas systems can pose challenges for certain delivery methods and limit their efficacy. The smaller Cas polypeptides of the present disclosure can make them easier to deliver into target cells. The smaller size can enhance the efficiency of delivery methods, such as viral vectors or physical methods, and improve the overall delivery success rate.

[0207] Other compositions, compounds, methods, features, and advantages of the present disclosure will be or become apparent to one having ordinary skill in the art upon examination of the following drawings, detailed description, and examples. It is intended that all such additional compositions, compounds, methods, features, and advantages be included within this description, and be within the scope of the present disclosure.

### Engineered Nucleic Acid Targeting Systems

[0208] Described in exemplary embodiments herein are engineered nucleic acid targeting compositions comprising a Cas polypeptide and a nucleic acid guide molecule capable of forming a complex with the Cas polypeptide and directing sequence-specific binding to a target sequence in a target polynucleotide. The Cas polypeptide comprises a split RuvC nuclease domain, and a HNH nuclease domain, and is about 950 amino acids or less in size. The Cas polypeptide may function as a nuclease. In one embodiment, the Cas functions as a DNA nuclease, although other modified functionalities are possible and as described in further detail below. The Cas polypeptide and guide molecule may be referred to as a CRISPR-Cas complex. The guide molecule generally comprises a guide sequence and a scaffold. The guide sequence determines which target sequence is bound by the complex and can be re-engineered each time a new target sequence is desired. The scaffold portion of the guide helps facilitate formation of the complex with the Cas polypeptide.

### CRISPR-Cas Systems

[0209] In general, a CRISPR-Cas system or CRISPR system as used in herein and in referenced documents, such as WO 2014/093622 (PCT/US2013/074667), refers collectively to genes, transcripts, proteins, and other elements involved in the expression or directing the activity of CRISPR-associated (“Cas”) genes or gene products, and/or the gene products themselves (e.g., Cas polypeptides). These Cas genes or gene products include, for example, sequences encoding a Cas gene, a trans-activating CRISPR sequence (e.g. tracrRNA or an active partial tracrRNA), a tracr-mate sequence (encompassing a “direct repeat” and a tracrRNA-processed partial direct repeat in the context of an endogenous CRISPR system), a guide sequence (also referred to as a “spacer” in the context of an endogenous CRISPR system), or “RNA(s)” as that term is herein used (e.g., RNA(s) to guide Cas, such as a Type-VII, Type II-B Cas, Type II-C Cas, Type II-D Cas, e.g. CRISPR RNA and transactivating (tracr) RNA or a single guide RNA (sgRNA) (chimeric RNA)) or other sequences and transcripts from a CRISPR locus. In general, a CRISPR-Cas system is characterized by a Cas polypeptide (used interchangeably herein with CRISPR protein, CRISPR enzyme, CRISPR-Cas protein, CRISPR-Cas enzyme, Cas protein, or Cas enzyme) and a nucleic acid guide molecule, both of which promote the formation of a CRISPR-Cas complex at the site of a target sequence (also referred to as a “protospacer” in the context of an endogenous CRISPR system). See, e.g., Shmakov et al. (2015) “Discovery and Functional Characterization of Diverse Class 2 CRISPR-Cas Systems”, Molecular Cell, DOI: dx.doi.org/10.1016/j.molcel.2015.10.008 and Makarova et al., 2020. Nature Rev Microbiol. 18:67-83.

### Type VII CRISR-Cas Systems and Compositions

[0210] In one aspect, embodiments disclosed to herein are directed to non-naturally occurring, engineered CRISPR-Cas systems or compositions, referred to herein by the proposed designation of a “Type VII” CRISPR-Cas systems or compositions, comprising a β-CASP polypeptide which forms a multimeric Cas polypeptide complex in combination with one or more Cas polypeptides. As used herein a Type VII CRISPR-Cas system may also be referred to as a Type VII CRISPR system or a Type VII CRISPR effector protein system. As used herein a multimeric Cas polypeptide complex may also be referred to as a Type VII CRISPR effector protein. As used herein, the β-CASP polypeptide may also be referred to as “Cas15”. The other Cas polypeptides may include a Cas5 and a Cas7. In an embodiment, the Type VI system further comprises a Cas6. In one embodiment, the Cas15. Cas5, and Cas7 define a minimal effector complex capable of endonuclease activity.

[0211] In an embodiment, the multimeric Type VII Cas system may form a CRISPR-Cas complex with a guide molecule.

### Cas15 Polypeptides

[0212] In an embodiment, the Cas15 comprises a β-CASP domain. The β-CASP domain is a nuclease fold found in all domains of life that exhibits RNA endonuclease, 5′ to 3′ exonuclease and/or DNA nuclease activity. Dominski et al. Biochim. Biophys. Acta. 1829, 532-551 (2013). β-CASP domain containing proteins are involved in non-homologous end joining DNA repair (NHEJ), V (D) J recombination, RNA surveillance, mRNA/rRNA maturation and RNA decay. Mandel et al. Nature. 444, 953-956 (2006); Phung et al. Nucleic Acids Res. 48, 3832-3847 (2020); M. R. Lieber. Annu. Rev. Biochem. 79, 181-211 (2010); Callebaut et al. Nucleic Acids Res. 30, 3592-3601 (2002): Moshous et al. Cell. 105, 177-186 (2001).

[0213] Structural modeling of Cas15 with AlphaFold2 shows two distinct domains, namely the N-terminal β-CASP domain (FIGS. 8G, 9) and a C-terminal adaptor domain with structural similarity, but not sequence similarity to, the approximately 200 amino acid C-terminal domain of Cas10 (FIG. 5D), the large subunit of type III systems that is involved in target RNA interaction. You et al. Cell. 176, 239-253.e16 (2019). In an embodiment, the Cas15 polypeptide comprises a plurality of residues capable of coordinating with Zn²⁺ ions. See FIG. 8G. The Cas15 polypeptide functions as the nuclease effector of the Type VII system. While not being bound by a theory, Cas15 is believed to function as an RNA nuclease. See FIGS. 3I, 3J.

[0214] In an embodiment, the Cas 15 polypeptide comprises one or more amino acid sequences of Table 1.

TABLE 1

| Poly- | |
|---|---|
| peptide | Amino Acid Sequence |
| Cas15 | MIWSHPQFEKGGGSGGGSGGSAWSHPQFEKSSGSMIKFIG |
| | GASKVTGSAFLLETGNAKILIDCGIEQEKGIEKDNNEIIE |
| | KKINEIGKADICILTHAHLDHSGLVPLLVKKRKVNKIIST |
| | PATKELCRLLFNDFQRIQEENNDIPLYSYDDIESSFEIWD |
| | EIDDRNTIELFDTKITFYNNSHIIGSVSVFIETHNGNYLF |
| | SGDIGSKLQQLMDYPPDMPDGNVDYLILESTYGNKSHDSS |
| | DRDRLLEIAKTTCENGGKVLIPSFAIGRLQEVLYTFSNYN |
| | FNFPVYIDSPMGSKVTNLIKEYNIYLKKKLRRLSITDDLF |
| | NNKYIAINTSNQSKELSNSKEPAVIISASGMLEGGRILNH |
| | LEQIKNDENSTLIFVGYQAQNTRGRKILDGEEKVRCRIEK |
| | LNSFSAHADQDELIDYIERLKYTPYKVFLVHGEKEQREIL |
| | AKRIISKKIRVELPENYSQGKEILIEKKVVLNINTDNMCN |
| | FASYRLMPFSGFIVEKDDRIEINDKNWFDMIWNEEYNKMR |
| | SQIVAEDFSTDQNEDSMALPDMSHDKIIENIEYLFNIKIL |
| | SKNRIKEFWEEFCKGQKAAIKYITQVHRKNPNTGRRNWNP |
| | PEGDFTDNEIEKLYETAYNTLLSLIKYDKNKVYNILINFN |
| | PKL* |
| | (SEQ ID NO: 1) |
| MLB- | MTGLTFIGATREVTGSCHLLEVNDRRILLDCGMRQGRGVS |
| like | KASEFPFKPDGINAVILSHAHIDHSGLLPLLVSQGFKGKI |
| | YSTVATRELVRILLYDSAKIQEEDYVAGGEPPLYSEDDVN |
| | ETMRLFEVFPYHEEFDLLNVGTVKFYDAGHILGSAITVIS |
| | TAKTVCYTGDLGHGMSPILRAPETPIEEVDYLIMESTYGN |
| | KLHSRDDPTLKIKEIVSEVYKNKGKLLIPVFAVGRAQEIL |
| | YSLKEMKEAGEIPHDLKVYLDSPMADKSTSLYSNMADYLK |
| | PEFYTQFLNNTSPFEFEGFEIIKGHEDSLNLATSNGTAII |
| | LAASGMLEGGRVMNHLPKILSDKNSVICFVGYQVEGTHGR |
| | TLLDGVSEIKLKEKVVEVSCKIEAISSYSAHADKKGLFNF |
| | LNSLKFNPYKVFVVHGEEDANKAVVESLKNLKLRAVAPTR |
| | GDTESFGGTVIKIIKEKEFKIDFSPEYITLKKSHLRIAPF |
| | CGALVESKNGMIRLISNSVLIGLMEAEEQAFTNEFKEKKI |
| | ELEDLQESNNIPSKTENLSENITSFISYDMYCKKLEKFYN |
| | SKDNFGDSILSKNLAHEIYCKAIREGKDSVIRLINQKKDK |
| | GKFNIDDEEIIEKFVELIKIAVINLTIREFCKGLEPYKIK |
| | KQC* |
| | (SEQ ID NO: 2) |
| | VVKIRFLGACREVTGSMHLLDTGKTKILLDCGMRQGVDSV |
| | EREKHIPFDPSEIDYIILSHAHIDHSGLIPYLYLRGFRGR |
| | VVTTTATRAIAELLLLDSAKIMKEEYEKSNIPPLFDERDV |
| | VEVMSHFDAYPYNKPVRLQDVKLSFLDAGHILGSAVTLLR |
| | INGLQICYTGDIGSGTSPLMNPPTPPKEADVLIMESTYGN |
| | RRHEDRAKAVETMKAVISDTIKAGGKVLIPVFAVGRAQEV |
| | LYVLRNLRDKIRVKVYLDTPLGSRVTDIYKSYSNMLRKEF |
| | YELFLRGKNPIEFEGLEYVTTYNRSRELAKSNEPCIILSA |
| | SGMLEGGRVLNHLPYILQDENSTVLFVGYQAEGTLGRQIV |
| | DGNKLVYVNGDEVDVRCNVVNVSAFSAHADEDGLVGFVEG |
| | MDYYPRRIYIVHGEEEAARNLLARLPKVRKSIPERGEEAD |
| | LGWGGRAGMDGEREGRAIIDFKPGFVDFMGLSIHPEPLLL |
| | VREGEMLILRRYGEVVGELMSAGEELAVEIRAAVKSAEVE |
| | KISVEAGDIARLREFMEAGILSKKLSKEIVCTLLKEGRDE |
| | VIRMLNLKRDKDRFPVKDPEVVNDFVEYMVNLLKTRKEVE |
| | IVAAFEELIPKISGMCY* |
| | (SEQ ID NO: 3) |
| | MKITFLGGVREVTGSHHLLEINGRRILLDCGLRQGKGLPK |
| | APEFPFKAGDIDAVVLSHAHLDHSGLLPFLACSGFSGKIY |
| | STSATRELARLLLLDAAKIMKEDYGKGLSDAPPLYDEEAV |
| | HRTIRMFETADYNQEIEISPEVSLKFLDAGHILGSAVSLL |
| | KIKGVGSLCYTGDIGHGRSPILNPPQVPEEDVTFLMIEST |
| | YGNRKHGRGGEKELENVITKTLSRGGKVLIPVFAVGRAQE |
| | ILFCIKRLVEEGKVNAKVYVDTPMGESATDLYSSFSNYLR |
| | EEFREHFLRGKSPFEFSGLEFVRGHKTSLDIAESEEPCII |
| | LAASGMLEGGRVLNHLPGILKDEKHSLVFVGYQAEGTLGR |
| | EILEAANSTMRRVRINDSEVELRCSVVALSSFSAHADIDG |
| | LIGFASRLKYCPYRTFVVHGEHESSLNLANELIKLKHRAR |
| | VPGIKEEFSLGFTRVVVEKTRDVELGFSPEFTCLGDAEVA |
| | VFSGGLVKTASGIKLLNKQRFLEFLDELLTKEEEMLKARV |
| | RVKSGLTDQKKEEESKKALISEREIIEKFRAFQEKGILTK |
| | RLMESIYCELLTSGDEAIRMLNEKRRKKRFNITDEKIIDE |
| | FCDFMVKLLDSVDEKVIIRCLKKFDIHPEC* |
| | (SEQ ID NO: 4) |
| | MKLKFLGATQEVTGSCILLETKEHKYLFDCGMYQGPEKRD |
| | QSNLFFNPHEIDGIFLSHAHIDHSGLLPLLWKRGYNGPIY |
| | STTATKELTRILLLDSAKIQAEEENETGIEALYNESDVKN |
| | IINNFEGIPYKRKTSLSDLEFSFCDAGHILGSAITYLNLN |
| | GITLTYTGDLGHGQSPILNPPTKIKASDYLIIESTYGNKT |
| | HSNLNIVDKFLSKEIKETMKNEGKLLIPVFAVGRSQEILY |
| | YLWKIKDQIKDIPIFFDTPMGTDVTELYSEFQDYLKPSFR |
| | EYFLKNKSIFHLENLKFVKTQKESRSIASSSNSSIILAAS |
| | GMLEGGRVMNHIESILSDTNSKILFSGYQPEGTLGRKVME |
| | KKSKLLINDKEIELKCQICKLSGLSAHADKTGLLSFFKNF |
| | GIHPQKTFIVHGEKEASLNLFNMISHEHGKAIIPSKLHRE |
| | SLSGIMVKKLEKNNIDLKFKPSFFKIGNKEIMPFVGAIIK |
| | NKEGMEVIDLNQYNQLMNKYKDQMELPLNTEIKDIIRPID |
| | QDQVLIISPEEFAKNLKSLHSDIFSKRKIKDYIKILEKEG |
| | KDQLIRTFLVDLNKNRLGKSLYVANPSIFEIEIKKFKDFF |
| | IAGLNSIERYEIIKILEEYLESK* |
| | (SEQ ID NO: 5) |
| | MRLKFLGGAREVTGSSFLLDFGYKILVDCGMRQKEEEKIF |
| | LKEEVDAVLLTHAHLDHSGLLPLLIKNNLLKGNVYSTPAT |
| | KEVASLLLFDAAKIQREDEEKGKKALFDENDIVNLLKVWE |
| | TYDLNKQFSLGNARVKFLDAGHIIGSSQILIEIEGIKILF |
| | TGDIGCGRSLLLNKPDVPKEHIDYLIIESTYGDREHPDKP |
| | PEEILYEEITSLGDYSRILIPAFAVGRAQEIIYGLKLKGL |
| | DIPVFLDSPLAEKVAETYDYFLPYLKPEIKNKWKKMGEMF |
| | SIPHLEYVRSNKRSKELAEDRKKKIVIAASGMLEGGRVMN |
| | HLPHILKDENAVLLFIGYQAEGTLGRKILEGERSVWIEDK |
| | EIEVKCSIKKIEGFSAHSDRRGLINFINNLPFYPSYIFIV |
| | HGEYETQKRFADELRIQKFYPYIPSKEEEIDLKGGAREKI |
| | IIDFEKKFQKYGMYEIMLFTGGILKDDNLIRVISKEDLFE |
| | IINEEEKRLKHKEKVEIPVDIEKEEIESITEEEFYRELKN |
| | MREEKILSKSKLQEFIENASPGIDNLFSWIRITKNKIRFY |
| | PDKEKNDMVAEILLRGINSLREIAVSIAEKVLEET* |
| | (SEQ ID NO: 6) |
| | MKICFFGATKEVTGSCFLIKTYKSSFLLDCGQRQGPDEEK |
| | LPRFQFNPKEIDFVILSHAHIDHSGLLPKMIAEGFDGEIY |
| | STVATRDVAELLLKDSAKIQKEDVEKGKILPLFTEKDVTE |
| | TMEKFTVSEWDTPIETSHDVTVTFLDAGHILGASISIIDI |
| | AGVGRVVYTGDIGHGRSPLMNAPVKLSNADYLIIESTYGA |
| | KQHPFFYPKEELRQIVQDTYNSKGKVLIPVFAVGRAQEIL |
| | YLLKLLYDENKLPNIPVYFDTPLGREATSLYRHHQNYLRT |
| | DFRSSFLKGGNPFNFGTLDFVKGHQRSLDISLSEEPCIVM |
| | AASGMLTGGRIHNHLKSTLEDTNSSLVFVGYQAEGTPGRE |
| | IIDGKRKVEIEGKEYQVKLSVKYIQGLSAHADTDGLFAFA |
| | NSAEILPKKIFVVHGEPENAEALQERIIKNLRIDTCVPEK |
| | GYIENFMEREIIKVIVKDVHLDFTPQFTRFDEQEVFPIVG |
| | ALLRKEDGIHLISKEQYTRILDEAEDKLGHLLERVTEKRD |
| | ITEVEVEGTPEEEMSEAVFKETMIKDALNGILSRSRAREL |
| | KQMIEEEGRNATIAHINKLARKDRLYPQDREKQEELRKVL |
| | VAGINSFPQLALTLLNEVIEK* |
| | (SEQ ID NO: 6) |
| | VSTCEAIPLPSLRFIGATKEVTGSCHLLEVDDRKVLLDFG |
| | MKQGEGADRAFEFREFHPGEIDAVLLSHAHIDHSGLLPYL |
| | VAQGFEGKIHSTVATKDLARLLLEDSAKIQKMDSEAGGEA |
| | PLYTAEDVVETVRRIEPAEYGKEFEIPGGSACFYDAGHIL |
| | GSAVTVISAAGKTVCYTGDLGHSRSPILNAPQVPEEEIDY |
| | LIMESTYGNRSHSDERPEEKLSELAGSAYRGRGKLLVPVF |
| | AVGRAQELVLTIKNMKEHGTIPADMKVYLDSPMAREATEL |
| | YADWANHLKPEFYSMFYRGESPFEFEGFELIKSHGSSEKL |
| | AEEEGPAIILAASGMLEGGRVLNHLPRVLKDRSSAICFVG |
| | YQAEGTLGRELVDGGSEVRVNEELVRVLCRVDSIGSYSAH |
| | AGRNGLLGFLDSLPVVPYKTFLVHGEPDAAKALAGEVHRR |
| | RLRVAVPDRGDREPFGGVVSRTVREKEFELGIKPSYTDIG |
| | GGVQVAPVVGALVTDPGGNVRLVSQAELHELMEKRKGELE |
| | GDIREMKAAPQRAAEGTAAGAGEAHERDRTASITLQGYRE |
| | KLEHFATSRKDAMGDTILTRKLAHEIYCKARREGPDSVIK |
| | FINKKLEKKKFNVDDEEIMEEFSEFIKGAVGSLRVDEFCG |
| | ELDEYRSLGGCE* |
| | (SEQ ID NO: 7) |
| | MNRIKFVGAAGEVTGSCHLLELNGKKILLDCGFKQGEGAD |
| | NSPQWPFRPQDIDAVVLSHAHIDHSGHLPTLVSQGFKGRI |
| | YATEATRELARVLLLDSAKIQEEDHENGRTAEPPLYGEED |
| | VHETVRRIEPHPYEKSFELPGGATGKFYDAGHILGSAVVV |
| | LEAGKTICYTGDLGHGESPILGAPQVPREDVDYLIMESTY |
| | GGEHRGGTSEDAENRLAELVESACVESGGRLLIPVFAVGR |
| | AQEILYAIRKLKESGRVPEDIPVYLDSPMATRVTDLHSTM |
| | ADYLRPEFYGKFVEGDSPFEFDGFEPVRSNRDSSRLAEER |
| | SPAVVLAASGMVEGGRVMNHISRVLKDDNSTICFVGFQVK |
| | GTLGRDIRDGNEEVVVGDTPVEVKCGVESLPFFSAHADTD |
| | GLMKFFDGLDPLPYKTFAVHGEPESCETVVSAVAEKKARC |
| | AAPSPDHEEAFGGVTEVVKEQGGFKMDLAPDFVRVGSRRF |
| | APVVGVMVEDEDGTLRLTNESEVIPLWEDERRSSLLRFNE |
| | SLPVGNGLRVPGDDSGGEDSADMAYEEFCDRLEELARRTD |
| | EYGDSIMTKALARDLCGEAVVGANAVIRMINSKEEKGKFN |
| | IEDPDTVAEFCETVRRAVMSLNQYEFREALSRYNERDCI* |
| | (SEQ ID NO: 8) |
| | MSSPINIQFCGATGEVTGSMHLLTIDNKKILLDAGAFQGT |
| | EAKDKNSAPLIFDPAEIDYIFLTHAHYDHTGRLPMLCQRG |
| | FKGEIITTPVTREITFRIMDDSLRIQKEEGKELLFSEDDV |
| | KKAKSLFVPLNEDYPQWQDDEKKIKIKFIPSEHILGSSSI |
| | FIEEPVSLLYSGDVGGGSSSLHSIP KPPDTCDYLII |
| | ESTYGNRNLEKSNSEILSQLKAAVESIGKNNSRLLIPIFS |
| | IDRAEEILFMLRELNIKEKIYLDTPMGIDILDIYSHNKYL |
| | LSKISDEFIKKNSKELDKIFHPDNFERLRAKKNSDELAES |
| | SESCIILASSGMLEGGRIRKYLPQFLPDEKNILLFSGFQA |
| | EGTLGRDIINGYPEVNVDGIPVKVKAQIRKIEGLSAHADK |
| | TALLNYIDCFKTLPVKIFIVHGEMVASLELSDAIKEKFRI |
| | KTVLPKINEKYDLAAGEIRERTIIKGISIGNVRLNFENIS |
| | GKKIALFAGGIIDNGNEYSLVSVREIEEMLHDLKKEMVKS |
| | LPEEIIISETHIRPETLSSATPPSPEELILGLIKIFKAGY |
| | VSKGLIRDLMDASERGISEYRKVIDKKIKNDALILDENDL |
| | RRKGIQIPDRSLISGQLEDLLKRSSLMEQLNLQLALHRMF |
| | TEIK* |
| | (SEQ ID: 9) |
| | MKIQFLGAAKEVTGSCILIETRRSKFLLDCGQRQGQGAES |
| | SPEFQFNPREIDFVILSHAHIDHSGLLPKLVAEGFDGEIY |
| | STVATRDVAELLLEDSAKIQKEAESGAGLIPMFTEEDVAL |
| | TMDKFSVYEWDVPIDASDDVTVTFLDAGHILGASISVIDI |
| | SGAGRLVYTGDIGHGHSPIMNPPAKLNNTDFLIIESTYGA |
| | KRHPAVNPKESLKQIILDTYANKGKVLIPVFAVGRAQEVL |
| | YILKQLYEESELPNIPVYFDTPLGAETTSLYQYHQNYLRA |
| | QFRSSFLKGENPFHFGTLDFIRGNNRSLDVASSEEPCVVI |
| | AASGMLTGGRILNHLKTTLEDPDSSLVFVGYQAEGTPGRE |
| | ILDGKKRVEIAGKEYEVKLKVHYIPGLSAHADADGLFSFV |
| | NSADILPKKIFVVHGEPENAEALQRRIINNLRIDTFVPEM |
| | GYTENFMDREVVKVVEKDVHLDFKPEFTKVGELEVYPFVG |
| | ALLKKQDGIHLISKEQYIGILTETEEELETMLTKMTSKEG |
| | LEAETETETAEPVEEISETEFKETLLKYADVGIFSRSRAR |
| | ELKNMLENEGRDATIAHINKLARKDRLYPLDTTKQEELRR |
| | VLVAGINSFPQKARELFNEIVER* |
| | (SEQ ID NO: 10) |

### Cas7 Polypeptides

[0215] In an embodiment, the Cas7 of Type VII systems are distantly related from a phylogenetic perspective to the Cas7 of Type III-D Cas7 proteins. However, the Cas7 of Type VII systems has an apparent inactivation of the Cas7 catalytic residues that are required for target RNA cleavage in Type III systems. See e.g., FIGS. 5B, 8B-8E. In an embodiment, one or more Cas7 polypeptides are involved in binding of the guide molecule. In an embodiment, multiple Cas7 polypeptides are involved in binding of the guide molecule.

[0216] In an example embodiment, the compositions may comprise a Cas7 ortholog or homolog. For example, the Cas7 may be a Cas7 from an ortholog or homolog of the Type VII system and heterologous to the Cas15, Cas5, and/or Cas6 polypeptides. In one embodiment, the Cas7 polypeptide may be selected from the group consisting of Cas7 (COG1857), Cas7 (COG3649), Cas7 (CT1975), Csy3, Csm3, Cmr6, Csm5, Cmr4, Cmr1, Csf2, and Csc2 polypeptides, homologs thereof, and orthologs thereof. In another embodiment, the Cas7 family polypeptide is a Csm3 polypeptide or a homolog or ortholog thereof. In one embodiment, a Cas7 is a CRISPR Type III Csm3 polypeptide or a homolog or ortholog thereof. The Cas7 polypeptide that is an ortholog or homolog of a Type VII Cas7 may also comprise one or more variations (e.g., mutations, truncations, etc.) of the wild type Cas7 family protein.

[0217] In an embodiment, the Cas7 polypeptide comprises one or more amino acid sequences of Table 2.

TABLE 2

| Poly- | |
|---|---|
| pep- | |
| tide | Amino Acid Sequence |
| Cas7 | MAKTMKKIYVTMKTLSPLYTGEVRREDKEAAQKRVNFPVRKTATN |
| | KVLIPFKGALRSALEIMLKAKGENVCDTGESRARPCGRCVTCSLF |
| | GSMGRAGRASVDFLISNDTKEQIVRESTHLRIERQTKSASDTFKG |
| | EEVIEGATFTATITISNPQEKDLSLIQSALKFIEENGIGGWLNKG |
| | YGRVSFEVKSEDVATDRFLK* |
| | (SEQ ID NO: 11) |
| Cas7/ | MSREYLYMEIEMNTESPFVSGEIKQVHQERGAAKPVRKTADGKVA |
| Csm3 | APIYGALRAYLEKTLRAKGDTVCDSGKKTCGHCVLCNLFGSLGKG |
| gr7- | GRAVIDDLISDKPASEIVKPVIHLRLNREDNTVADSLRQEEVQEA |
| like | VVFKGRIIIDNPGDRDLTLIQTGIEAINEFGLGGWRTRGRGKVNM |
| | KITKVEKRNWATFEEKGKEIADKLLTP* |
| | (SEQ ID NO: 12) |
| | LRVGGDGVNKYLVFDIKATTTLPAVTGEIKMDRKADIKLARITGD |
| | GRVAIPIYGALRGYLERILRENGENVCDTGMKDAKPCGRCVLCDL |
| | FGSLGKKGRAIIDDLVSERSYKEIVHPSVHLRISREDGVVSNTLK |
| | IEEIEEGAVFTGKIRVVDPKPRDKELIVAGLKAIEEFGIGGWVTR |
| | GRGRVKVDFSIQEREWTDFLKQARNILEKL* |
| | (SEQ ID NO: 13) |
| | MTNDEFYVLDMEMKTISPVISGEIKTSERDFKRKKDINAPCRITG |
| | DNKVAVPIYGVVRGYLERILREKGENVCDTGAKGAKGCGRCILCD |
| | LFGNLGRRGRVFFDDLKSNEDFNKVVKVSFHSRISRDDASVSDSL |
| | TIEEIQEDALFEGKIRILNPKEKDIELLSASIEAINEFGLGGWIR |
| | RGRGRVDMKIKSVSKRKWSEFYERGKEVAAKIMV* |
| | (SEQ ID NO: 14) |
| | VDEYLSIRVEATTLLPLVSGEIKSREVREGEHRIKPARITGDGKV |
| | AVPIYGALRAYLEKTLRENGEQVCDTGLPGKEGQGCGKCVLCDLF |
| | GYLGKRGRAIIDDLKSEKPYREVVARATHLKIDREKGAVNATLKM |
| | EEIVEGTKFVGYIRIIDPKPRDVELILTGLKAIEEFGLGGWLTRG |
| | RGRVKIGYAIEKKRWSDFVKKAREELKGIT* |
| | (SEQ ID NO: 15) |
| | VIKLDDITRLKIKMTTISTLISGEIKTDYINKDKSVKLIRRTSNG |
| | KVAVPIYGVLRANAEKILKEKGGNVCDAGRPGTDATCGKCKVCSL |
| | FGAMSQRGRAIIDDLISKKDAKEIVHKSFHSKIDRDTRSVVSGGT |
| | LNVEEVEENADFYGDIVILNSKEEDLNILAASMEATNMTGLGGWV |
| | TRGRGKVKMEIETIESFKWTDFIKNAGEKLLKVLK* |
| | (SEQ ID NO: 16) |
| | MDKFLVIEVYAKTISPLYTGEIKKEAIREARDVNLPVRRTEDGKV |
| | AIPIYGVIRAYLEKILTEKGENVCDTGAKGAKGCGRCVLCDLFGY |
| | LGRRGRAFIDDLVSKENAMKIVSSVTHNRIDRNSGTVSDALKMEE |
| | IKEGSEFYGKIRIIEPKERDIELFATAFEAMKEFGIGGWVTRGRG |
| | RVDIQFKVYERRWTEFINRAKETLKQIGIK* |
| | (SEQ ID NO: 17) |
| | MEKEFGKYRLEMRAVSTVISGEIKEERRRKEKSGVHLPCRLTADG |
| | KVAVPIYGALRGYAEIALRATGEEVCDTGAKGSKGCGRCSLCDLY |
| | GSLGMRGRAIIDDLRSEENFDKVVNKVMHVKLDREKGVVSDSLEA |
| | EEIQEGTIFTGTIIVLNPRERDLELINIGIQGINTFGLGGWLTRG |
| | RGRVELKIVSAERISWASLVEEARKRVKELVKTKK* |
| | (SEQ ID NO: 18) |
| | MLNEDLWILELKATAVSPLYTGENKIDSLKRRKQGNLLPTRMSGD |
| | GFASISIFGAIRGYAEKIYKDAGTCDTGKDTKGCGRCLTCDMFGN |
| | LGRKGRVSFEDLKSVRPFDKVVERTVHPHIDRETGTISSGKGASI |
| | ELEEIVEGTELTGRIIIKNPTEKDIEVLNAALAAAEDNGIGGWTR |
| | RGKGRVKFEVTAKKVKWANYKEQGAAEAKKLVSMK* |
| | (SEQ ID NO: 19) |
| | MGNKGEYFHIDVEMRTLSPLFTGEIKGTKAKGVKPVRKSSDGRVV |
| | VPIYGALRAGIERSLRASGEQVCDSGKKACGQCVVCSLFGSLSQG |
| | GRAVIDDIVSDEPASKIAHASNHVRLNRETNTVEDSLKQEEVEEG |
| | AVFRGRILVDRPDDRDIELLQTGVEAVNEFGLGGWRTRGRGKVEI |
| | SLANVEKRRWEDFKEEGSKKARELLSS* |
| | (SEQ ID NO: 20) |
| | MSEKKESERPYAVVDLEMETVSPLVTGEIKKVPNKGTKPVRKTAG |
| | GSVAVPIYGAIRAGLEKSLRDKGEKVCDSGKKTCGRCVLCGLFGS |
| | LGKGGRALIDDMVSERPASEIAHPSTHVRLNRDDGTVDDSLSQEE |
| | VEEGAKFTGRMIVDRANDRDIELIHSGIESINEFGLGGWKTRGRG |
| | RVNMRITGITWKRHRDFMDRGKEKARELLR* |
| | (SEQ ID NO: 21) |
| | MQNEYMKYELEMKTLSTVISGEIKEEERRRKERAGVHLPCRITAD |
| | GRVAVPIYGALRGYAEIALRANGEDVCDTGGKGTKGCGKCVLCDL |
| | YGSLGRRGRAMIDDLRSAENYDKVVKKVMHVKLDREKGNVSDALG |
| | AEEIQEGTAFTGNIVVLNPKERDTELINTGIEGINEFGLGGWLTR |
| | GRGRVSLKIASVEKKLWDTLVEEARKKTKELLEKK* |
| | (SEQ ID NO: 22) |
| | MEKEYMRYGLEMKTLSTVISGEIKEEERRRKEREGVHLPCRITAD |
| | NKVAVPIYGSLRGYAEIALRASGEDVCDTGGKGTKGCGKCVLCEI |
| | YGSLGRRGRALIDDLRSVENYDKVVKKVMHVKLDREEGKVSDALG |
| | AEEIQEGTVFTGNIVVLNPKERDTELLNIGIAGINEFGLGGWLTR |
| | GRGRVELKIASVEKRSWDTLVEEARKKAKELLEKKK* |
| | (SEQ ID NO: 23) |
| | MLNEDLWILELKATAVSPLYTGENKLESQKRRKQGNMLPTRMSGD |
| | GFASISIFGAVRGYAEKIYKDAGTCDTGKDTKGCGRCLTCDMFGN |
| | LGRKGRVSFEDLKSVRPFDKVVERTVHPHIDRETGAISAGKGASI |
| | ELEEIVEGTELTGKIVIKNPTEKDIEVINAALAAAEDNGIGGWTR |
| | RGKGRVKFEVTPKKVKWANYKELGAAEAKKLVNMK* |
| | (SEQ ID NO: 24) |
| | MIGVDLCNLSRITIPSSLSNNLTFIRQKYKIKRYIGYGEMDNEYM |
| | RYGLEMKTLSTVISGEIKEEERRRKERAGVHLPCRITADGRVAVP |
| | IYGALRGYAEIALRASGEDVCDTGGKGTKGCGKCVLCDLYGSLGR |
| | RGRAIIDDMRSVENYDKVVKKVTHIKLNREEGNVSDALGAEEIQE |
| | GTVFTGNIVVLNPKERDTELINTGIEGINEFGLGGWLTRGRGRVE |
| | LKIASVERRSWDTLVKEAREKAKELLGRE* |
| | (SEQ ID NO: 25) |

### Cas5 Polypeptides

[0218] The Cas5 of Type VII systems are distantly related from a phylogenetic perspective to Cas5 from Type III-D systems. See, e.g., FIGS. 5B, 8B-8E. In Type III CRISPR systems, the Cas5 appears to be implicated in binding the 5′ region of crRNA. See Kazlauskiene, et al. Spatiotemporal Control of Type III-A CRISPR-Cas Immunity: Coupling DNA Degradation with the Target RNA Recognition. Molecular Cell 2016. In an embodiment, only the Cas5 polypeptide binds the guide molecule. In an embodiment, the Cas5 polypeptide binds the guide molecule in combination with one or more Cas7 polypeptides.

[0219] In an embodiment, the composition may comprise a Cas5 ortholog or homolog that is heterologous to the Cas15, Cas7, and/or Cas6 polypeptides of the Type VII system. As used herein, when a Cas5 family polypeptide originates from a species, it may be the wild-type Cas5 family protein in the species or an ortholog or a homolog of the wild-type Cas5 family protein in the species. The Cas5 family polypeptide that is an ortholog or homolog of the wild-type Cas5 family protein in the species may comprise one or more variations (e.g., mutations, truncations, etc.) of the wild-type Cas5 family protein. In an embodiment, the Cas5 polypeptide is selected from the group consisting of Csm4, Csx10, Cmr3, Cas5, Cas5 (BH0337), Csy2, Csc1, and Csf3 polypeptides, homologs thereof, and orthologs thereof. In an embodiment, the Cas5 polypeptide is a Csx10 polypeptide, ortholog, or homolog thereof. In an embodiment, the Cas5 polypeptide is a Type III Csx 10 polypeptide, ortholog, or homolog thereof.

[0220] In an embodiment, the Cas5 polypeptide comprises one or more amino acid sequences of Table 3.

TABLE 3

| Polypeptide | Amino Acid Sequence |
|---|---|
| Cas5 | MKEIKGILESITGFSIPLDNGEYALYPAGR |
| | HLRGAIGYIAFNLDLPISSKFLDFDFDDII |
| | FRDLLPISKCGKIFYPEKNSNSLKCPSCNE |
| | IYGSSVLRNIMARGLSYKEVIEGKKYRLSI |
| | IVKDEKYLNEMEAIIRYILSYGIYLGNKVS |
| | KGYGKFKIKEYSIVDILPVKDSEVLLLSDA |
| | IIDNGEKDIVFSKKEISSSKFEIIRKRGKA |
| | KGDIIRDNNHNGFYIGKYGGLGFGEIISLK |
| | * |
| | (SEQ ID NO: 26) |

### Cas6 Polypeptides

[0221] Cas6 polypeptides are optional in the compositions disclosed. In Type III CRISPR systems, the Cas6 appears to be implicated in crRNA processing in naturally occurring systems. See, e.g., FIGS. 5A, 8A. See Pyenson & Marraffini. Type III CRISPR-Cas systems: when DNA cleavage just isn't enough. Current Opinion in Microbiology, (2016); Carte et al. Cas6 is an endoribonuclease that generates guide molecules, e.g., guide RNAs, for invader defense in prokaryotes. Genes Dev., 2008; Hatoum-Aslan, et al. Mature clustered, regularly interspaced, short palindromic repeats RNA (crRNA) length is measured by a ruler mechanism anchored at the precursor processing site. Proceedings of the National Academy of Sciences, (2011). In an embodiment, a Cas6 polypeptide may be included as part of the Type VII complex where its presence may improve stability of the complex or enhance function of the Type VII system.

[0222] In an embodiment, the Cas6 polypeptide comprises one or more amino acid sequences of Table 4.

TABLE 4

| Poly- | |
|---|---|
| peptide | Amino Acid Sequence |
| | MNEMRVEISFGTIEKPPIHSIQSFIYQCLHEEDKEYATFI |
| | HKEGIKHKWKSIKPFIFSHPYIKKDNKCYIKVSSLDSFFN |
| | YNFFSGLNKIMFKKNNAIIKPESIRIINIPKIKYDSNGNT |
| | QQNMFFISPLLVKSNSGYIKDPDDEKFLQILKKNLIDKYL |
| | AINKKECTNDTFSIFLKDKTPKLKIYKKEELPVFLSKFVL |
| | ISSKELFNIAYYLGLGCKNALGFGMIEFDREDL* |
| | (SEQ ID NO: 27). |
| | VKDIKLFPIAYYGFSFIVIDRVYFTKNICASLRGIIFSNL |
| | KGLFCEKKGKDCGECDYSSKCPVSGFFEITRDTKRYRDYP |
| | RPVVLRVDEPLNVYEASSDFEFSLGLLSKKSIDDFPYIFS |
| | AIKHIENTGIGSEEEKKRGKVKLISAYFLNPLNNEKKILY |
| | FYKENIFNERKLYIKKKEIIERAKEISKGKRIKIEFLTPL |
| | AITYEKKIMKDFSFPLFIERLYERINKISELSLKKPLDIN |
| | VPPLDSIKILYKNFTYYNSFRYSTRKGSYIPLNGIIGEAV |
| | ISGRIDKIAVPLVIGELIHVGKHTTSGFGRYKLSVL* |
| | (SEQ ID NO: 28) |
| Cas6- | MSEQSYIALIAEGTLKNITEIILGTGEKDKYNALMSKAYP |
| Cas7 | EGQNIRGAFGYTFLEADAGISQTYMENTPAVLYFRDARPR |
| Fusion | HFRDKGKLMPVMKENKFVNYRCTSCGDNIESPTYMNKIVS |
| | IKLDRKTNSVASGAFVKHEAILGRSIFDFRVALNLKRGKE |
| | YASEFIAAVEKFSNEYIRLGKRRNKGKGLFTLEDVKYSTV |
| | TLNDIKKRAEALKKKDKLIMYFFSDIVVDRKITVEMILRS |
| | IKNCAKFMHPEYESYNDPSLKIFSNTLPIKKIVFLDRKEG |
| | ISQKVIYENIIPKGGVVKLQVKDASTMFWEALALTEAFMG |
| | IGKRTSFGKGEFKIF* |
| | (SEQ ID NO: 29) |
| | VAEGVITNITEYHLGTGFKKHGLSTTHPYPQGQHIRGSVG |
| | YELLHVNAGLSKSFLDENAALIYFKDAIPLHADGGLLLPF |
| | VAEKFQNFKCSTCGQVLKHPTRKGTIIQTRVDRKTGKTSA |
| | FRLEAVTRGYSYRFKAVLNMRRGEDYAEEFVAVMELIEEN |
| | GLKLGRRSGKGKGHFRIDRLNYRMIRLEDIRRRARELERE |
| | LERKDRLTLHFISDFIGELTGETILTGVKNAGRHFHPDYE |
| | SYEDPFVGVKKECLPPRTVLSLHRKVTPNGGKNRIMKDMA |
| | IPAGAKVQVEFAEKPPEIFYECLAIAELRGIGAKTSFGKG |
| | EFVVV* |
| | (SEQ ID NO: 30) |
| | MTEKIATIVNGNFTNITETVLGAGFRNERLKVEVSHDYPL |
| | GQMLRGAFGYLFMDMNLKIADTYEADNHSVIYFRDAIPHH |
| | FKDDGIIVPFIADKRFINYKCEKCGEVLKYASYKTVINKT |
| | RINRNIGGVSQMFREEGIVRKNKFRFKNVLNLKETLNKNP |
| | EYLVDYMSAIEYVKEFGINLGRGHLKGMGKMVFDDIKYHT |
| | ITLKDIKKRSEELANKKVLTLRLMSDTIVNHNGTSVGKVD |
| | EKILIGSVKTAMKFFHPEWGITGENKLIRNEDSGFINLVN |
| | YDTILNRKMSFMDCKITKRQRRISTEDIIPRGSMFKYEIS |
| | ENMPDGFYEGLAILEMCYGIGKRIEFGKGEILIE* |
| | (SEQ ID NO: |
| | 31) |
| | MREKEVALEVRGVMENVTEVHLGKGISRNKIPLSYSYPQG |
| | QNLRGFFGYEFLRANSKVSKTFLAGNPNYLYFKDARPLHG |
| | DGGELLPVIVDGRFINYRCSSCGAVLRYPARKGIFTSVKL |
| | DRATGRVTAFIRREGIVGRNKFLFRVYLNLKRAPEFAEDL |
| | LGAVLKAREEGIRLGARKGRGKGLFTLSDFQIGVITLEDI |
| | RRRADELESQEVHTFHFLSDVVAPEGLPETIVRSIKNAGK |
| | FLHPEYVSYSDPYFKVVSKKVLPPRTVVFLDRKEDRDGYG |
| | KNRLSKVSVIPRGAEITLKFSSAPRMFYECMAVAEKIMGA |
| | GKRTGFGKGEFRVL* |
| | (SEQ ID NO: 32) |
| | MIAVELTAKFRNKDLLHFGTGYKDQRARAKNTWPYPPGQV |
| | LRGRFGYLLMNMQSDIVDSFKDGIPLLYFKDALVYHKKCG |
| | GLLYPTIEKQRFLNYKCNNCNEILRYATRISTVNKTRMSR |
| | QTYKVNQLYRLQMISNYNKFRLKIIIKLKNNEKRFEDPIA |
| | IMEFARNFGLNFGGRCHKGIGKLFIEDYQLDVISDEMINQ |
| | RAEELCIKKKFKIHLLSQYIPKQNNNTNFLTVKDFLTSIK |
| | NAGKFFLYDYTNYPDPKLKLIDSQTRKPIKINFFDTNRFI |
| | SHHALPEGSQFDFEIENAPFIFWKSLAVAEKCSGIGARTS |
| | FGKGEFIIT* |
| | (SEQ ID NO: 33) |
| | MRYLLIEGIIRNKEIFSIYEPYPVGRHIRGAFGWIAKDMG |
| | LGIKELFPDLNNDILIFRDGIPICRKERWRPFSGKKTLYL |
| | PFIDGGRIKYRCSSCGDFFSQGFHRTEISRIQLDRKKGSV |
| | NSFRRIEAFHREAIFRLSIILDIERGERFVEDLFSMMSFV |
| | KEFGINIGKRHQKGMGHFILEEFDAKIMEDIEIGEKDEFT |
| | INFISDAYIRNGDGFLDLKIKTDKIIGMMERLGNRFKIDF |
| | RGEIEEISKTLIEPRNITMIQVIEDENRFIRIPLNVLSRG |
| | ISIRFKRRGNSRNILKLLKAIELFYGLGDYIGLGLGEIYV |
| | N* |
| | (SEQ ID NO: 34) |
| | MSTDNIAVEVTGDLVNLNETILSTGELDSRTHMMTSHNYP |
| | PGQVLRGAFGHLFFVANLPIIKTYEINAEPVLYFKDALPL |
| | HWRDGGILFPTIVDGKFVNYQCQVCKEILRYASFKSMITR |
| | TRLDRHKGTVSMMWRQEGITQRTQFRFRVIVKLKTDIEDN |
| | LSALFAVLSFVEDNGLSLGKRSMKGSGKFRLDNLAYNLVT |
| | REDIDRRAKELREKEVMKIRLLSDAIVRKQGTNLTIIKGD |
| | DFLWSVKNAAKNFNYDYKPFSAEVKLIDTQTTKPYPIGFL |
| | DIKGQYEIAIPKGSTFTYRIAPGASEDFYIALALLERCHG |
| | IGNRSSSGKGEIIIE* |
| | (SEQ ID NO: 35) |
| | MGKLQRTRGSGSQEAGEHEMKPLAFKIQGELENQSELHIA |
| | TNNTYTERGSQIKESDMYPLGQNLRGAFGYLFLEMKSKIA |
| | DTLKNGHPVIYFKDALIKHHDGTFIPVVKLDKGIRQVVYE |
| | CSECLHIDKYPAIRQPMAGISLGSGGTVKNMYMTDVVSGK |
| | NRFRFEAIFNMKAKNVEEETLNEEYLAEFICALKYVEDNG |
| | LYLGRRNSKGLGKVLLKKLKILPITMDDIKKRAKIISQIV |
| | RDEDGKMWIHLFSDTISSFPLSGEDIVRD |
| | (SEQ ID NO: 36) |
| | MSSNDKVALVVEGKLQNRTEVILGTAMRGKDKVYMSKKYP |
| | EGQHLRGAFGYAFLYGGAEVIESYREDRPKSHPAIYFRDA |
| | RPVHFEDGGDLVPVVVKRRFVNYRCSRCGKVLRFPTFMQP |
| | VTSIKLDRRTNTVARGAGFVKNQAITRKSNFSFRAALNLK |
| | RGEEYAPELIAAVEKFASEGMRLGKRRSKGKGLFELKDLG |
| | YSTVDLGEIRERAGELREREELVLRLMSDTVVDGEGAITE |
| | SMLLRSIKKAAKFWHPEYEPYSDPFVKMSVDALPPQSTVF |
| | LDRKEGVGAKTLKAKVVPRGATVRLQPRDAPGMFYEALAI |
| | AEAFMGIGKRISSGKGEFAVV* |
| | (SEQ ID NO: 37) |
| | MAGEADVALVASADLVNLSEVVLGTGTKSKKGLPMSRGYP |
| | EGQHLRGAAGYTFLDAGAGILKTYEDGVPAATYWRDARPL |
| | HRDGGVLVPVNVKGRFVNYRCVKCGRVERFPTEMSPITSV |
| | KLSRTGNTVNNMFGYFGITGQHRFLFRAALPLKRGREYAH |
| | EFAGVLTKWSEEGLRLGRRKSKGKGLFSLTDLTFDTLTLD |
| | DIRDRAAHLDSVADNGGELKLSFFSDIVVGEDGALTEKMI |
| | LRSIKNAAKFQHPMYEPYEDPTVSTRIHALPARREVYLDT |
| | KGKKRRVDKPLVVPRGAEVRMRVRGAPDMFWEALALAESC |
| | MGIGKRTSSGKGEFHCLV* |
| | (SEQ ID NO: 38) |
| | MSGESTAVEVMGELVTQNEAILSTGEFDRRAHAMRSYGYP |
| | PGQAIRGAFGYLFLAAGLPIIKTYEVNAEPVLYFKDALPY |
| | HYRDGGILYPVITPEKYVNYQCQECKEVLRYPSFKSVITK |
| | TRLDRHKGTVSMMWRQEGITKRARFRFKIIVKLKRDAEEN |
| | LAALMTVLKFVEENGLALGKRSMKGSGKLRLENLSYKLVT |
| | AGDIEDRAAELREKDIIRVRLLSEAIAREKGANLTLIRGN |
| | NFLWSVKNAAKNFWYDYKNFSAEVKLINYETTRPYPVGFL |
| | DLKLAGGRPEIAIPKGSTFTYKIARDAPAEFYTALALLER |
| | CHGIGNRASSGKGEIIVE* |
| | (SEQ ID NO: 39) |
| | MSSDNIAVEVTGELANQNEATLSTGEFDRRAHAARSYDYP |
| | PGQAIRGAFGYLFLAAGLPIIKTYEVNAEPVLYFRDALPY |
| | HYRDGGILYPVITPEKYVNYQCQKCKEVLRYPTFKSVVTK |
| | TRLDRYKGVVSMMWRQEGITRRENFRFLVIVKLKRDAEDN |
| | LSALIAALRFVEENGLAIGKRSMKGSGKLLLKNLSYELIT |
| | RRDIEGRAAELREKEVIKVRLLSEAIVREKGTNLTTIPGK |
| | NFLWSVKNAAKNFNYNYQNFAVDVKLINYETTRPSSVGFL |
| | DLKLSGGGLEIAIPKGSTFTYKIERGAPSEFYTALALLER |
| | CHGVGNRVSSGKGEIIIE* |
| | (SEQ ID NO: 40) |
| | MKPLAFKIQGELENQSELHIATNNTYNERGSRIKASDIYP |
| | LGQNLRGAFGYLFLEMKSKIADTLENGHPVIYFRDALIKH |
| | HDGIFIPVVKLDKGIRQVVYECCECLHIDKYPALRQPMAG |
| | ISLGIGGTVRNMYTTDVISSKNRFRFEAIFNMKAKSAQEE |
| | KLNEEYLAEFISALKYVEDNGLYIGKRNSKGLGKVILKKL |
| | TIVPITMEDIKKRAKIISQIVRDEDGKMWIHLFSDTLSSF |
| | PLSGEDIVRDTKNAAKFFDPDFTQYKDPKITHIEKPVELL |
| | VNLSFLDLKVKTGKPRFEAPKSVISRGTRFRYQVTDAVPE |
| | FFNAFAMAELLRGLGDRTSFGKGEFVVS* |
| | (SEQ ID NO: 41) |
| | MSNENIAVEVTGKLVTQNEVTLSTGEFDRRAHAMRSYGYP |
| | PGQTIRGAFGYLFLAAGLPIIKTYEVNAEPVLYFKDALPY |
| | HYRDGGILYPVITPEKYVNYQCQECKEVLRYPSFKSVITK |
| | TRLDRHKGTVSMMWRHEGITKRAQFRFKVIVKLKRDGEEN |
| | LAALMAVLKFVEENGLAIGKRSMKGSGRLRLENLSYKPIT |
| | RDDIEDRAAELRDKEVIKVRLLSEAIVREKGTNLTIIRGK |
| | NFLWSVKNAAKNFYYDYKNFSAEVKLIDYVTTRPYPVGFL |
| | DLELAGGRPEIAIPKGSTFTYRVERGAPAEFYTALALLER |
| | CHGIGNRASSGKGEIIVE* |
| | (SEQ ID NO: 42) |

### Other Type VII Cas Polypeptides

[0223] Additional Cas polypeptides are optional in the compositions disclosed. However, in an embodiment, a CARF/Csa3 polypeptide may be included as part of the Type VII system.

[0224] In an embodiment, the CARF/Csa3 polypeptide comprises one or more amino acid sequences of Table 5.

TABLE 5

| Polypeptide | Amino Acid Sequence |
|---|---|
| CARF/Csa3 | MAYILKPDEKTAKLFSDKTRLKILELLSEKELTNSQLAG |
| | MLNLSKPTISHHLKLLLDGGIVKISRIEHEEHGIAMKFY |
| | AVNPNILSVEALKDNKLTEQISKEIQEAMDARSGLSGGH |
| | ANSAFLRMLKSTILNTGIDMDKPFYDAGYKIGVNVISKQ |
| | VKANTLKDVLKELAVLWEKLKLGTVELVSENKIKVADCY |
| | QCGNMPNMGKTLCPSDAGIIAGVLNTVCQKRYSVKETKC |
| | WGTGYDFCEFEIKEL*(SEQ ID NO: 43) |

### Type II CRISPR-Cas Systems and Compositions

[0225] Described in example embodiments herein are small Cas polypeptides that have at least one RuvC domain and at least one HNH domain. In one embodiment, the small Cas polypeptide may be a Type II Cas polypeptide. See e.g., Makarova et al., Evolution and classification of the CRISPR-Cas systems, Nature Reviews Microbiology, 2011, Vol. 9, No. 6, 467-477, doi: 10.1038/nrmicro2577; Chylinski et al., Classification and evolution of type II CRISPR-Cas systems, Nucleic Acids Research, 2014, Vol. 42, No. 10, 6091-6105, doi: 10.1093/nar/gku241; Shmakov et al., Discovery and Functional Characterization of Diverse Class 2 CRISPR-Cas Systems, Molecular Cell, 2015, Vol. 60, No. 3, 385-397, doi: 10.1016/j.molcel.2015.10.008. The Cas polypeptides disclosed herein are newly identified small Type II-B and Type II-C Cas polypeptides.

[0226] In some embodiments, the Cas polypeptide is a Type II-B Cas polypeptide. A Type II-B Cas polypeptide may be a Cas polypeptide of a CRISPR-Cas system that comprises Cas9, Cas1, Cas2, and Cas4. In some embodiments, the Type II-B Cas polypeptide is selected from the group consisting of SEQ ID NOs: 189-269. In some embodiments, the Type II-B Cas polypeptide is encoded by a polynucleotide selected from the group consisting of SEQ ID NOs: 108-188.

[0227] In some embodiments, the Cas polypeptide is Type II-C Cas polypeptide. A Type II-C Cas polypeptide may be a Cas polypeptide of a CRISPR-Cas system that comprises Cas9, Cas1, Cas2, but not Csn2 or Cas4. In some embodiments, the Type II-C Cas polypeptide is selected from the group consisting of SEQ ID NOs: 4583-8895. In some embodiments, the Type II-C Cas polypeptide may be encoded by a polynucleotide selected from the group consisting of SEQ ID NOs: 270-4582.

[0228] In some embodiments, the Cas polypeptide is less than 1000 amino acids in size. For example, the Cas polypeptide may be less than 950, less than 900, less than 890, less than 880, less than 870, less than 860, less than 850, less than 840, less than 830, less than 820, less than 810, less than 800, less than 790, less than 780, less than 770, less than 760, less than 750, less than 700, less than 650, or less than 600 amino acids in size. In some examples, the Cas polypeptide is less than 850 amino acids in size. As used herein, small Cas9 polypeptides are also referred to as Cas9-t. In some examples, Cas9-t include Cas9 that have less than 850 amino acids in size.

[0229] The Cas polypeptides disclosed herein are distinct from existing Type II sub-types e.g. Type II-A, B, and C, and may be considered a new sub-type referred to as Type II-D. In one embodiment, the Cas polypeptide is selected from the group consisting of SEQ ID NO: 8899-9520.

[0230] In some embodiments, the Cas polypeptide is less than 1000 amino acids in size. For example, the Cas polypeptide may be less than about 950, less than 900, less than 890, less than 880, less than 870, less than 860, less than 850, less than 840, less than 830, less than 820, less than 810, less than 800, less than 790, less than 780, less than 770, less than 760, less than 750, less than 700, less than 650, or less than 600 amino acids in size. In some examples, the Cas polypeptide is less than 780 amino acids in size.

[0231] In some embodiments, the Cas polypeptide is about 600, 601, 602, 603, 604, 605, 606, 607, 608, 609, 610, 611, 612, 613, 614, 615, 616, 617, 618, 619, 620, 621, 622, 623, 624, 625, 626, 627, 628, 629, 630, 631, 632, 633, 634, 635, 636, 637, 638, 639, 640, 641, 642, 643, 644, 645, 646, 647, 648, 649, 650, 651, 652, 653, 654, 655, 656, 657, 658, 659, 660, 661, 662, 663, 664, 665, 666, 667, 668, 669, 670, 671, 672, 673, 674, 675, 676, 677, 678, 679, 680, 681, 682, 683, 684, 685, 686, 687, 688, 689, 690, 691, 692, 693, 694, 695, 696, 697, 698, 699, 700, 701, 702, 703, 704, 705, 706, 707, 708, 709, 710, 711, 712, 713, 714, 715, 716, 717, 718, 719, 720, 721, 722, 723, 724, 725, 726, 727, 728, 729, 730, 731, 732, 733, 734, 735, 736, 737, 738, 739, 740, 741, 742, 743, 744, 745, 746, 747, 748, 749, 750, 751, 752, 753, 754, 755, 756, 757, 758, 759, 760, 761, 762, 763, 764, 765, 766, 767, 768, 769, 770, 771, 772, 773, 774, 775, 776, 777, 778, 779, 780, 781, 782, 783, 784, 785, 786, 787, 788, 789, 790, 791, 792, 793, 794, 795, 796, 797, 798, 799, 800, 801, 802, 803, 804, 805, 806, 807, 808, 809, 810, 811, 812, 813, 814, 815, 816, 817, 818, 819, 820, 821, 822, 823, 824, 825, 826, 827, 828, 829, 830, 831, 832, 833, 834, 835, 836, 837, 838, 839, 840, 841, 842, 843, 844, 845, 846, 847, 848, 849, 850, 851, 852, 853, 854, 855, 856, 857, 858, 859, 860, 861, 862, 863, 864, 865, 866, 867, 868, 869, 870, 871, 872, 873, 874, 875, 876, 877, 878, 879, 880, 881, 882, 883, 884, 885, 886, 887, 888, 889, 890, 891, 892, 893, 894, 895, 896, 897, 898, 899, 900, 901, 902, 903, 904, 905, 906, 907, 908, 909, 910, 911, 912, 913, 914, 915, 916, 917, 918, 919, 920, 921, 922, 923, 924, 925, 926, 927, 928, 929, 930, 931, 932, 933, 934, 935, 936, 937, 938, 939, 940, 941, 942, 943, 944, 945, 946, 947, 948, 949, or 950 amino acids in size or less.

[0232] In one embodiment, the Cas polypeptide is at least 100, at least 200, at least 300, at least 400, at least 500, at least 600, at least 700, at least 800, or at least 900, amino acids but are less than 1000 amino acids in size.

### Modified Cas Polypeptides

[0233] In an embodiment, one or more or all of the Cas polypeptides are mutant, modified, or variant forms of the Cas polypeptides relative to their natural forms. The types of mutations in the Cas proteins can be conservative mutations or non-conservative mutations. In an embodiment, the amino acid which is mutated is mutated into alanine (A). In an embodiment, if the amino acid to be mutated is an aromatic amino acid, it is mutated into alanine or another aromatic amino acid (e.g., H, Y, W, or F). In an embodiment, if the amino acid to be mutated is a charged amino acid, it is mutated into alanine or another charged amino acid (e.g., H, K, R, D, or E). In an embodiment, if the amino acid to be mutated is a charged amino acid, it is mutated into alanine, or another charged amino acid having the same charge. In an embodiment, if the amino acid to be mutated is a charged amino acid, it is mutated into alanine, or another charged amino acid having the opposite charge.

[0234] The invention also provides for methods and compositions wherein one or more amino acid residues of the effector protein may be modified e.g., an engineered or non-naturally-occurring effector protein or Cas. In an embodiment, the modification may comprise mutation of one or more amino acid residues of one or more of the Cas polypeptides. The one or more mutations may be in one or more catalytically active domains of the effector protein, or a domain interacting with the crRNA (such as the guide sequence or direct repeat sequence). The effector protein may have reduced or abolished nuclease activity or alternatively increased nuclease activity compared with an effector protein lacking said one or more mutations. The effector protein may not direct cleavage of the RNA strand at the target locus of interest. In a preferred embodiment, the one or more mutations may comprise two mutations.

[0235] The Cas polypeptides herein may comprise one or more amino acids mutated. In an embodiment, the amino acid is mutated to A, P, or V, preferably A. In an embodiment, the amino acid is mutated to a hydrophobic amino acid. In an embodiment, the amino acid is mutated to an aromatic amino acid. In an embodiment, the amino acid is mutated to a charged amino acid. In an embodiment, the amino acid is mutated to a positively charged amino acid. In an embodiment, the amino acid is mutated to a negatively charged amino acid. In an embodiment, the amino acid is mutated to a polar amino acid. In an embodiment, the amino acid is mutated to an aliphatic amino acid.

[0236] One or more characteristics of the engineered Cas protein may be different from a corresponding wild type Cas protein. Examples of such characteristics include catalytic activity, gRNA binding, specificity of the Cas protein (e.g., specificity of editing a defined target), stability of the Cas protein, off-target binding, target binding, protease activity, nickase activity, PFS recognition. In an embodiment, an engineered Cas protein may comprise one or more mutations of the corresponding wild type Cas protein. In an embodiment, the catalytic activity of the engineered Cas protein is increased as compared to a corresponding wild type Cas protein. In an embodiment, the catalytic activity of the engineered Cas protein is decreased as compared to a corresponding wild type Cas protein.

### Modifications for Guide Molecule Binding

[0237] The guide molecule binding of the mutated Cas polypeptide may be increased or decreased as compared to a corresponding wild type Cas polypeptide. In an embodiment, the guide molecule binding of the mutated Cas protein is increased as compared to a corresponding wild type Cas polypeptide. Guide molecule binding can be determined by means known in the art. By means of example, and without limitation, guide molecule binding can be determined by calculating binding strength or affinity (such as based on equilibrium constants, Ka, Kd, etc.). In an embodiment, guide molecule binding is increased. In an embodiment, guide molecule binding is increased by at least 5%, preferably at least 10%, more preferably at least 20%, such as at least 30%, at least 40%, at least 50%, at least 60%, at least 70%, at least 80%, at least 90%, or at least 100%. In an embodiment, guide molecule binding is decreased. In an embodiment, guide molecule binding is decreased by at least 5%, preferably at least 10%, more preferably at least 20%, such as at least 30%, at least 40%, at least 50%, at least 60%, at least 70%, at least 80%, at least 90%, or (substantially)100%.

### Modifications for Specificity

[0238] In an embodiment, the specificity of the mutated Cas polypeptide is increased as compared to a corresponding wild type Cas polypeptide. In an embodiment, the specificity of the mutated Cas polypeptide is decreased as compared to a corresponding wild type Cas polypeptide. In one example embodiment, the stability of the mutated Cas polypeptide is increased as compared to a corresponding wild type Cas polypeptide. In one example embodiment, the stability of the mutated Cas polypeptide is decreased as compared to a corresponding wild type Cas polypeptide. In one example embodiments, the mutated Cas protein, e.g., the Cas15 protein, further comprises one or more mutations which inactivate catalytic activity. In an embodiment, the off-target binding of the mutated Cas polypeptide is increased as compared to a corresponding wild type Cas polypeptide. In an embodiment, the off-target binding of the mutated Cas polypeptide is decreased as compared to a corresponding wild type Cas polypeptide. In an embodiment, the target binding of the mutated Cas polypeptide is increased as compared to a corresponding wild type Cas polypeptide. In an embodiment, the target binding of the mutated Cas polypeptide is decreased as compared to a corresponding wild type Cas polypeptide. In an embodiment, the mutated Cas polypeptide has a higher nuclease activity or polynucleotide-binding capability compared with a corresponding wild type Cas polypeptide.

### Modifications for Stability

[0239] The stability of the Cas polypeptide of the invention is altered or modified. It is to be understood that mutated Cas has an altered or modified stability if the stability is different than the stability of the corresponding wild type Cas (i.e., unmutated Cas). Stability can be determined by means known in the art. By means of example, and without limitation, stability can be determined by determining the half-life of the Cas protein. In an embodiment, stability is increased. In an embodiment, stability is increased by at least 5%, preferably at least 10%, more preferably at least 20%, such as at least 30%, at least 40%, at least 50%, at least 60%, at least 70%, at least 80%, at least 90%, or at least 100%. In an embodiment, stability is decreased. In an embodiment, stability is decreased by at least 5%, preferably at least 10%, more preferably at least 20%, such as at least 30%, at least 40%, at least 50%, at least 60%, at least 70%, at least 80%, at least 90%, or (substantially)100%.

### Modifications for Target Polynucleotide Binding

[0240] In an embodiment, the target binding of the Cas polypeptide of the invention is altered or modified. It is to be understood that mutated Cas has an altered or modified target binding if the target binding is different than the target binding of the corresponding wild type Cas (i.e., unmutated Cas). target binding can be determined by means known in the art. By means of example, and without limitation, target binding can be determined by calculating binding strength or affinity (such as based on equilibrium constants, Ka, Kd, etc.). In an embodiment, target bindings increased. In an embodiment, target binding is increased by at least 5%, preferably at least 10%, more preferably at least 20%, such as at least 30%, at least 40%, at least 50%, at least 60%, at least 70%, at least 80%, at least 90%, or at least 100%. In an embodiment, target binding is decreased. In an embodiment, target binding is decreased by at least 5%, preferably at least 10%, more preferably at least 20%, such as at least 30%, at least 40%, at least 50%, at least 60%, at least 70%, at least 80%, at least 90%, or (substantially)100%.

### Modifications for Off-Target Binding

[0241] In an embodiment, the off-target binding of the Cas polypeptide and/or the complexes of the invention is altered or modified. It is to be understood that mutated Cas has an altered or modified off-target binding if the off-target binding is different than the off-target binding of the corresponding wild type Cas (i.e., unmutated Cas). Off-target binding can be determined by means known in the art. By means of example, and without limitation, off-target binding can be determined by calculating binding strength or affinity (such as based on equilibrium constants, Ka, Kd, etc.). In an embodiment, off-target bindings increased. In an embodiment, off-target binding is increased by at least 5%, preferably at least 10%, more preferably at least 20%, such as at least 30%, at least 40%, at least 50%, at least 60%, at least 70%, at least 80%, at least 90%, or at least 100%. In an embodiment, off-target binding is decreased. In an embodiment, off-target binding is decreased by at least 5%, preferably at least 10%, more preferably at least 20%, such as at least 30%, at least 40%, at least 50%, at least 60%, at least 70%, at least 80%, at least 90%, or (substantially)100%.

### Modifications for Cellular Localization and Trafficking

[0242] In some embodiments, one or more components (e.g., the Cas protein and/or deaminase) in the composition for engineering cells may comprise one or more sequences related to nucleus targeting and transportation. Such sequence may facilitate the one or more components in the composition for targeting a sequence within a cell. In order to improve targeting of the CRISPR-Cas protein and/or the nucleotide deaminase protein or catalytic domain thereof used in the methods of the present disclosure to the nucleus, it may be advantageous to provide one or both of these components with one or more nuclear localization sequences (NLSs).

[0243] In some embodiments, the NLSs used in the context of the present disclosure are heterologous to the proteins. Non-limiting examples of NLSs include an NLS sequence derived from: the NLS of the SV40 virus large T-antigen, having the amino acid sequence PKKKRKV (SEQ ID NO: 44) or PKKKRKVEAS (SEQ ID NO: 45); the NLS from nucleoplasmin (e.g., the nucleoplasmin bipartite NLS with the sequence KRPAATKKAGQAKKKK (SEQ ID NO:46)); the c-myc NLS having the amino acid sequence PAAKRVKLD (SEQ ID NO: 47) or RQRRNELKRSP (SEQ ID NO: 48); the hRNPAI M9 NLS having the sequence NQSSNFGPMKGGNFGGRSSGPYGGGGQYFAKPRNQGGY (SEQ ID NO: 49); the sequence RMRIZFKNKGKDTAELRRRRVEVSVELRKAKKDEQILKRRNV (SEQ ID NO: 50) of the IBB domain from importin-alpha; the sequences VSRKRPRP (SEQ ID NO: 51) and PPKKARED (SEQ ID NO: 52) of the myoma T protein; the sequence PQPKKKPL (SEQ ID NO: 53) of human p53; the sequence SALIKKKKKMAP (SEQ ID NO: 54) of mouse c-abl IV; the sequences DRLRR (SEQ ID NO: 55) and PKQKKRK (SEQ ID NO: 56) of the influenza virus NS1; the sequence RKLKKKIKKL (SEQ ID NO: 57) of the Hepatitis virus delta antigen; the sequence REKKKFLKRR (SEQ ID NO: 58) of the mouse Mx1 protein; the sequence KRKGDEVDGVDEVAKKKSKK (SEQ ID NO: 59) of the human poly(ADP-ribose) polymerase; and the sequence RKCLQAGMNLEARKTKK (SEQ ID NO: 60) of the steroid hormone receptors (human) glucocorticoid. In general, the one or more NLSs are of sufficient strength to drive accumulation of the DNA-targeting Cas protein in a detectable amount in the nucleus of a eukaryotic cell. In general, strength of nuclear localization activity may derive from the number of NLSs in the CRISPR-Cas protein, the particular NLS(s) used, or a combination of these factors. Detection of accumulation in the nucleus may be performed by any suitable technique. For example, a detectable marker may be fused to the nucleic acid-targeting protein, such that location within a cell may be visualized, such as in combination with a means for detecting the location of the nucleus (e.g., a stain specific for the nucleus such as DAPI). Cell nuclei may also be isolated from cells, the contents of which may then be analyzed by any suitable process for detecting protein, such as immunohistochemistry, Western blot, or enzyme activity assay. Accumulation in the nucleus may also be determined indirectly, such as by an assay for the effect of nucleic acid-targeting complex formation (e.g., assay for deaminase activity) at the target sequence, or assay for altered gene expression activity affected by DNA-targeting complex formation and/or DNA-targeting), as compared to a control not exposed to the CRISPR-Cas protein and deaminase protein, or exposed to a CRISPR-Cas and/or deaminase protein lacking the one or more NLSs.

[0244] The Cas polypeptides may be provided with 1 or more, such as with, 2, 3, 4, 5, 6, 7, 8, 9, 10, or more heterologous NLSs. In some embodiments, the proteins comprises about or more than about 1, 2, 3, 4, 5, 6, 7, 8, 9, 10, or more NLSs at or near the amino-terminus, about or more than about 1, 2, 3, 4, 5, 6, 7, 8, 9, 10, or more NLSs at or near the carboxy-terminus, or a combination of these (e.g., zero or at least one or more NLS at the amino-terminus and zero or at one or more NLS at the carboxy terminus). When more than one NLS is present, each may be selected independently of the others, such that a single NLS may be present in more than one copy and/or in combination with one or more other NLSs present in one or more copies. In some embodiments, an NLS is considered near the N- or C-terminus when the nearest amino acid of the NLS is within about 1, 2, 3, 4, 5, 10, 15, 20, 25, 30, 40, 50, or more amino acids along the polypeptide chain from the N- or C-terminus. In preferred embodiments of the CRISPR-Cas proteins, an NLS attached to the C-terminal of the protein.

Catalytically Inactive (dead Cas) and Nickase Variants

[0245] In an embodiment, the Cas protein may be a catalytically dead Cas protein (“dCas”) and/or have nickase activity. A nickase is a Cas protein that cuts only one strand of a double stranded target. In such embodiments, the dCas or nickase provide a sequence specific targeting functionality that delivers the functional domain to or proximate a target sequence. Methods for generating catalytically dead Cas9 or a nickase Cas9 (WO 2014/204725, Ran et al. Cell. 2013 Sep. 12; 154 (6): 1380-1389), Cas12 (Liu et al. Nature Communications, 8, 2095 (2017), and Cas13 (International Patent Publication Nos. WO 2019/005884 and WO2019/060746) are known in the art and incorporated herein by reference. Such methods can be adapted for modifying the small Cas polypeptides described herein.

Association with Functional Domains

[0246] In an embodiment, one or more or all of the Cas proteins of the CRISPR-Cas system is associated with one or more functional domains. For the purposes of the following discussion, reference to a functional domain could be a functional domain associated with one or more of the Cas proteins, e.g., the Cas15, of the CRISPR-Cas system of the present invention, or a functional domain associated with the adaptor protein. The functional domain may be associated with a dead Cas or nickase Cas variant.

[0247] In an embodiment, the functional domain may be selected from the group consisting of: transposase domain, integrase domain, recombinase domain, resolvase domain, invertase domain, protease domain, DNA methyltransferase domain, DNA hydroxylmethylase domain, DNA demethylase domain, histone acetylase domain, histone deacetylases domain, nuclease domain, repressor domain, activator domain, nuclear-localization signal domains, transcription-regulatory protein (or transcription complex recruiting) domain, cellular uptake activity associated domain, nucleic acid binding domain, antibody presentation domain, histone modifying enzymes, recruiter of histone modifying enzymes; inhibitor of histone modifying enzymes, histone methyltransferase, histone demethylase, histone kinase, histone phosphatase, histone ribosylase, histone deribosylase, histone ubiquitinase, histone deubiquitinase, histone biotinase and histone tail protease. In some preferred embodiments, the functional domain is a transcriptional activation domain, such as, without limitation, VP64, p65, MyoD1, HSF1, RTA, SET7/9 or a histone acetyltransferase. In an embodiment, the functional domain is a transcription repression domain, preferably KRAB. In an embodiment, the transcription repression domain is SID, or concatemers of SID (e.g., SID4X). In an embodiment, the functional domain is an epigenetic modifying domain, such that an epigenetic modifying enzyme is provided. In an embodiment, the functional domain is an activation domain, which may be the P65 activation domain.

[0248] In an embodiment, one or more of the Cas polypeptides are associated with a ligase or functional fragment thereof. The ligase may ligate a single-strand break (a nick) generated by the nuclease active Cas protein (e.g., the Cas15 polypeptide). In certain cases, the ligase may ligate a double-strand break generated by the nuclease active Cas protein (e.g., the Cas15 polypeptide). In certain examples, one or more or all of the Cas proteins are associated with a reverse transcriptase or functional fragment thereof.

[0249] In an embodiment, the one or more functional domains is a transcriptional activation domain comprises VP64, p65, MyoD1, HSF1, RTA, SET7/9 and a histone acetyltransferase. Other references herein to activation (or activator) domains in respect of those associated with the CRISPR enzyme include any known transcriptional activation domain and specifically VP64, p65, MyoD1, HSF1, RTA, SET7/9 or a histone acetyltransferase.

[0250] In an embodiment, the one or more functional domains is a transcriptional repressor domain. In an embodiment, the transcriptional repressor domain is a KRAB domain. In an embodiment, the transcriptional repressor domain is a NuE domain, NcoR domain, SID domain or a SID4X domain.

[0251] In an embodiment, the one or more functional domains have one or more activities comprising methylase activity, demethylase activity, transcription activation activity, transcription repression activity, transcription release factor activity, histone modification activity, RNA cleavage activity, DNA cleavage activity, DNA integration activity or nucleic acid binding activity.

[0252] Histone modifying domains are also preferred in an embodiment. Exemplary histone modifying domains are discussed below. Transposase domains, HR (Homologous Recombination) machinery domains, recombinase domains, and/or integrase domains are also preferred as the present functional domains. In an embodiment, DNA integration activity includes HR machinery domains, integrase domains, recombinase domains and/or transposase domains. Histone acetyltransferases are preferred in an embodiment.

[0253] In an embodiment, cleavage activity is due to a nuclease of the CRISPR-Cas system, e.g., the Cas15 polypeptide. In an embodiment, the nuclease comprises a Fok1 nuclease. See, “Dimeric CRISPR RNA-guided FokI nucleases for highly specific genome editing”, Shengdar Q. Tsai, Nicolas Wyvekens, Cyd Khayter, Jennifer A. Foden, Vishal Thapar, Deepak Reyon, Mathew J. Goodwin, Martin J. Aryee, J. Keith Joung Nature Biotechnology 32 (6): 569-77 (2014), relates to dimeric RNA-guided FokI Nucleases that recognize extended sequences and can edit endogenous genes with high efficiencies in human cells.

[0254] In an embodiment, one or more functional domains are attached to one or more of the Cas proteins of the CRISPR-Cas system so that upon binding to the guide molecule (e.g., a crRNA) and target, the functional domain is in a spatial orientation allowing it to function in its attributed function.

[0255] In an embodiment, the one or more functional domains are attached to the adaptor protein so that upon binding of one or more of the Cas effector proteins of the CRISPR-Cas system to the guide molecule and target, the functional domain is in a spatial orientation allowing it to function in its attributed function.

[0256] In an embodiment, the invention provides a composition as herein discussed wherein the one or more functional domains are attached to one or more or all of the Cas effector proteins of the CRISPR-Cas system or adaptor protein via a linker, optionally a GlySer linker, as discussed herein.

### Linkers

[0257] The functional domain may be linked to the Cas polypeptide by a linker. The term “associated with” is used here in relation to the association of the functional domain to the Cas effector protein or the adaptor protein. It is used in respect of how one molecule ‘associates’ with respect to another, for example between an adaptor protein and a functional domain, or between the Cas effector protein and a functional domain. In the case of such protein-protein interactions, this association may be viewed in terms of recognition in the way an antibody recognizes an epitope. Alternatively, one protein may be associated with another protein via a fusion of the two, for instance one subunit being fused to another subunit. Fusion typically occurs by addition of the amino acid sequence of one to that of the other, for instance via splicing together of the nucleotide sequences that encode each protein or subunit. Alternatively, this may essentially be viewed as binding between two molecules or direct linkage, such as a fusion protein. In any event, the fusion protein may include a linker between the two subunits of interest (i.e., between the enzyme and the functional domain or between the adaptor protein and the functional domain). Thus, in an embodiment, the Cas effector protein or adaptor protein is associated with a functional domain by binding thereto. In other embodiments, the Cas effector protein or adaptor protein is associated with a functional domain because the two are fused together, optionally via an intermediate linker.

[0258] The term “linker” as used in reference to a fusion protein refers to a molecule which joins the proteins to form a fusion protein. Generally, such molecules have no specific biological activity other than to join or to preserve some minimum distance or other spatial relationship between the proteins. However, In an embodiment, the linker may be selected to influence some property of the linker and/or the fusion protein such as the folding, net charge, or hydrophobicity of the linker.

[0259] Suitable linkers for use in the methods of the present invention are well known to those of skill in the art and include, but are not limited to, straight or branched-chain carbon linkers, heterocyclic carbon linkers, or peptide linkers. However, as used herein the linker may also be a covalent bond (carbon-carbon bond or carbon-heteroatom bond). In an embodiment, the linker is used to separate the Cas protein and the nucleotide deaminase by a distance sufficient to ensure that each protein retains its required functional property. Preferred peptide linker sequences adopt a flexible extended conformation and do not exhibit a propensity for developing an ordered secondary structure. In an embodiment, the linker can be a chemical moiety which can be monomeric, dimeric, multimeric or polymeric. Preferably, the linker comprises amino acids. Typical amino acids in flexible linkers include Gly, Asn and Ser. Accordingly, in an embodiment, the linker comprises a combination of one or more of Gly, Asn and Ser amino acids. Other near neutral amino acids, such as Thr and Ala, also may be used in the linker sequence. Exemplary linkers are disclosed in Maratea et al. (1985), Gene 40:39-46; Murphy et al. (1986) Proc. Nat'l. Acad. Sci. USA 83:8258-62; U.S. Pat. Nos. 4,935,233; and 4,751,180. For example, GlySer linkers GGS, GGGS (SEQ ID NO: 61) or GSG can be used. GGS, GSG, GGGS (SEQ ID NO: 61) or GGGGS (SEQ ID NO: 62) linkers can be used in repeats of 3 (such as (GGS)₃ (SEQ ID NO: 63), (GGGGS)₃ (SEQ ID NO: 64)) or 5, 6, 7, 9 or even 12 or more, to provide suitable lengths. In some cases, the linker may be (GGGGS)₃₋₁₅, For example, in some cases, the linker may be (GGGGS)₃₋₁₁, e.g., GGGGS (SEQ ID NO: 62), (GGGGS)₂ (SEQ ID NO: 65), (GGGGS)₃ (SEQ ID NO: 64), (GGGGS)₄ (SEQ ID NO: 66), (GGGGS)₅ (SEQ ID NO: 67), (GGGGS)₆ (SEQ ID NO: 68), (GGGGS)₇ (SEQ ID NO: 69), (GGGGS)₈ (SEQ ID NO: 70), (GGGGS)₉ (SEQ ID NO: 71), (GGGGS)₁₀ (SEQ ID NO: 72), or (GGGGS)₁₁ (SEQ ID NO: 73).

[0260] In an embodiment, linkers such as (GGGGS)₃ (SEQ ID NO: 64) are preferably used herein. (GGGGS)₆ (SEQ ID NO: 68), (GGGGS)₉ (SEQ ID NO: 71) or (GGGGS)₁₂ (SEQ ID NO: 74) may preferably be used as alternatives. Other preferred alternatives are (GGGGS)₁ (SEQ ID NO: 62), (GGGGS)₂ (SEQ ID NO: 65), (GGGGS)₄ (SEQ ID NO: 66), (GGGGS)₅; (SEQ ID NO: 67), (GGGGS)₇ (SEQ ID NO: 69), (GGGGS)₈ (SEQ ID NO: 70), (GGGGS)₁₀ (SEQ ID NO: 72), or (GGGGS)₁₁ (SEQ ID NO: 73). In yet a further embodiment, LEPGEKPYKCPECGKSFSQSGALTRHQRTHTR (SEQ ID NO: 75) is used as a linker. In yet an additional embodiment, the linker is an XTEN linker. In an embodiment, the Cas protein is linked to the deaminase protein or its catalytic domain by means of an LEPGEKPYKCPECGKSFSQSGALTRHQRTHTR (SEQ ID NO: 75) linker. In further particular embodiments, the Cas protein is linked C-terminally to the N-terminus of a deaminase protein or its catalytic domain by means of an LEPGEKPYKCPECGKSFSQSGALTRHQRTHTR (SEQ ID NO: 75) linker. In addition, N-and C-terminal NLSs can also function as linker (e.g., PKKKRKVEASSPKKRKVEAS (SEQ ID NO 76)). Examples of linkers are shown in Table 6 below.

TABLE 6

| | |
|---|---|
| GGS | GGTGGTAGT |
| GGSx3(9) | GGTGGTAGTGGAGGGAGCGGCGGTTCA |
| | (SEQ ID NO: 77) |
| GGSx7(21) | ggtggaggaggctctggtggaggcggt |
| (SEQ ID | agcggaggcggagggtcgGGTGGTAGT |
| NO: 78) | GGAGGGAGCGGCGGTTCA |
| | (SEQ ID NO: 79) |
| XTEN | TCGGGATCTGAGACGCCTGGGACCTCG |
| | GAATCGGCTACGCCCGAAAGT |
| | (SEQ ID NO: 80) |
| Z-EGFR_ | Gtggataacaaatttaacaaagaaatg |
| Short | tgggcggcgtgggaagaaattcgtaac |
| | ctgccgaacctgaacggctggcagatg |
| | accgcgtttattgcgagcctggtggat |
| | gatccgagccagagcgcgaacctgctg |
| | gcggaagcgaaaaaactgaacgatgcg |
| | caggcgccgaaaaccggcggtggttct |
| | ggt |
| | (SEQ ID NO: 81) |
| GSAT | Ggtggttctgccggtggctccggttct |
| | ggctccagcggtggcagctctggtgcg |
| | tccggcacgggtactgcgggtggcact |
| | ggcagcggttccggtactggctctggc |
| | (SEQ ID NO: 82) |

### Guide Molecules

[0261] In an embodiment, a CRISPR-Cas system comprises one or more guide molecules (also referred to herein as guides). Guide molecules comprise a guide sequence and a scaffold. The guide sequence is an engineered sequence designed to change the target sequence recognized by the complex to a target sequence other than a sequence defined by the protospacer of a naturally occurring crRNA. In some embodiments, one or more of the crRNAs independently comprise the sequence of FIG. 3G.

[0262] In some embodiments, the system includes two guide molecules that can each be splint or bridge molecules. In some embodiments, the first and second guide molecules comprise a region capable of hybridizing to a cleaved strand of the target polynucleotide and a region capable of hybridizing to the donor sequence. In some embodiments, the composition comprises a splint oligonucleotide that has a region capable of hybridizing to a cleaved strand of the target polynucleotide and a region capable of hybridizing to the donor molecule.

[0263] The ability of a guide molecule to direct sequence-specific binding of the CRISPR-Cas complex to a target nucleic acid sequence may be assessed by any suitable assay. For example, the components of a CRISPR-complex may be provided to a host cell having the corresponding target nucleic acid sequence, such as by transfection with vectors encoding the components of the nucleic acid-targeting complex, followed by an assessment of preferential targeting (e.g., cleavage) within the target nucleic acid sequence, such as by Surveyor assay (Qui et al. 2004. BioTechniques. 36 (4)702-707). Similarly, cleavage of a target nucleic acid sequence may be evaluated in a test tube by providing the target nucleic acid sequence, components of the CRISPR-Cas complex, including the guide sequence to be tested and a control guide sequence different from the test guide sequence, and comparing binding or rate of cleavage at the target sequence between the test and control guide sequence reactions. Other assays are possible and will occur to those skilled in the art.

[0264] In some embodiments, the guide molecule is an RNA. The guide molecule(s) are included in the CRISPR-Cas has sufficient complementarity with a target nucleic acid sequence to hybridize with the target nucleic acid sequence and direct sequence-specific binding of a nucleic acid-targeting complex to the target nucleic acid sequence. The degree of complementarity, when optimally aligned using a suitable alignment algorithm, can be about or more than about 50%, 60%, 75%, 80%, 85%, 90%, 95%, 97.5%, 99%, or more. Optimal alignment may be determined with the use of any suitable algorithm for aligning sequences, non-limiting examples of which include the Smith-Waterman algorithm, the Needleman-Wunsch algorithm, algorithms based on the Burrows-Wheeler Transform (e.g., the Burrows Wheeler Aligner), Clustal W, Clustal X, BLAT, Novoalign (Novocraft Technologies; available at www.novocraft.com), ELAND (Illumina, San Diego, CA), SOAP (available at soap.genomics.org.cn), and Maq (available at maq.sourceforge.net).

[0265] A guide sequence may be selected to target any target nucleic acid sequence in a target polynucleotide. In one embodiment, the target polynucleotide may be DNA. In one embodiment, the target polynucleotide is an RNA polynucleotide. The target sequence may be a sequence within an RNA molecule selected from the group consisting of messenger RNA (mRNA), pre-mRNA, ribosomal RNA (rRNA), transfer RNA (tRNA), micro-RNA (miRNA), small interfering RNA (siRNA), small nuclear RNA (snRNA), small nucleolar RNA (snoRNA), double stranded RNA (dsRNA), non-coding RNA (ncRNA), long non-coding RNA (lncRNA), and small cytoplasmatic RNA (scRNA). In one embodiment, the target sequence may be a sequence within an RNA molecule selected from the group consisting of mRNA, pre-mRNA, and rRNA. In one embodiment, the target sequence may be a sequence within an RNA molecule selected from the group consisting of ncRNA, and lncRNA. In one example embodiment, the target sequence may be a sequence within an mRNA molecule or a pre-mRNA molecule.

[0266] In one embodiment, the scaffold is located 5′ of the guide sequence. In one embodiment, the scaffold is located 3′ of the guide sequence. The direct repeat may comprise one or more modifications. The modifications may remove unnecessary secondary structure or otherwise minimize the overall size of the scaffold component of the guide molecule. The direct repeat may have one or more modifications that increase the stability of the guide molecule, enhance complex formation with the Cas polypeptides described herein, for example by modulating nuclease activity (either by increasing or decreasing), and/or reducing off-target effects.

[0267] In an embodiment, the guide sequence length of the guide molecule is from 15 to 35 nt. In an embodiment, the guide sequence length of the guide molecule is at least 15 nucleotides. In an embodiment, the guide sequence length is from 15 to 17 nt, e.g., 15, 16, or 17 nt, from 17 to 20 nt, e.g., 17, 18, 19, or 20 nt, from 20 to 24 nt, e.g., 20, 21, 22, 23, or 24 nt, from 23 to 25 nt, e.g., 23, 24, or 25 nt, from 24 to 27 nt, e.g., 24, 25, 26, or 27 nt, from 27 to 30 nt, e.g., 27, 28, 29, or 30 nt, from 30 to 35 nt, e.g., 30, 31, 32, 33, 34, or 35 nt, or 35 nt or longer.

[0268] In some embodiments, the degree of complementarity between a guide sequence and its corresponding target sequence can be about or more than about 50%, 60%, 75%, 80%, 85%, 90%, 95%, 97.5%, 99%, or 100%; a guide sequence can be about or more than about 5, 10, 11, 12, 13, 14, 15, 16, 17, 18, 19, 20, 21, 22, 23, 24, 25, 26, 27, 28, 29, 30, 35, 40, 45, 50, 75, or more nucleotides in length; or guide sequence can be less than about 75, 50, 45, 40, 35, 30, 25, 20, 15, 12, or fewer nucleotides in length. In some embodiments, the degree of complementarity between a guide sequence and its corresponding target sequence is greater than 94.5% or 95% or 95.5% or 96% or 96.5% or 97% or 97.5% or 98% or 98.5% or 99% or 99.5% or 99.9%, or 100%. Off target is less than 100% or 99.9% or 99.5% or 99% or 99% or 98.5% or 98% or 97.5% or 97% or 96.5% or 96% or 95.5% or 95% or 94.5% or 94% or 93% or 92% or 91% or 90% or 89% or 88% or 87% or 86% or 85% or 84% or 83% or 82% or 81% or 80% complementarity between the target sequence and the guide sequence, with it being advantageous that off target is 100% or 99.9% or 99.5% or 99% or 99% or 98.5% or 98% or 97.5% or 97% or 96.5% or 96% or 95.5% or 95% or 94.5% complementarity between the target sequence and the guide sequence.

### Guide Molecule Modifications

[0269] Many modifications to guide molecules are known in the art and are further contemplated within the context of this invention. Various modifications may be used to increase the specificity of binding to the target sequence and/or increase the activity of the Cas protein and/or reduce off-target effects. Example guide molecule modifications are described in International Patent Application No. PCT US2019/045582, specifically paragraphs [0178]-[0333], which is incorporated herein by reference as if expressed in its entirety herein. Additional guide molecule modifications are described in detail below.

[0270] The guide molecule may be designed to reduce the degree secondary structure within the guide molecule. In some embodiments, about or less than about 75%, 50%, 40%, 30%, 25%, 20%, 15%, 10%, 5%, 1%, or fewer of the nucleotides of the guide molecule participate in self-complementary base pairing when optimally folded. Optimal folding may be determined by any suitable polynucleotide folding algorithm. Some programs are based on calculating the minimal Gibbs free energy. An example of one such algorithm is mFold, as described by Zuker and Stiegler (Nucleic Acids Res. 9 (1981), 133-148). Another example folding algorithm is the online webserver RNAfold, developed at Institute for Theoretical Chemistry at the University of Vienna, using the centroid structure prediction algorithm (see e.g., A.R. Gruber et al., 2008, Cell 106 (1): 23-24; and PA Carr and GM Church, 2009, Nature Biotechnology 27 (12): 1151-62).

[0271] The guide molecule is configured to minimize or reduce off-target effects. Guide sequences and strategies to minimize toxicity and off-target effects can be as in WO 2014/093622 (PCT/US2013/074667); or, via mutation as described herein.

### Non-Naturally Occurring Nucleic Acids

[0272] In an embodiment, guide molecules of the invention comprise non-naturally occurring nucleic acids and/or non-naturally occurring nucleotides and/or nucleotide analogs, and/or chemical modifications. Non-naturally occurring nucleic acids can include, for example, mixtures of naturally and non-naturally occurring nucleotides. Non-naturally occurring nucleotides and/or nucleotide analogs may be modified at the ribose, phosphate, and/or base moiety. In an embodiment of the invention, a guide nucleic acid comprises ribonucleotides and non-ribonucleotides. In one such embodiment, a guide comprises one or more ribonucleotides and one or more deoxyribonucleotides. In an embodiment of the invention, the guide comprises one or more non-naturally occurring nucleotide or nucleotide analog, such as a nucleotide with phosphorothioate linkage, boranophosphate linkage, locked nucleic acid (LNA) nucleotide comprising a methylene bridge between the 2′ and 4′ carbons of the ribose ring or bridged nucleic acids (BNA). Other examples of modified nucleotides include 2′-O-methyl analogs, 2′-deoxy analogs, 2-thiouridine analogs, N6-methyladenosine analogs, or 2′-fluoro analogs. Further examples of modified bases include, but are not limited to, 2-aminopurine, 5-bromo-uridine, pseudouridine (Ψ), N1-methylpseudouridine (me¹Ψ), 5-methoxyuridine (5moU), inosine, 7-methylguanosine. Examples of guide RNA chemical modifications include, without limitation, incorporation of 2′-O-methyl (M), 2′-O-methyl-3′-phosphorothioate (MS), phosphorothioate (PS), S-constrained ethyl (cEt), or 2′-O-methyl-3′-thioPACE (MSP) at one or more terminal nucleotides. Such chemically modified guides can comprise increased stability and increased activity as compared to unmodified guide molecules, though on-target vs. off-target specificity is not predictable. (See, Hendel, 2015, Nat Biotechnol. 33 (9): 985-9, doi: 10.1038/nbt.3290, published online 29 Jun. 2015; Ragdarm et al., 0215, PNAS, E7110-E7111; Allerson et al., J. Med. Chem. 2005, 48:901-904; Bramsen et al., Front. Genet., 2012, 3:154; Deng et al., PNAS, 2015, 112:11870-11875; Sharma et al., MedChemComm., 2014, 5:1454-1471; Hendel et al., Nat. Biotechnol. (2015)33(9): 985-989; Li et al., Nature Biomedical Engineering, 2017, 1, 0066 DOI: 10.1038/s41551-017-0066).

### 5′ and 3′ Modifications

[0273] In some embodiments, the 5′ and/or 3′ end of a guide molecule is modified by a variety of functional moieties including fluorescent dyes, polyethylene glycol, cholesterol, proteins, or detection tags. (See Kelly et al., 2016, J. Biotech. 233:74-83). In an embodiment of the invention, deoxyribonucleotides and/or nucleotide analogs are incorporated in engineered guide structures, such as, without limitation, 5′ and/or 3′ end, stem-loop regions, and the seed region. In an embodiment, the modification is not in the 5′-handle of the stem-loop regions. Chemical modification in the 5′-handle of the stem-loop region of a guide may abolish its function (see Li, et al., Nature Biomedical Engineering, 2017, 1:0066). In an embodiment, at least 1, 2, 3, 4, 5, 6, 7, 8, 9, 10, 11, 12, 13, 14, 15, 16, 17, 18, 19, 20, 21, 22, 23, 24, 25, 26, 27, 28, 29, 30, 35, 40, 45, 50, or 75 nucleotides of a guide is chemically modified. In some embodiments, 3-5 nucleotides at either the 3′ or the 5′ end of a guide are chemically modified. In some embodiments, only minor modifications are introduced in the seed region, such as 2′-F modifications. In some embodiments, 2′-F modification is introduced at the 3′ end of a guide. In an embodiment, three to five nucleotides at the 5′ and/or the 3′ end of the guide are chemically modified with 2′-O-methyl (M), 2′-O-methyl-3′-phosphorothioate (MS), S-constrained ethyl (cEt), or 2′-O-methyl-3′-thioPACE (MSP). Such modification can enhance genome editing efficiency (see Hendel et al., Nat. Biotechnol. (2015)33 (9): 985-989). In an embodiment, all of the phosphodiester bonds of a guide are substituted with phosphorothioates (PS) for enhancing levels of gene disruption. In an embodiment, more than five nucleotides at the 5′ and/or the 3′ end of the guide are chemically modified with 2′-O-Me, 2′-F or S-constrained ethyl (cEt). Such chemically modified guides can mediate enhanced levels of gene disruption (see Rahdar et al., 2015, PNAS, E7110-E7111). In an embodiment of the invention, a guide is modified to comprise a chemical moiety at its 3′ and/or 5′ end. Such moieties include, but are not limited to amine, azide, alkyne, thio, dibenzocyclooctyne (DBCO), or Rhodamine. In an embodiment, the chemical moiety is conjugated to the guide by a linker, such as an alkyl chain. In an embodiment, the chemical moiety of the modified guide can be used to attach the guide to another molecule, such as DNA, RNA, protein, or nanoparticles. Such chemically modified guides can be used to identify or enrich cells genetically edited by a CRISPR system (see Lee et al., eLife, 2017, 6: e25312, DOI: 10.7554).

[0274] In some embodiments, the loop of the 5′-handle of the guide molecule is modified. In some embodiments, the loop of the 5′-handle of the guide molecule is modified to have a deletion, an insertion, a split, or chemical modifications. In an embodiment, the loop comprises 3, 4, or 5 nucleotides. In an embodiment, the loop comprises the sequence of UCUU, UUUU, UAUU, or UGUU.

### Mixed RNA-DNA Guide Molecules

[0275] In one embodiment, the guide sequence comprises a mixture of RNA and DNA. The partial replacement of RNA nucleotides with DNA nucleotides has been shown to enhance CRISPR-Cas specificity by reducing off-target effects. See Rueda et al., Nat Commun 8, 1610 (2017), DOI: 10.1038/s41467-017-01732-9; Kartje et al., Biochemistry 2018, 57, 21, 3027-3031, DOI: 10.1021/acs.biochem.8b00107; and Yin et al., Nat Chem Biol. 2018 March; 14 (3): 311-316, DOI: 10.1038/nchembio.2559.

### Truncated Guide Molecules

[0276] In an embodiment, use is made of a truncated guide (tru-guide), i.e. a guide molecule which comprises a guide sequence which is truncated in length with respect to the canonical guide sequence length. As described by Nowak et al. (Nucleic Acids Res (2016)44 (20): 9555-9564), such guides may allow catalytically active CRISPR-Cas enzyme to bind its target without cleaving the target RNA. In an embodiment, a truncated guide is used which allows the binding of the target but retains only nickase activity of the CRISPR-Cas enzyme.

### Functionalized Guide Molecules

[0277] In an embodiment, guide portions can be covalently linked via a linker (e.g., a non-nucleotide loop) that comprises a moiety such as spacers, attachments, bioconjugates, chromophores, reporter groups, dye labeled RNAs, and non-naturally occurring nucleotide analogues. More specifically, suitable linkers for purposes of this invention include, but are not limited to, polyethers (e.g., polyethylene glycols, polyalcohols, polypropylene glycol or mixtures of ethylene and propylene glycols), polyamines group (e.g., spennine, spermidine and polymeric derivatives thereof), polyesters (e.g., poly(ethyl acrylate)), polyphosphodiesters, alkylenes, and combinations thereof. Suitable attachments include any moiety that can be added to the linker to add additional properties to the linker, such as but not limited to, fluorescent labels. Suitable bioconjugates include, but are not limited to, peptides, glycosides, lipids, cholesterol, phospholipids, diacyl glycerols and dialkyl glycerols, fatty acids, hydrocarbons, enzyme substrates, steroids, biotin, digoxigenin, carbohydrates, polysaccharides. Suitable chromophores, reporter groups, and dye-labeled RNAs include, but are not limited to, fluorescent dyes such as fluorescein and rhodamine, chemiluminescent, electrochemiluminescent, and bioluminescent marker compounds. The design of example linkers conjugating two RNA components are also described in WO 2004/015075.

[0278] The linker (e.g., a non-nucleotide loop) can be of any length. In an embodiment, the linker has a length equivalent to about 0-16 nucleotides. In an embodiment, the linker has a length equivalent to about 0-8 nucleotides. In an embodiment, the linker has a length equivalent to about 0-4 nucleotides. In an embodiment, the linker has a length equivalent to about 2 nucleotides. Example linker design is also described in WO2011/008730.

[0279] In an embodiment, the guide molecule comprises portions that are chemically linked or conjugated via a non-phosphodiester bond. In one aspect, the guide molecule comprises, in non-limiting examples, direct repeat sequence portion and a targeting sequence portion that are chemically linked or conjugated via a non-nucleotide loop. In an embodiment, the portions are joined via a non-phosphodiester covalent linker. Examples of the covalent linker include but are not limited to a chemical moiety selected from the group consisting of carbamates, ethers, esters, amides, imines, amidines, aminotrizines, hydrozone, disulfides, thioethers, thioesters, phosphorothioates, phosphorodithioates, sulfonamides, sulfonates, fulfones, sulfoxides, ureas, thioureas, hydrazide, oxime, triazole, photolabile linkages, C-C bond forming groups such as Diels-Alder cyclo-addition pairs or ring-closing metathesis pairs, and Michael reaction pairs.

[0280] In an embodiment, portions of the guide molecule are first synthesized using the standard phosphoramidite synthetic protocol (Herdewijn, P., ed., Methods in Molecular Biology Col 288, Oligonucleotide Synthesis: Methods and Applications, Humana Press, New Jersey (2012)). In an embodiment, the non-targeting guide portions can be functionalized to contain an appropriate functional group for ligation using the standard protocol known in the art (Hermanson, G. T., Bioconjugate Techniques, Academic Press (2013)). Examples of functional groups include, but are not limited to, hydroxyl, amine, carboxylic acid, carboxylic acid halide, carboxylic acid active ester, aldehyde, carbonyl, chlorocarbonyl, imidazolylcarbonyl, hydrozide, semicarbazide, thio semicarbazide, thiol, maleimide, haloalkyl, sufonyl, ally, propargyl, diene, alkyne, and azide. Once a non-targeting portion of a guide is functionalized, a covalent chemical bond or linkage can be formed between the two oligonucleotides. Examples of chemical bonds include, but are not limited to, those based on carbamates, ethers, esters, amides, imines, amidines, aminotrizines, hydrozone, disulfides, thioethers, thioesters, phosphorothioates, phosphorodithioates, sulfonamides, sulfonates, fulfones, sulfoxides, ureas, thioureas, hydrazide, oxime, triazole, photolabile linkages, C-C bond forming groups such as Diels-Alder cyclo-addition pairs or ring-closing metathesis pairs, and Michael reaction pairs.

[0281] In an embodiment, one or more portions of a guide molecule can be chemically synthesized. In an embodiment, the chemical synthesis uses automated, solid-phase oligonucleotide synthesis machines with 2′-acetoxyethyl orthoester (2′-ACE) (Scaringe et al., J. Am. Chem. Soc. (1998)120:11820-11821; Scaringe, Methods Enzymol. (2000)317:3-18) or 2′-thionocarbamate (2′-TC) chemistry (Dellinger et al., J. Am. Chem. Soc. (2011)133:11540-11546; Hendel et al., Nat. Biotechnol. (2015)33:985-989).

[0282] In an embodiment, portions of the guide molecule may be covalently linked using various bioconjugation reactions, loops, bridges, and non-nucleotide links via modifications of sugar, internucleotide phosphodiester bonds, purine and pyrimidine residues. Sletten et al., Angew. Chem. Int. Ed. (2009)48:6974-6998; Manoharan, M. Curr. Opin. Chem. Biol. (2004)8:570-9; Behlke et al., Oligonucleotides (2008)18:305-19; Watts, et al., Drug. Discov. Today (2008)13:842-55; Shukla, et al., ChemMedChem (2010)5:328-49.

[0283] In one embodiment, portions of the guide molecule may be covalently linked using click chemistry. In one embodiment, portions of the guide molecule may be covalently linked using a triazole linker. In one embodiment, portion of the guide molecule may be covalently linked using Huisgen 1,3-dipolar cycloaddition reaction involving an alkyne and azide to yield a highly stable triazole linker (He et al., ChemBioChem (2015)17:1809-1812; WO 2016/186745). In one embodiment, portions of the guide molecule may be covalently linked by ligating a 5′-hexyne portion and a 3′-azide portion. In one embodiment, either or both of the 5′-hexyne and the 3′-azide portion of the guide molecule may be protected with 2′-acetoxyethl orthoester (2′-ACE) group, which can be subsequently removed using Dharmacon protocol (Scaringe et al., J. Am. Chem. Soc. (1998)120:11820-11821; Scaringe, Methods Enzymol. (2000)317:3-18).

[0284] In one embodiment, the guide molecule is designed or selected to modulate intermolecular interactions among guide molecules, such as among stem-loop regions of different guide molecules. It will be appreciated that nucleotides within a guide molecule that base-pair to form a stem-loop are also capable of base-pairing to form an intermolecular duplex with a second guide molecule and that such an intermolecular duplex would not have a secondary structure compatible with CRISPR complex formation. Accordingly, is useful to select or design scaffold sequences in order to modulate stem-loop formation and CRISPR complex formation. In an embodiment, about or less than about 75%, 50%, 40%, 30%, 25%, 20%, 15%, 10%, 5%, 1%, or fewer of guide molecule are in intermolecular duplexes. It will be appreciated that stem-loop variation will often be within limits imposed by scaffold-Cas effector interactions. One way to modulate stem-loop formation or change the equilibrium between stem-loop and intermolecular duplex is to vary nucleotide pairs in the stem of the stem-loop of a scaffold. For example, in one embodiment, a G-C pair is replaced by an A-U or U-A pair. In another embodiment, an A-U pair is substituted for a G-C or a C-G pair. In another embodiment, a naturally occurring nucleotide is replaced by a nucleotide analog. Another way to modulate stem-loop formation or change the equilibrium between stem-loop and intermolecular duplex is to modify the loop of the stem-loop of a scaffold. Without being bound by theory, the loop can be viewed as an intervening sequence flanked by two sequences that are complementary to each other. When that intervening sequence is not self-complementary, its effect will be to destabilize intermolecular duplex formation. The same principle applies when guide molecules are multiplexed: while the targeting sequences may differ, it may be advantageous to modify the stem-loop region in the scaffold of the different guide molecules. Moreover, when guide molecules are multiplexed, the relative activities of the different guide molecules may be modulated by balancing the activity of each individual guide molecule. In an embodiment, the equilibrium between intermolecular stem-loops vs. intermolecular duplexes is determined. The determination may be made by physical or biochemical means and can be in the presence or absence of a CRISPR effector.

### Dead Guide Sequences

[0285] In one aspect, the invention provides guide molecules which are modified in a manner which allows for formation of the CRISPR Cas complex and successful binding to the target, while at the same time, not either allowing for or not allowing for successful nuclease activity (i.e., without nuclease activity/without indel activity). Such modified guide molecules are referred to as “dead guides” or “dead guide molecules”. These dead guide molecules can be thought of as catalytically inactive or conformationally inactive with regard to nuclease activity. Indeed, dead guide molecules may not sufficiently engage in productive base pairing with respect to the ability to promote catalytic activity or to distinguish on-target and off-target binding activity. Briefly, the assay involves synthesizing a CRISPR target RNA and guide molecules comprising mismatches with the target RNA, combining these with the enzyme and analyzing cleavage based on gels based on the presence of bands generated by cleavage products, and quantifying cleavage based upon relative band intensities.

[0286] Hence, in a related aspect, the invention provides a non-naturally occurring or engineered CRISPR-Cas system comprising a functional multimeric Cas enzyme as described herein, and guide molecule, e.g., a guide molecule wherein the guide molecules comprises a dead guide sequence whereby the guide molecule is capable of hybridizing to a target sequence such that the CRISPR-Cas system is directed to a genomic locus of interest in a cell without detectable cleavage activity of a non-mutant enzyme of the system. It is to be understood that any of the guide molecules according to the invention as described herein elsewhere may be used as dead guide molecules comprising a dead guide sequence.

[0287] The ability of a dead guide molecules to direct sequence-specific binding of a CRISPR complex to a target sequence may be assessed by any suitable assay. For example, the components of a CRISPR-Cas system sufficient to form a CRISPR-Cas complex, including the dead guide molecule to be tested, may be provided to a host cell having the corresponding target sequence, such as by transfection with vectors encoding the components of the system, followed by an assessment of preferential cleavage within the target sequence.

[0288] As explained further herein, several structural parameters allow for a proper framework to arrive at such dead guide molecules. Dead guide molecule sequences can be typically shorter than respective “active” guide molecules which result in active cleavage. In an embodiment, dead guide molecules are 5%, 10%, 20%, 30%, 40%, 50%, shorter than respective active guide molecules directed to the same target sequence.

[0289] As explained below and known in the art, one aspect of guide molecules specificity is the scaffold sequence, which is to be appropriately linked to guide sequences. In particular, this implies that the scaffold sequences are designed dependent on the origin of the enzyme. Structural data available for validated dead guide molecules may be used for designing CRISPR-Cas specific equivalents. Structural similarity between, e.g., the orthologous nuclease domains of two or more CRISPR-Cas proteins may be used to transfer design equivalent dead guide molecules. Thus, the dead guide molecule herein may be appropriately modified in length and sequence to reflect such CRISPR-Cas specific equivalents, allowing for formation of the CRISPR-Cas complex and successful binding to the target sequence, while at the same time, not allowing for successful nuclease activity.

[0290] Dead guide molecules allow one to use guide molecules as a means for gene targeting, without the consequence of nuclease activity, while at the same time providing directed means for activation or repression. Dead guide molecule may be modified to further include elements in a manner which allow for activation or repression of gene activity, in particular protein adaptors (e.g., aptamers) as described herein elsewhere allowing for functional placement of gene effectors (e.g., activators or repressors of gene activity). One example is the incorporation of aptamers, as explained herein and in the state of the art. By engineering the dead guide molecule to incorporate protein-interacting aptamers (Konermann et al., “Genome-scale transcription activation by an engineered CRISPR-Cas9 complex,” doi: 10.1038/nature 14136, incorporated herein by reference), one may assemble multiple distinct effector domains. Such may be modeled after natural processes.

[0291] In the practice of the invention, loops of the guide molecule may be extended, without colliding with the Cas protein by the insertion of distinct RNA loop(s) or distinct sequence(s) that may recruit adaptor proteins that can bind to the distinct RNA loop(s) or distinct sequence(s). The adaptor proteins may include but are not limited to orthogonal RNA-binding protein/aptamer combinations that exist within the diversity of bacteriophage coat proteins. A list of such coat proteins includes, but is not limited to: QB, F2, GA, fr, JP501, M12, R17, BZ13, JP34, JP500, KUI, M11, MX1, TW18, VK, SP, FI, ID2, NL95, TW19, AP205, 4Cb5, ¢Cb8r, ¢Cb12r, ¢Cb23r, 7s and PRR1. These adaptor proteins or orthogonal RNA binding proteins can further recruit effector proteins or fusions which comprise one or more functional domains.

[0292] The functional domain may be selected from the group consisting of: transposase domain, integrase domain, recombinase domain, resolvase domain, invertase domain, protease domain, DNA methyltransferase domain, DNA hydroxylmethylase domain, DNA demethylase domain, histone acetylase domain, histone deacetylases domain, nuclease domain, repressor domain, activator domain, nuclear-localization signal domains, transcription-regulatory protein (or transcription complex recruiting) domain, cellular uptake activity associated domain, nucleic acid binding domain, antibody presentation domain, histone modifying enzymes, recruiter of histone modifying enzymes; inhibitor of histone modifying enzymes, histone methyltransferase, histone demethylase, histone kinase, histone phosphatase, histone ribosylase, histone deribosylase, histone ubiquitinase, histone deubiquitinase, histone biotinase and histone tail protease. The functional domain is a transcriptional activation domain, such as, without limitation, VP64, p65, MyoD1, HSF1, RTA, SET7/9 or a histone acetyltransferase. The functional domain may be a transcription repression domain, preferably KRAB. In one embodiment, the transcription repression domain is SID, or concatemers of SID (e.g., SID4X). In one embodiment, the functional domain is an epigenetic modifying domain, such that an epigenetic modifying enzyme is provided. In an embodiment, the functional domain is an activation domain, which may be the P65 activation domain.

### Mismatches

[0293] In one embodiment, the guide molecule may comprise a mismatch. The mismatch may be up-or downstream of a single nucleotide variation on the one or more guide sequences. Modulations of cleavage efficiency can be exploited by introduction of mismatches, e.g., 1 or more mismatches, such as 1 or 2 mismatches between the guide sequence and target sequence. The more central (i.e., not 3′ or 5′) for instance a double mismatch is, the more cleavage efficiency is affected. Accordingly, by choosing mismatch position along the guide sequence, cleavage efficiency can be modulated. By means of example, if less than 100% cleavage of targets is desired (e.g., in a cell population), 1 or more, such as preferably 2 mismatches between the guide sequence and target sequence may be introduced in the guide sequences. The more central along the guide sequence of the mismatch position, the lower the cleavage percentage. In an embodiment, the cleavage efficiency may be exploited to design single guides that can distinguish two or more targets that vary by a single nucleotide, such as a single nucleotide polymorphism (SNP), variation, or (point) mutation. The CRISPR effector may have reduced sensitivity to SNPs (or other single nucleotide variations) and continue to cleave SNP targets with a certain level of efficiency. Thus, for two targets, or a set of targets, a guide molecule may be designed with a nucleotide sequence that is complementary to one of the targets i.e., the on-target SNP. The guide molecule is further designed to have a synthetic mismatch. As used herein a “synthetic mismatch” refers to a non-naturally occurring mismatch that is introduced upstream or downstream of the naturally occurring SNP, such as at most 5 nucleotides upstream or downstream, for instance 4, 3, 2, or 1 nucleotide upstream or downstream, preferably at most 3 nucleotides upstream or downstream, more preferably at most 2 nucleotides upstream or downstream, most preferably 1 nucleotide upstream or downstream (i.e., adjacent the SNP). When the CRISPR effector binds to the on-target SNP, only a single mismatch will be formed with the synthetic mismatch and the CRISPR effector will continue to be activated and a detectable signal produced. When the guide RNA hybridizes to an off-target SNP, two mismatches will be formed, the mismatch from the SNP and the synthetic mismatch, and no detectable signal generated. Thus, the systems disclosed herein may be designed to distinguish SNPs within a population. For, example the systems may be used to distinguish pathogenic strains that differ by a single SNP or detect certain disease specific SNPs, such as, but not limited to, disease associated SNPs, such as without limitation cancer associated SNPs.

[0294] In an embodiment, the guide molecule is designed such that the mismatch (e.g., the synthetic mismatch, e.g., an additional mutation besides a SNP) is located on position 1, 2, 3, 4, 5, 6, 7, 8, 9, 10, 11, 12, 13, 14, 15, 16, 17, 18, 19, 20, 21, 22, 23, 24, 25, 26, 27, 28, 29, or 30 of the spacer sequence (starting at the 5′ end). In one embodiment, the guide molecule is designed such that the mismatch is located on position 1, 2, 3, 4, 5, 6, 7, 8, or 9 of the spacer sequence (starting at the 5′ end). In one embodiment, the guide molecule is designed such that the mismatch is located on position 4, 5, 6, or 7 of the spacer sequence (starting at the 5′ end. In an embodiment, the guide molecule is designed such that the mismatch is located on position 5 of the guide sequence (starting at the 5′ end).

[0295] In an embodiment, the guide molecule is designed such that the mismatch is located 2 nucleotides upstream of the SNP (i.e., one intervening nucleotide). In one embodiment, the guide molecule is designed such that the mismatch is located 2 nucleotides downstream of the SNP (i.e., one intervening nucleotide). In one embodiment, the guide molecule is designed such that the mismatch is located on position 5 of the guide sequence (starting at the 5′ end) and the SNP is located on position 3 of the guide sequence (starting at the 5′ end).

### Determination of PAM

[0296] A protospacer adjacent motif (PAM) or PAM-like motif directs binding of the CRISPR-Cas complex as disclosed herein to the target locus of interest. In an embodiment, the PAM may be a 5′ PAM (i.e., located upstream of the 5′ end of the protospacer). In other embodiments, the PAM may be a 3′ PAM (i.e., located downstream of the 5′ end of the protospacer). In other embodiments, both a 5′ PAM and a 3′ PAM are required. In one example, the PAM comprises or is AAG. In certain examples, the PAM is or comprises CTT.

[0297] In an embodiment, a PAM or PAM-like motif may not be required for directing binding of the CRISPR-Cas complex. In an embodiment, a 5′ PAM is D (e.g., A, G, or U). In an embodiment of the invention, cleavage at repeat sequences may generate crRNAs (e.g., short or long crRNAs) containing a full spacer sequence flanked by a short nucleotide (e.g., 5, 6, 7, 8, 9, or 10 nt or longer if it is a dual repeat) repeat sequence at the 5′ end (this may be referred to as a crRNA “tag”) and the rest of the repeat at the 3′end. In an embodiment, targeting by the effector proteins described herein may require the lack of homology between the crRNA tag and the target 5′ flanking sequence. This requirement may be similar to that described further in Samai et al. “Co-transcriptional DNA and RNA Cleavage during Type VI CRISPR-Cas Immunity” Cell 161, 1164-1174 May 21, 2015, where the requirement is thought to distinguish between bona fide targets on invading nucleic acids from the CRISPR array itself, and where the presence of repeat sequences will lead to full homology with the crRNA tag and prevent autoimmunity.

[0298] In an embodiment, determination of PAM can be performed as follows. This experiment closely parallels similar work in E. coli for the heterologous expression of StCas9 (Sapranauskas, R. et al. Nucleic Acids Res 39, 9275-9282 (2011)). Applicants introduce a plasmid containing both a PAM and a resistance gene into the heterologous E. coli, and then plate on the corresponding antibiotic. If there is DNA cleavage of the plasmid, Applicants observe no viable colonies.

[0299] In further detail, the assay is as follows for a DNA target. Two E. coli strains are used in this assay. One carries a plasmid that encodes the endogenous effector protein locus from the bacterial strain. The other strain carries an empty plasmid (e.g., pACYC184, control strain). All possible 7 or 8 bp PAM sequences are presented on an antibiotic resistance plasmid (pUC19 with ampicillin resistance gene). The PAM is located next to the sequence of proto-spacer 1 (the DNA target to the first spacer in the endogenous effector protein locus). Two PAM libraries were cloned. One has an 8 random bp 5′ of the proto-spacer (e.g., total of 65536 different PAM sequences=complexity). The other library has 7 random bp 3′ of the proto-spacer (e.g., total complexity is 16384 different PAMs). Both libraries were cloned to have in average 500 plasmids per possible PAM. Test strain and control strain were transformed with 5′PAM and 3′PAM library in separate transformations and transformed cells were plated separately on ampicillin plates. Recognition and subsequent cutting/interference with the plasmid renders a cell vulnerable to ampicillin and prevents growth. Approximately 12h after transformation, all colonies formed by the test and control strains where harvested and plasmid DNA was isolated. Plasmid DNA was used as template for PCR amplification and subsequent deep sequencing. Representation of all PAMs in the untransformed libraries showed the expected representation of PAMs in transformed cells. Representation of all PAMs found in control strains showed the actual representation. Representation of all PAMs in test strain showed which PAMs are not recognized by the enzyme and comparison to the control strain allows extracting the sequence of the depleted PAM.

### Multiplex Targeting Approach

[0300] The CRISPR-Cas systems or complexes herein can employ more than one guide molecule, e.g., guide RNA, without losing activity. This may enable the use of the CRISPR-Cas systems or complexes as defined herein for targeting multiple targets (e.g., RNA targets, DNA targets), genes or gene loci, with a single system or complex as defined herein. The guide molecules, e.g., guide RNAs, may be tandemly arranged, optionally separated by a nucleotide sequence such as a direct repeat as defined herein. The position of the different guide molecules, e.g., guide RNAs, is the tandem does not influence the activity.

[0301] In any of the described methods the multimeric CRISPR-Cas effector protein, or Cas polypeptides thereof, may be delivered with multiple guides for multiplexed use. In any of the described methods more than one multimeric CRISPR-Cas effector protein, or Cas polypeptides thereof, may be used. In an embodiment, one CRISPR-Cas effector protein, or Cas polypeptides thereof, may be delivered with multiple guides, e.g., at least 2, at least 5, at least 10, at least 15, at least 20, at least 30, at least 40, at least 50, at least 60, at least 70, at least 80, at least 90, at least 100, at least 120, at least 140, at least 160, at least 180, at least 200, at least 220, at least 240, at least 260, at least 280, at least 300, at least 350, at least 400, or at least 500 guides. In an embodiment, a system or complex herein may comprise a multimeric CRISPR-Cas effector protein, or Cas polypeptides thereof, and multiple guides, e.g., at least 2, at least 5, at least 10, at least 15, at least 20, at least 30, at least 40, at least 50, at least 60, at least 70, at least 80, at least 90, at least 100, at least 120, at least 140, at least 160, at least 180, at least 200, at least 220, at least 240, at least 260, at least 280, at least 300, at least 350, at least 400, or at least 500 guides.

[0302] The multimeric CRISPR-Cas effector protein may form part of a multiplexed CRISPR-Cas system or complex, which further comprises tandemly arranged guide molecules, e.g., guide RNAs (gRNAs), comprising a series of 2, 3, 4, 5, 6, 7, 8, 9, 10, 15, 25, 25, 30, or more than 30 guide sequences, each capable of specifically hybridizing to a target sequence in a genomic locus of interest in a cell. In an embodiment, the functional CRISPR-Cas system or complex binds to the multiple target sequences. In an embodiment, the functional CRISPR-Cas system or complex may edit the multiple target sequences, e.g., the target sequences may comprise a genomic locus, and in an embodiment, there may be an alteration of gene expression. In an embodiment, the functional CRISPR-Cas system or complex may comprise further functional domains. In an embodiment, the invention provides a method for altering or modifying expression of multiple gene products. The method may comprise introducing into a cell containing said target nucleic acids, e.g., RNA molecules, or DNA molecules, or containing and expressing target nucleic acid, e.g., RNA molecules, or DNA molecules; for instance, the target nucleic acids may encode gene products or provide for expression of gene products (e.g., regulatory sequences).

[0303] In some general embodiments, one or more of the Cas enzymes used for multiplex targeting is associated with one or more functional domains.

[0304] In any of the described methods the strand break may be a single strand break or a double strand break. In preferred embodiments the double strand break may refer to the breakage of two sections of RNA, such as the two sections of RNA formed when a single strand RNA molecule has folded onto itself or putative double helices that are formed with an RNA molecule which contains self-complementary sequences allows parts of the RNA to fold and pair with itself.

### Multiplex Targeting Approach

[0305] The CRISPR-Cas systems or complexes herein can employ more than one RNA guide without losing activity. This may enable the use of the CRISPR-Cas systems or complexes as defined herein for targeting multiple targets (e.g., RNA targets, DNA targets), genes or gene loci, with a single system or complex as defined herein. The guide molecules, e.g., guide RNAs, may be tandemly arranged, optionally separated by a nucleotide sequence such as a direct repeat as defined herein. The position of the different guide molecules, e.g., guide RNA is the tandem does not influence the activity.

[0306] In any of the described methods the multimeric CRISPR-Cas effector protein, or Cas polypeptides thereof, may be delivered with multiple guides for multiplexed use. In any of the described methods more than one multimeric CRISPR-Cas effector protein, or Cas polypeptides thereof, may be used. In an embodiment, one CRISPR-Cas effector protein, or Cas polypeptides thereof, may be delivered with multiple guides, e.g., at least 2, at least 5, at least 10, at least 15, at least 20, at least 30, at least 40, at least 50, at least 60, at least 70, at least 80, at least 90, at least 100, at least 120, at least 140, at least 160, at least 180, at least 200, at least 220, at least 240, at least 260, at least 280, at least 300, at least 350, at least 400, or at least 500 guides. In an embodiment, a system or complex herein may comprise a multimeric CRISPR-Cas effector protein, or Cas polypeptides thereof, and multiple guides, e.g., at least 2, at least 5, at least 10, at least 15, at least 20, at least 30, at least 40, at least 50, at least 60, at least 70, at least 80, at least 90, at least 100, at least 120, at least 140, at least 160, at least 180, at least 200, at least 220, at least 240, at least 260, at least 280, at least 300, at least 350, at least 400, or at least 500 guides.

[0307] The multimeric CRISPR-Cas effector protein may form part of a multiplexed CRISPR-Cas system or complex, which further comprises tandemly arranged guide molecules, e.g., guide RNAs (gRNAs), comprising a series of 2, 3, 4, 5, 6, 7, 8, 9, 10, 15, 25, 25, 30, or more than 30 guide sequences, each capable of specifically hybridizing to a target sequence in a genomic locus of interest in a cell. In an embodiment, the functional CRISPR-Cas system or complex binds to the multiple target sequences. In an embodiment, the functional CRISPR-Cas system or complex may edit the multiple target sequences, e.g., the target sequences may comprise a genomic locus, and in an embodiment there may be an alteration of gene expression. In an embodiment, the functional CRISPR-Cas system or complex may comprise further functional domains. In an embodiment, the invention provides a method for altering or modifying expression of multiple gene products. The method may comprise introducing into a cell containing said target nucleic acids, e.g., RNA molecules, or DNA molecules, or containing and expressing target nucleic acid, e.g., RNA molecules, or DNA molecules; for instance, the target nucleic acids may encode gene products or provide for expression of gene products (e.g., regulatory sequences).

[0308] In some general embodiments, one or more of the Cas enzymes used for multiplex targeting is associated with one or more functional domains. In some more specific embodiments, the CRISPR enzyme used for multiplex targeting is a dead Cas (dCas) as defined herein elsewhere. In an embodiment, each of the guide sequence is at least 16, 17, 18, 19, 20, 25 nucleotides, or between 16-30, or between 16-25, or between 16-20 nucleotides in length. Examples of multiplex genome engineering using CRISPR effector proteins are provided in Cong et al. (Science February 15; 339 (6121): 819-23 (2013) and other publications cited herein.

[0309] In any of the described methods the strand break may be a single strand break or a double strand break. In preferred embodiments the double strand break may refer to the breakage of two sections of RNA, such as the two sections of RNA formed when a single strand RNA molecule has folded onto itself or putative double helices that are formed with an RNA molecule which contains self-complementary sequences allows parts of the RNA to fold and pair with itself.

[0310] In the practice of the invention, loops of the guide molecule may be extended, without colliding with the Cas protein by the insertion of distinct RNA loop(s) or distinct sequence(s) that may recruit adaptor proteins that can bind to the distinct RNA loop(s) or distinct sequence(s). The adaptor proteins may include, but are not limited to, orthogonal RNA-binding protein/aptamer combinations that exist within the diversity of bacteriophage coat proteins. A list of such coat proteins includes, but is not limited to: QB, F2, GA, fr, JP501, M12, R17, BZ13, JP34, JP500, KUI, M11, MX1, TW18, VK, SP, FI, ID2, NL95, TW19, AP205, φCb5, φCb8r, φCb12r, φCb23r, 7s and PRR1. These adaptor proteins or orthogonal RNA binding proteins can further recruit effector proteins or fusions which comprise one or more functional domains.

### RNA Base Editing

[0311] The present disclosure also provides for a base editing system. Such base editing systems can be adapted for use with the CRISPR-Cas system described herein or a variant thereof. In general, such a system may comprise a deaminase (e.g., an adenosine deaminase or cytidine deaminase) fused with a Cas15, a Cas5, a Cas7, or a Cas 6 protein or a variant thereof. The Cas15 protein may be a dead Cas15 protein or a Cas15 nickase protein. In certain examples, the system comprises a mutated form of an adenosine deaminase fused with a dead Cas15 or Cas15 nickase. The mutated form of the adenosine deaminase may have both adenosine deaminase and cytidine deaminase activities.

[0312] In one aspect, the present disclosure provides an engineered adenosine deaminase. The engineered adenosine deaminase may comprise one or more mutations herein. In an embodiment, the engineered adenosine deaminase has cytidine deaminase activity. In certain examples, the engineered adenosine deaminase has both cytidine deaminase activity and adenosine deaminase. In some cases, the modifications by base editors herein may be used for targeting post-translational signaling or catalysis. In an embodiment, compositions herein comprise nucleotide sequence comprising encoding sequences for one or more components of a base editing system.

[0313] Examples of base editing systems include those described in WO2019071048, WO2019084063, WO2019126716, WO2019126709, WO2019126762, WO2019126774, Cox DBT, et al., RNA editing with CRISPR-Cas13, Science. 2017 Nov. 24; 358 (6366): 1019-1027; Abudayyeh O O, et al., A cytosine deaminase for programmable single-base RNA editing, Science 26 Jul. 2019: Vol. 365, Issue 6451, pp. 382-386; Gaudelli N M et al., Programmable base editing of A•T to G•C in genomic DNA without DNA cleavage, Nature volume 551, pages 464-471 (23 Nov. 2017); Komor A C, et al., Programmable editing of a target base in genomic DNA without double-stranded DNA cleavage. Nature. 2016 May 19; 533 (7603): 420-4.

### Polynucleotides and Vectors

[0314] The systems and compositions herein may comprise one or more polynucleotides (aka nucleic acid molecules). In an embodiment, one or more polynucleotide(s) comprise one or more nucleotide sequences encoding one or more components of a CRISPR-Cas system or a composition thereof as disclosed herein. In an embodiment, a polynucleotide comprises one or more nucleic acid sequences encoding one or more of the β-CAPS polypeptide(s), the one or more Cas protein(s), one or more guide sequences, or any combination thereof. In an embodiment, the present disclosure further provides vectors or vector systems comprising one or more polynucleotides as disclosed herein. The vectors or vector systems include those described in the delivery sections as disclosed herein. In an embodiment, a vector is a viral vector.

[0315] In an embodiment, the polynucleotide sequence is recombinant DNA. In further embodiments, the polynucleotide sequence further comprises additional sequences as described elsewhere herein. In an embodiment, the nucleic acid sequence is synthesized in vitro.

[0316] Aspects of the invention relate to polynucleotide molecules that encode one or more components of the CRISPR-Cas system or composition thereof as referred to in any embodiment herein. In an embodiment, the polynucleotide molecules may comprise further regulatory sequences. By means of guidance and not limitation, the polynucleotide sequence can be part of an expression plasmid, a minicircle, a lentiviral vector, a retroviral vector, an adenoviral or adeno-associated viral vector, a piggyback vector, or a tol2 vector. In an embodiment, the polynucleotide sequence may be a bicistronic expression construct. In further embodiments, the isolated polynucleotide sequence may be incorporated in a cellular genome. In yet further embodiments, the isolated polynucleotide sequence may be part of a cellular genome. In further embodiments, the isolated polynucleotide sequence may be comprised in an artificial chromosome. In an embodiment, the 5′ and/or 3′ end of the isolated polynucleotide sequence may be modified to improve the stability of the sequence of actively avoid degradation. In an embodiment, the isolated polynucleotide sequence may be comprised in a bacteriophage. In other embodiments, the isolated polynucleotide sequence may be contained in agrobacterium species. In an embodiment, the isolated polynucleotide sequence is lyophilized.

### Codon Optimization

[0317] Aspects of the invention relate to polynucleotide molecules that encode one or more components of one or more CRISPR-Cas systems as described in any of the embodiments herein, wherein at least one or more regions of the polynucleotide molecule may be codon optimized for expression in a eukaryotic cell. In an embodiment, the polynucleotide molecules that encode one or more components of one or more CRISPR-Cas systems as described in any of the embodiments herein are optimized for expression in a mammalian cell or a plant cell.

[0318] An example of a codon optimized sequence, is in this instance a sequence optimized for expression in a eukaryote, e.g., humans (i.e., being optimized for expression in humans), or for another eukaryote, animal or mammal as herein discussed; see, e.g., SaCas9 human codon optimized sequence in International Patent Publication No. WO 2014/093622 (PCT/US2013/074667) as an example of a codon optimized sequence (from knowledge in the art and this disclosure, codon optimizing coding nucleic acid molecule(s), especially as to effector protein is within the ambit of the skilled artisan). Whilst this is preferred, it will be appreciated that other examples are possible and codon optimization for a host species other than human, or for codon optimization for specific organs is known. In an embodiment, an enzyme coding sequence encoding a DNA/RNA-targeting Cas protein is codon optimized for expression in particular cells, such as eukaryotic cells. The eukaryotic cells may be those of or derived from a particular organism, such as a plant or a mammal, including but not limited to human, or non-human eukaryote or animal or mammal as herein discussed, e.g., mouse, rat, rabbit, dog, livestock, or non-human mammal or primate. In an embodiment, processes for modifying the germ line genetic identity of human beings and/or processes for modifying the genetic identity of animals which are likely to cause them suffering without any substantial medical benefit to man or animal, and also animals resulting from such processes, may be excluded. In general, codon optimization refers to a process of modifying a nucleic acid sequence for enhanced expression in the host cells of interest by replacing at least one codon (e.g., about or more than about 1, 2, 3, 4, 5, 10, 15, 20, 25, 50, or more codons) of the native sequence with codons that are more frequently or most frequently used in the genes of that host cell while maintaining the native amino acid sequence.

[0319] Various species exhibit particular bias for certain codons of a particular amino acid. Codon bias (differences in codon usage between organisms) often correlates with the efficiency of translation of messenger RNA (mRNA), which is in turn believed to be dependent on, among other things, the properties of the codons being translated and the availability of particular transfer RNA (tRNA) molecules. The predominance of selected tRNAs in a cell is generally a reflection of the codons used most frequently in peptide synthesis. Accordingly, genes can be tailored for optimal gene expression in a given organism based on codon optimization. Codon usage tables are readily available, for example, at the “Codon Usage Database” available at www.kazusa.orjp/codon/and these tables can be adapted in a number of ways. e Nakamura, Y., et al. “Codon usage tabulated from the international DNA sequence databases: status for the year 2000” Nucl. Acids Res. 28:292 (2000). Computer algorithms for codon optimizing a particular sequence for expression in a particular host cell are also available, such as Gene Forge (Aptagen; Jacobus, PA), are also available. In an embodiment, one or more codons (e.g., 1, 2, 3, 4, 5, 10, 15, 20, 25, 50, or more, or all codons) in a sequence encoding a DNA/RNA-targeting Cas protein corresponds to the most frequently used codon for a particular amino acid.

### Delivery

[0320] In an embodiment, the present disclosure also provides delivery systems for introducing one or more components of the CRISPR-Cas systems, compositions, polynucleotides, vectors, or any combination thereof, disclosed herein, to cells, tissues, organs, or organisms. A delivery system may comprise one or more delivery vehicles and/or cargos. Exemplary delivery systems and methods include those described in paragraphs to of Feng Zhang et al., (WO2016106236A1), and pages 1241-1251 and Table 1 of Lino C A et al., Delivering CRISPR: a review of the challenges and approaches, DRUG DELIVERY, 2018, VOL. 25, NO. 1, 1234-1257, which are incorporated by reference herein in their entireties. In an embodiment, a delivery vehicle is a lipid nanoparticle, a viral capsid, an engineered retroelement vector, a polynucleotide-based nano-structure, or an extracellular contractile injection system.

[0321] In an embodiment, the delivery systems may be used to introduce the components of the systems and compositions to plant cells. For example, the components may be delivered to plant using electroporation, microinjection, aerosol beam injection of plant cell protoplasts, biolistic methods, DNA particle bombardment, and/or Agrobacterium-mediated transformation. Examples of methods and delivery systems for plants include those described in Fu et al., Transgenic Res. 2000 February;9 (1): 11-9; Klein R M, et al., Biotechnology. 1992; 24:384-6; Casas A M et al., Proc Natl Acad Sci USA. 1993 Dec. 1; 90 (23): 11212-11216; and U.S. Pat. No. 5,563,055, Davey M R et al., Plant Mol Biol. 1989 September; 13 (3): 273-85, which are incorporated by reference herein in their entireties.

[0322] The example delivery compositions, systems, and methods described herein related to composition or nucleic acid-guided nuclease also apply to functional domains and other components (e.g., other proteins and polynucleotides related to the nucleic acid-guided nuclease, such as reverse transcriptase, nucleotide deaminase, retrotransposon, donor polynucleotide, etc.).

### Cargos

[0323] The delivery systems may comprise one or more cargos. The cargos may comprise one or more components of the systems and compositions herein. A cargo may comprise one or more of the following: i) a plasmid encoding one or more proteins components in the compositions and systems such as the nucleic acid-guided nuclease and/or functional domains; ii) a plasmid encoding one or more guide molecules, iii) mRNA of one or more one or more proteins components in the compositions and systems such as the nucleic acid-guided nuclease and/or functional domains; iv) one or more guide molecules, e.g., guide RNAs; v) one or more proteins components in the compositions and systems such as the nucleic acid-guided nuclease and/or functional domains; vi) any combination thereof. The one or more protein components may include the nuclei acid-guided nuclease (e.g., Cas), reverse transcriptase, nucleotide deaminase, retrotransposon protein, other functional domain, or any combination thereof.

[0324] In an embodiment, a cargo may comprise a plasmid encoding one or more proteins components in the compositions and systems such as the nucleic acid-guided nuclease and/or functional domains and one or more (e.g., a plurality of) guide molecules, e.g., guide RNAs. In some cases, the plasmid may also encode a recombination template (e.g., for HDR). In an embodiment, a cargo may comprise mRNA encoding one or more protein components and one or more guide molecules, e.g., guide RNAs.

[0325] In an embodiment, a cargo may comprise one or more protein components and one or more guide molecules, e.g., guide RNAs, e.g., in the form of ribonucleoprotein complexes (RNP). The ribonucleoprotein complexes may be delivered by methods and systems herein. In some cases, the ribonucleoprotein may be delivered by way of a polypeptide-based shuttle agent. In one example, the ribonucleoprotein may be delivered using synthetic peptides comprising an endosome leakage domain (ELD) operably linked to a cell penetrating domain (CPD), to a histidine-rich domain and a CPD, e.g., as describe in WO2016161516. RNP may also be used for delivering the compositions and systems to plant cells, e.g., as described in Wu J W, et al., Nat Biotechnol. 2015 November;33 (11): 1162-4.

### Physical Delivery

[0326] In an embodiment, the cargos may be introduced to cells by physical delivery methods. Examples of physical methods include microinjection, electroporation, and hydrodynamic delivery. Both nucleic acid and proteins may be delivered using such methods. For example, one or more protein components may be prepared in vitro, isolated, (refolded, purified if needed), and introduced to cells.

### Microinjection

[0327] Microinjection of the cargo directly to cells can achieve high efficiency, e.g., above 90% or about 100%. In an embodiment, microinjection may be performed using a microscope and a needle (e.g., with 0.5-5.0 μm in diameter) to pierce a cell membrane and deliver the cargo directly to a target site within the cell. Microinjection may be used for in vitro and ex vivo delivery.

[0328] Plasmids comprising coding sequences for one or more protein components and/or guide molecules, e.g., guide RNAs, and/or mRNAs, may be microinjected. In some cases, microinjection may be used i) to deliver DNA directly to a cell nucleus, and/or ii) to deliver mRNA (e.g., in vitro transcribed) to a cell nucleus or cytoplasm. In certain examples, microinjection may be used to delivery sgRNA directly to the nucleus and mRNA to the cytoplasm, e.g., facilitating translation and shuttling of one or more protein components to the nucleus.

[0329] Microinjection may be used to generate genetically modified animals. For example, gene editing cargos may be injected into zygotes to allow for efficient germline modification. Such approach can yield normal embryos and full-term mouse pups harboring the desired modification(s). Microinjection can also be used to provide transiently up-or down-regulate a specific gene within the genome of a cell, e.g., using CRISPRa and CRISPRi.

### Electroporation

[0330] In an embodiment, the cargos and/or delivery vehicles may be delivered by electroporation. Electroporation may use pulsed high-voltage electrical currents to transiently open nanometer-sized pores within the cellular membrane of cells suspended in buffer, allowing for components with hydrodynamic diameters of tens of nanometers to flow into the cell. In some cases, electroporation may be used on various cell types and efficiently transfer cargo into cells. Electroporation may be used for in vitro and ex vivo delivery.

[0331] Electroporation may also be used to deliver the cargo to into the nuclei of mammalian cells by applying specific voltage and reagents, e.g., by nucleofection. Such approaches include those described in Wu Y, et al. (2015). Cell Res 25:67-79; Ye L, et al. (2014). Proc Natl Acad Sci USA 111:9591-6; Choi P S, Meyerson M. (2014). Nat Commun 5:3728; Wang J, Quake S R. (2014). Proc Natl Acad Sci 111:13157-62. Electroporation may also be used to deliver the cargo in vivo, e.g., with methods described in Zuckermann M, et al. (2015). Nat Commun 6:7391.

### Hydrodynamic Delivery

[0332] Hydrodynamic delivery may also be used for delivering the cargos, e.g., for in vivo delivery. In an embodiment, hydrodynamic delivery may be performed by rapidly pushing a large volume (8-10% body weight) solution containing the gene editing cargo into the bloodstream of a subject (e.g., an animal or human), e.g., for mice via the tail vein. As blood is incompressible, the large bolus of liquid may result in an increase in hydrodynamic pressure that temporarily enhances permeability into endothelial and parenchymal cells, allowing for cargo not normally capable of crossing a cellular membrane to pass into cells. This approach may be used for delivering naked DNA plasmids and proteins. The delivered cargos may be enriched in liver, kidney, lung, muscle, and/or heart.

### Transfection

[0333] The cargos, e.g., nucleic acids, may be introduced to cells by transfection methods for introducing nucleic acids into cells. Examples of transfection methods include calcium phosphate-mediated transfection, cationic transfection, liposome transfection, dendrimer transfection, heat shock transfection, magnetofection, lipofection, impalefection, optical transfection, proprietary agent-enhanced uptake of nucleic acid.

### Delivery Vehicles

[0334] The delivery systems may comprise one or more delivery vehicles. The delivery vehicles may deliver the cargo into cells, tissues, organs, or organisms (e.g., animals or plants). The cargos may be packaged, carried, or otherwise associated with the delivery vehicles. The delivery vehicles may be selected based on the types of cargo to be delivered, and/or the delivery is in vitro and/or in vivo. Examples of delivery vehicles include vectors, viruses, non-viral vehicles, and other delivery reagents described herein.

[0335] The delivery vehicles in accordance with the present invention may have a greatest dimension (e.g., diameter) of less than 100 microns (μm). In an embodiment, the delivery vehicles have a greatest dimension of less than 10 μm. In an embodiment, the delivery vehicles may have a greatest dimension of less than 2000 nanometers (nm). In an embodiment, the delivery vehicles may have a greatest dimension of less than 1000 nanometers (nm). In an embodiment, the delivery vehicles may have a greatest dimension (e.g., diameter) of less than 900 nm, less than 800 nm, less than 700 nm, less than 600 nm, less than 500 nm, less than 400 nm, less than 300 nm, less than 200 nm, less than 150 nm, or less than 100 nm, less than 50 nm. In an embodiment, the delivery vehicles may have a greatest dimension ranging between 25 nm and 200 nm.

[0336] In an embodiment, the delivery vehicles may be or comprise particles. For example, the delivery vehicle may be or comprise nanoparticles (e.g., particles with a greatest dimension (e.g., diameter) no greater than 1000 nm. The particles may be provided in different forms, e.g., as solid particles (e.g., metal such as silver, gold, iron, titanium), non-metal, lipid-based solids, polymers), suspensions of particles, or combinations thereof. Metal, dielectric, and semiconductor particles may be prepared, as well as hybrid structures (e.g., core-shell particles). Nanoparticles may also be used to deliver the compositions and systems to plant cells, e.g., as described in International Patent Publication No. WO 2008042156, US Publication Application No. U.S. Pat. No. 20,130,185823, and International Patent Publication No WO 2015/089419.

### Vectors

[0337] The systems, compositions, and/or delivery systems may comprise one or more vectors. The present disclosure also includes vector systems. A vector system may comprise one or more vectors. In an embodiment, a vector refers to a nucleic acid molecule capable of transporting another nucleic acid to which it has been linked. Vectors include nucleic acid molecules that are single-stranded, double-stranded, or partially double-stranded; nucleic acid molecules that comprise one or more free ends, no free ends (e.g., circular); nucleic acid molecules that comprise DNA, RNA, or both; and other varieties of polynucleotides known in the art. A vector may be a plasmid, e.g., a circular double stranded DNA loop into which additional DNA segments can be inserted, such as by standard molecular cloning techniques. Certain vectors may be capable of autonomous replication in a host cell into which they are introduced (e.g., bacterial vectors having a bacterial origin of replication and episomal mammalian vectors). Some vectors (e.g., non-episomal mammalian vectors) are integrated into the genome of a host cell upon introduction into the host cell, and thereby are replicated along with the host genome. In certain examples, vectors may be expression vectors, e.g., capable of directing the expression of genes to which they are operatively-linked. In some cases, the expression vectors may be for expression in eukaryotic cells. Common expression vectors of utility in recombinant DNA techniques are often in the form of plasmids.

[0338] Examples of vectors include pGEX, pMAL, pRIT5, E. coli expression vectors (e.g., pTrc, pET 11d, yeast expression vectors (e.g., pYepSec1, pMFa, pJRY88, pYES2, and picZ, Baculovirus vectors (e.g., for expression in insect cells such as SF9 cells) (e.g., pAc series and the pVL series), mammalian expression vectors (e.g., pCDM8 and pMT2PC.

[0339] A vector may comprise i) one or more protein components encoding sequence(s), and/or ii) a single, or at least 2, at least 3, at least 4, at least 5, at least 6, at least 7, at least 8, at least 9, at least 10, at least 12, at least 14, at least 16, at least 32, at least 48, at least 50 guide RNA(s) encoding sequences. In a single vector there can be a promoter for each RNA coding sequence. Alternatively or additionally, in a single vector, there may be a promoter controlling (e.g., driving transcription and/or expression) multiple RNA encoding sequences.

[0340] Furthermore, that compositions or systems may be delivered via a vector, e.g., a separate vector or the same vector that is encoding the complex. When provided by a separate vector, the RNA that targets nucleic acid-guided nuclease expression can be administered sequentially or simultaneously. When administered sequentially, the RNA that targets nucleic acid-guided nuclease expression is to be delivered after the RNA that is intended for gene editing or gene engineering. This period may be a period of minutes (e.g., 5 minutes, 10 minutes, 20 minutes, 30 minutes, 45 minutes, 60 minutes). This period may be a period of hours (e.g., 2 hours, 4, hours, 6 hours, 8 hours, 12 hours, 24 hours). This period may be a period of days (e.g., 2 days, 3 days, 4 days, 7 days). This period may be a period of weeks (e.g., 2 weeks, 3 weeks, 4 weeks). This period may be a period of months (e.g., 2 months, 4 months, 6 months, 12 months). This period may be a period of years (2 years, 3 years, 4 years). In this fashion, the nucleic acid-guided nuclease associates with a first gRNA capable of hybridizing to a first target, such as a genomic locus or loci of interest and undertakes the function(s) desired of the system (e.g., gene engineering); and subsequently the nucleic acid-guided nuclease may then associate with the second gRNA capable of hybridizing to the sequence comprising at least part of the nucleic acid-guided nuclease. Where the guide RNA targets the sequences encoding expression of the nucleic acid-guided nuclease, the enzyme becomes impeded, and the system becomes self-inactivating. In the same manner, RNA that targets nucleic acid-guided nuclease expression applied via, for example liposome, lipofection, particles, microvesicles as explained herein, may be administered sequentially or simultaneously. Similarly, self-inactivation may be used for inactivation of one or more guide RNA used to target one or more targets.

### Regulatory Elements

[0341] A vector may comprise one or more regulatory elements. The regulatory element(s) may be operably linked to coding sequences of nucleic acid-guided nuclease, accessary proteins, guide molecules, e.g., guide RNAs (e.g., a single guide RNA, crRNA, and/or tracrRNA), or combination thereof. The term “operably linked” is intended to mean that the nucleotide sequence of interest is linked to the regulatory element(s) in a manner that allows for expression of the nucleotide sequence (e.g., in an in vitro transcription/translation system or in a host cell when the vector is introduced into the host cell). In certain examples, a vector may comprise: a first regulatory element operably linked to a nucleotide sequence encoding a nucleic acid-guided nuclease, and a second regulatory element operably linked to a nucleotide sequence encoding a guide RNA.

[0342] Examples of regulatory elements include promoters, enhancers, internal ribosomal entry sites (IRES), and other expression control elements (e.g., transcription termination signals, such as polyadenylation signals and poly-U sequences). Such regulatory elements are described, for example, in Goeddel, GENE EXPRESSION TECHNOLOGY: METHODS IN ENZYMOLOGY 185, Academic Press, San Diego, Calif. (1990). Regulatory elements include those that direct constitutive expression of a nucleotide sequence in many types of host cell and those that direct expression of the nucleotide sequence only in certain host cells (e.g., tissue-specific regulatory sequences). A tissue-specific promoter may direct expression primarily in a desired tissue of interest, such as muscle, neuron, bone, skin, blood, specific organs (e.g., liver, pancreas), or particular cell types (e.g., lymphocytes). Regulatory elements may also direct expression in a temporal-dependent manner, such as in a cell-cycle dependent or developmental stage-dependent manner, which may or may not also be tissue or cell-type specific.

[0343] Examples of promoters include one or more pol III promoter (e.g., 1, 2, 3, 4, 5, or more pol III promoters), one or more pol II promoters (e.g., 1, 2, 3, 4, 5, or more pol II promoters), one or more pol I promoters (e.g., 1, 2, 3, 4, 5, or more pol I promoters), or combinations thereof. Examples of pol III promoters include, but are not limited to, U6 and H1 promoters. Examples of pol II promoters include, but are not limited to, the retroviral Rous sarcoma virus (RSV) LTR promoter (optionally with the RSV enhancer), the cytomegalovirus (CMV) promoter (optionally with the CMV enhancer), the SV40 promoter, the dihydrofolate reductase promoter, the β-actin promoter, the phosphoglycerol kinase (PGK) promoter, and the EF1α promoter.

### Viral Vectors

[0344] The cargos may be delivered by viruses. In an embodiment, viral vectors are used. A viral vector may comprise virally-derived DNA or RNA sequences for packaging into a virus (e.g., retroviruses, replication defective retroviruses, adenoviruses, replication defective adenoviruses, and adeno-associated viruses). Viral vectors also include polynucleotides carried by a virus for transfection into a host cell. Viruses and viral vectors may be used for in vitro, ex vivo, and/or in vivo deliveries.

### Adeno Associated Virus (AAV)

[0345] The systems and compositions herein may be delivered by adeno associated virus (AAV). AAV vectors may be used for such delivery. AAV, of the Dependovirus genus and Parvoviridae family, is a single stranded DNA virus. In an embodiment, AAV may provide a persistent source of the provided DNA, as AAV delivered genomic material can exist indefinitely in cells, e.g., either as exogenous DNA or, with some modification, be directly integrated into the host DNA. In an embodiment, AAV do not cause or relate with any diseases in humans. The virus itself is able to efficiently infect cells while provoking little to no innate or adaptive immune response or associated toxicity.

[0346] Examples of AAV that can be used herein include AAV-1, AAV-2, AAV-3, AAV-4, AAV-5, AAV-6, AAV-8, and AAV-9. The type of AAV may be selected with regard to the cells to be targeted; e.g., one can select AAV serotypes 1, 2, 5 or a hybrid capsid AAV1, AAV2, AAV5 or any combination thereof for targeting brain or neuronal cells; and one can select AAV4 for targeting cardiac tissue. AAV8 is useful for delivery to the liver. AAV-2-based vectors were originally proposed for CFTR delivery to CF airways, other serotypes such as AAV-1, AAV-5, AAV-6, and AAV-9 exhibit improved gene transfer efficiency in a variety of models of the lung epithelium. Examples of cell types targeted by AAV are described in Grimm, D. et al, J. Virol. 82:5887-5911 (2008)) and shown as follows in Table 7.

TABLE 7

| Cell Line | AAV-1 | AAV-2 | AAV-3 | AAV-4 | AAV-5 | AAV-6 | AAV-8 | AAV-9 |
|---|---|---|---|---|---|---|---|---|
| Huh-7 | 13 | 100 | 2.5 | 0.0 | 0.1 | 10 | 0.7 | 0.0 |
| HEK293 | 25 | 100 | 2.5 | 0.1 | 0.1 | 5 | 0.7 | 0.1 |
| HeLa | 3 | 100 | 2.0 | 0.1 | 6.7 | 1 | 0.2 | 0.1 |
| HepG2 | 3 | 100 | 16.7 | 0.3 | 1.7 | 5 | 0.3 | ND |
| Hep1A | 20 | 100 | 0.2 | 1.0 | 0.1 | 1 | 0.2 | 0.0 |
| 911 | 17 | 100 | 11 | 0.2 | 0.1 | 17 | 0.1 | ND |
| CHO | 100 | 100 | 14 | 1.4 | 333 | 50 | 10 | 1.0 |
| COS | 33 | 100 | 33 | 3.3 | 5.0 | 14 | 2.0 | 0.5 |
| MeWo | 10 | 100 | 20 | 0.3 | 6.7 | 10 | 1.0 | 0.2 |
| NIH3T3 | 10 | 100 | 2.9 | 2.9 | 0.3 | 10 | 0.3 | ND |
| A549 | 14 | 100 | 20 | ND | 0.5 | 10 | 0.5 | 0.1 |
| HT1180 | 20 | 100 | 10 | 0.1 | 0.3 | 33 | 0.5 | 0.1 |
| Monocytes | 1111 | 100 | ND | ND | 125 | 1429 | ND | ND |
| Immature DC | 2500 | 100 | ND | ND | 222 | 2857 | ND | ND |
| Mature DC | 2222 | 100 | ND | ND | 333 | 3333 | ND | ND |

[0347] The AAV particles may be created in HEK 293 T cells. Once particles with specific tropism have been created, they are used to infect the target cell line much in the same way that native viral particles do. This may allow for persistent presence of the components in the infected cell type, and what makes this version of delivery particularly suited to cases where long-term expression is desirable. Examples of doses and formulations for AAV that can be used include those describe in U.S. Pat. Nos. 8,454,972 and 8,404,658.

[0348] Various strategies may be used for delivery the systems and compositions herein with AAVs. In an embodiment, coding sequences of nucleic acid-guided nuclease and gRNA may be packaged directly onto one DNA plasmid vector and delivered via one AAV particle. In an embodiment, AAVs may be used to deliver gRNAs into cells that have been previously engineered to express nucleic acid-guided nuclease. In an embodiment, coding sequences of nucleic acid-guided nuclease and gRNA may be made into two separate AAV particles, which are used for co-transfection of target cells. In an embodiment, markers, tags, and other sequences may be packaged in the same AAV particles as coding sequences of nucleic acid-guided nuclease and/or gRNAs.

### Lentiviruses

[0349] The systems and compositions herein may be delivered by lentiviruses. Lentiviral vectors may be used for such delivery. Lentiviruses are complex retroviruses that have the ability to infect and express their genes in both mitotic and post-mitotic cells.

[0350] Examples of lentiviruses include human immunodeficiency virus (HIV), which may use its envelope glycoproteins of other viruses to target a broad range of cell types; minimal non-primate lentiviral vectors based on the equine infectious anemia virus (EIAV), which may be used for ocular therapies. In an embodiment, self-inactivating lentiviral vectors with an siRNA targeting a common exon shared by HIV tat/rev, a nucleolar-localizing TAR decoy, and an anti-CCR5-specific hammerhead ribozyme (see, e.g., DiGiusto et al. (2010) Sci Transl Med 2: 36ra43) may be used/and or adapted to the nucleic acid-targeting system herein.

[0351] Lentiviruses may be pseudo-typed with other viral proteins, such as the G protein of vesicular stomatitis virus. In doing so, the cellular tropism of the lentiviruses can be altered to be as broad or narrow as desired. In some cases, to improve safety, second-and third-generation lentiviral systems may split essential genes across three plasmids, which may reduce the likelihood of accidental reconstitution of viable viral particles within cells.

[0352] In an embodiment, leveraging the integration ability, lentiviruses may be used to create libraries of cells comprising various genetic modifications, e.g., for screening and/or studying genes and signaling pathways.

### Adenoviruses

[0353] The systems and compositions herein may be delivered by adenoviruses. Adenoviral vectors may be used for such delivery. Adenoviruses include nonenveloped viruses with an icosahedral nucleocapsid containing a double stranded DNA genome. Adenoviruses may infect dividing and non-dividing cells. In an embodiment, adenoviruses do not integrate into the genome of host cells, which may be used for limiting off-target effects of systems in gene editing applications.

### Viral Vehicles for Delivery to Plants

[0354] The systems and compositions may be delivered to plant cells using viral vehicles. In an embodiment, the compositions and systems may be introduced in the plant cells using a plant viral vector (e.g., as described in Scholthof et al. 1996, Annu Rev Phytopathol. 1996; 34:299-323). Such viral vector may be a vector from a DNA virus, e.g., geminivirus (e.g., cabbage leaf curl virus, bean yellow dwarf virus, wheat dwarf virus, tomato leaf curl virus, maize streak virus, tobacco leaf curl virus, or tomato golden mosaic virus) or nanovirus (e.g., Faba bean necrotic yellow virus). The viral vector may be a vector from an RNA virus, e.g., tobravirus (e.g., tobacco rattle virus, tobacco mosaic virus), potexvirus (e.g., potato virus X), or hordeivirus (e.g., barley stripe mosaic virus). The replicating genomes of plant viruses may be non-integrative vectors.

### Non-Viral Vehicles

[0355] The delivery vehicles may comprise non-viral vehicles. In general, methods and vehicles capable of delivering nucleic acids and/or proteins may be used for delivering the systems compositions herein. Examples of non-viral vehicles include lipid nanoparticles, cell-penetrating peptides (CPPs), DNA nanoclews, gold nanoparticles, streptolysin O, multifunctional envelope-type nanodevices (MENDs), lipid-coated mesoporous silica particles, and other inorganic nanoparticles.

### Lipid Particles

[0356] The delivery vehicles may comprise lipid particles, e.g., lipid nanoparticles (LNPs) and liposomes.

### Lipid Nanoparticles (LNPs)

[0357] LNPs may encapsulate nucleic acids within cationic lipid particles (e.g., liposomes), and may be delivered to cells with relative ease. In an embodiment, lipid nanoparticles do not contain any viral components, which helps minimize safety and immunogenicity concerns. Lipid particles may be used for in vitro, ex vivo, and in vivo deliveries. Lipid particles may be used for various scales of cell populations.

[0358] In an embodiment. LNPs may be used for delivering DNA molecules (e.g., those comprising coding sequences of nucleic acid-guided nuclease and/or gRNA) and/or RNA molecules (e.g., mRNA of nucleic acid-guided nuclease, gRNAs). In certain cases, LNPs may be use for delivering RNP complexes of nucleic acid-guided nuclease/gRNA.

[0359] Components in LNPs may comprise cationic lipids 1,2-dilineoyl-3-dimethylammonium-propane (DLinDAP), 1,2-dilinoleyloxy-3-N,N-dimethylaminopropane (DLinDMA), 1,2-dilinoleyloxyketo-N, N-dimethyl-3-aminopropane (DLinK-DMA), 1,2-dilinoleyl-4-(2-dimethylaminoethyl)-[1,3]-dioxolane (DLinKC2-DMA), (3-o-[2″-(methoxypolyethyleneglycol 2000) succinoyl]-1,2-dimyristoyl-sn-glycol (PEG-S-DMG), R-3-[(ro-methoxy-poly(ethylene glycol)2000) carbamoyl]-1,2-dimyristyloxlpropyl-3-amine (PEG-C-DOMG, and any combination thereof. Preparation of LNPs and encapsulation may be adapted from Rosin et al, Molecular Therapy, vol. 19, no. 12, pages 1286-220 December 2011).

### Liposomes

[0360] In an embodiment, a lipid particle may be liposome. Liposomes are spherical vesicle structures composed of a uni-or multilamellar lipid bilayer surrounding internal aqueous compartments and a relatively impermeable outer lipophilic phospholipid bilayer. In an embodiment, liposomes are biocompatible, nontoxic, can deliver both hydrophilic and lipophilic drug molecules, protect their cargo from degradation by plasma enzymes, and transport their load across biological membranes and the blood brain barrier (BBB).

[0361] Liposomes can be made from several different types of lipids, e.g., phospholipids. A liposome may comprise natural phospholipids and lipids such as 1,2-distearoryl-sn-glycero-3-phosphatidyl choline (DSPC), sphingomyelin, egg phosphatidylcholines, monosialoganglioside, or any combination thereof.

[0362] Several other additives may be added to liposomes in order to modify their structure and properties. For instance, liposomes may further comprise cholesterol, sphingomyelin, and/or 1,2-dioleoyl-sn-glycero-3-phosphoethanolamine (DOPE), e.g., to increase stability and/or to prevent the leakage of the liposomal inner cargo.

### Stable Nucleic-Acid-Lipid Particles (SNALPs)

[0363] In an embodiment, the lipid particles may be stable nucleic acid lipid particles (SNALPs). SNALPs may comprise an ionizable lipid (DLinDMA) (e.g., cationic at low pH), a neutral helper lipid, cholesterol, a diffusible polyethylene glycol (PEG)-lipid, or any combination thereof. In an embodiment, SNALPs may comprise synthetic cholesterol, dipalmitoylphosphatidylcholine, 3-N-[(w-methoxy polyethylene glycol)2000) carbamoyl]-1,2-dimyrestyloxypropylamine, and cationic 1,2-dilinoleyloxy-3-N,Ndimethylaminopropane. In an embodiment, SNALPs may comprise synthetic cholesterol, 1,2-distearoyl-sn-glycero-3-phosphocholine, PEG-CDMA, and 1,2-dilinoleyloxy-3-(N;N-dimethyl)aminopropane (DLinDMA)

### Other Lipids

[0364] The lipid particles may also comprise one or more other types of lipids, e.g., cationic lipids, such as amino lipid 2,2-dilinoleyl-4-dimethylaminoethyl-[1,3]-dioxolane (DLin-KC2-DMA), DLin-KC2-DMA4, C12-200 and colipids disteroylphosphatidyl choline, cholesterol, and PEG-DMG.

### Lipoplexes/Polyplexes

[0365] In an embodiment, the delivery vehicles comprise lipoplexes and/or polyplexes. Lipoplexes may bind to negatively charged cell membrane and induce endocytosis into the cells. Examples of lipoplexes may be complexes comprising lipid(s) and non-lipid components. Examples of lipoplexes and polyplexes include FuGENE-6 reagent, a non-liposomal solution containing lipids and other components, zwitterionic amino lipids (ZALs), Ca2p (e.g., forming DNA/Ca2+ microcomplexes), polyethenimine (PEI) (e.g., branched PEI), and poly(L-lysine) (PLL).

### Cell Penetrating Peptides

[0366] In an embodiment, the delivery vehicles comprise cell penetrating peptides (CPPs). CPPs are short peptides that facilitate cellular uptake of various molecular cargo (e.g., from nanosized particles to small chemical molecules and large fragments of DNA).

[0367] CPPs may be of different sizes, amino acid sequences, and charges. In an embodiment, CPPs can translocate the plasma membrane and facilitate the delivery of various molecular cargoes to the cytoplasm or an organelle. CPPs may be introduced into cells via different mechanisms, e.g., direct penetration in the membrane, endocytosis-mediated entry, and translocation through the formation of a transitory structure.

[0368] CPPs may have an amino acid composition that either contains a high relative abundance of positively charged amino acids such as lysine or arginine or has sequences that contain an alternating pattern of polar/charged amino acids and non-polar, hydrophobic amino acids. These two types of structures are referred to as polycationic or amphipathic, respectively. A third class of CPPs are the hydrophobic peptides, containing only apolar residues, with low net charge or have hydrophobic amino acid groups that are crucial for cellular uptake. Another type of CPPs is the trans-activating transcriptional activator (Tat) from Human Immunodeficiency Virus 1 (HIV-1). Examples of CPPs include to Penetratin, Tat (48-60), Transportan, and (R-AhX-R4) (Ahx refers to aminohexanoyl), Kaposi fibroblast growth factor (FGF) signal peptide sequence, integrin β3 signal peptide sequence, polyarginine peptide Args sequence, Guanine rich-molecular transporters, and sweet arrow peptide. Examples of CPPs and related applications also include those described in U.S. Pat. No. 8,372,951.

[0369] CPPs can be used for in vitro and ex vivo work quite readily, and extensive optimization for each cargo and cell type is usually required. In an embodiment, CPPs may be covalently attached to the nucleic acid-guided nuclease directly, which is then complexed with the gRNA and delivered to cells. In an embodiment, separate delivery of CPP-Cas and CPP-gRNA to multiple cells may be performed. CPP may also be used to delivery RNPs.

[0370] CPPs may be used to deliver the compositions and systems to plants. In an embodiment, CPPs may be used to deliver the components to plant protoplasts, which are then regenerated to plant cells and further to plants.

### DNA Nanoclews

[0371] In an embodiment, the delivery vehicles comprise DNA nanoclews. A DNA nanoclew refers to a sphere-like structure of DNA (e.g., with a shape of a ball of yarn). The nanoclew may be synthesized by rolling circle amplification with palindromic sequences that aide in the self-assembly of the structure. The sphere may then be loaded with a payload. An example of DNA nanoclew is described in Sun W et al, J Am Chem Soc. 2014 Oct. 22; 136 (42): 14722-5; and Sun W et al, Angew Chem Int Ed Engl. 2015 Oct. 5; 54 (41): 12029-33. DNA nanoclew may have a palindromic sequences to be partially complementary to the gRNA within the nucleic acid-guided nuclease: gRNA ribonucleoprotein complex. A DNA nanoclew may be coated, e.g., coated with PEI to induce endosomal escape.

### Gold Nanoparticles

[0372] In an embodiment, the delivery vehicles comprise gold nanoparticles (also referred to AuNPs or colloidal gold). Gold nanoparticles may form complex with cargos, e.g., nucleic acid-guided nuclease: gRNA RNP. Gold nanoparticles may be coated, e.g., coated in a silicate and an endosomal disruptive polymer, PAsp (DET). Examples of gold nanoparticles include AuraSense Therapeutics' Spherical Nucleic Acid (SNA™) constructs, and those described in Mout R, et al. (2017). ACS Nano 11:2452-8; Lee K, et al. (2017). Nat Biomed Eng 1:889-901.

iTOP

[0373] In an embodiment, the delivery vehicles comprise iTOP. iTOP refers to a combination of small molecules drives the highly efficient intracellular delivery of native proteins, independent of any transduction peptide. iTOP may be used for induced transduction by osmocytosis and propanebetaine, using NaCl-mediated hyperosmolality together with a transduction compound (propanebetaine) to trigger macropinocytotic uptake into cells of extracellular macromolecules. Examples of iTOP methods and reagents include those described in D′Astolfo D S, Pagliero R J, Pras A, et al. (2015). Cell 161:674-690.

### Polymer-Based Particles

[0374] In an embodiment, the delivery vehicles may comprise polymer-based particles (e.g., nanoparticles). In an embodiment, the polymer-based particles may mimic a viral mechanism of membrane fusion. The polymer-based particles may be a synthetic copy of Influenza virus machinery and form transfection complexes with various types of nucleic acids ((siRNA, miRNA, plasmid DNA or shRNA, mRNA) that cells take up via the endocytosis pathway, a process that involves the formation of an acidic compartment. The low pH in late endosomes acts as a chemical switch that renders the particle surface hydrophobic and facilitates membrane crossing. Once in the cytosol, the particle releases its payload for cellular action. This Active Endosome Escape technology is safe and maximizes transfection efficiency as it is using a natural uptake pathway. In an embodiment, the polymer-based particles may comprise alkylated and carboxyalkylated branched polyethylenimine. In an embodiment, the polymer-based particles are VIROMER, e.g., VIROMER RNAi, VIROMER RED, VIROMER mRNA, VIROMER CRISPR. Example methods of delivering the systems and compositions herein include those described in Bawage S S et al., Synthetic mRNA expressed Cas13a mitigates RNA virus infections, www.biorxiv.org/content/10.1101/370460v1.full doi: doi.org/10.1101/370460, Viromer® RED, a powerful tool for transfection of keratinocytes. doi: 10.13140/RG.2.2.16993.61281, Viromer® Transfection-Factbook 2018: technology, product overview, users' data., doi: 10.13140/RG.2.2.23912.16642.

### Streptolysin ((SLO)

[0375] The delivery vehicles may be streptolysin O (SLO). SLO is a toxin produced by Group A streptococci that works by creating pores in mammalian cell membranes. SLO may act in a reversible manner, which allows for the delivery of proteins (e.g., up to 100 kDa) to the cytosol of cells without compromising overall viability. Examples of SLO include those described in Sierig G, et al. (2003). Infect Immun 71:446-55; Walev I, et al. (2001). Proc Natl Acad Sci USA 98:3185-90; Teng K W, et al. (2017). Elife 6: e25460.

### Multifunctional Envelope-Type Nanodevice (MEND)

[0376] The delivery vehicles may comprise multifunctional envelope-type nanodevice (MENDs). MENDs may comprise condensed plasmid DNA, a PLL core, and a lipid film shell. A MEND may further comprise cell-penetrating peptide (e.g., stearyl octaarginine). The cell penetrating peptide may be in the lipid shell. The lipid envelope may be modified with one or more functional components, e.g., one or more of: polyethylene glycol (e.g., to increase vascular circulation time), ligands for targeting of specific tissues/cells, additional cell-penetrating peptides (e.g., for greater cellular delivery), lipids to enhance endosomal escape, and nuclear delivery tags. In an embodiment, the MEND may be a tetra-lamellar MEND (T-MEND), which may target the cellular nucleus and mitochondria. In certain examples, a MEND may be a PEG-peptide-DOPE-conjugated MEND (PPD-MEND), which may target bladder cancer cells. Examples of MENDs include those described in Kogure K, et al. (2004). J Control Release 98:317-23; Nakamura T, et al. (2012). Acc Chem Res 45:1113-21.

### Lipid-Coated Mesoporous Silica Particles

[0377] The delivery vehicles may comprise lipid-coated mesoporous silica particles. Lipid-coated mesoporous silica particles may comprise a mesoporous silica nanoparticle core and a lipid membrane shell. The silica core may have a large internal surface area, leading to high cargo loading capacities. In an embodiment, pore sizes, pore chemistry, and overall particle sizes may be modified for loading different types of cargos. The lipid coating of the particle may also be modified to maximize cargo loading, increase circulation times, and provide precise targeting and cargo release. Examples of lipid-coated mesoporous silica particles include those described in Du X, et al. (2014). Biomaterials 35:5580-90; Durfee P N, et al. (2016). ACS Nano 10:8325-45.

### Inorganic Nanoparticles

[0378] The delivery vehicles may comprise inorganic nanoparticles. Examples of inorganic nanoparticles include carbon nanotubes (CNTs) (e.g., as described in Bates K and Kostarelos K. (2013). Adv Drug Deliv Rev 65:2023-33.), bare mesoporous silica nanoparticles (MSNPs) (e.g., as described in Luo G F, et al. (2014). Sci Rep 4:6064), and dense silica nanoparticles (SiNPs) (as described in Luo D and Saltzman W M. (2000). Nat Biotechnol 18:893-5).

### Exosomes

[0379] The delivery vehicles may comprise exosomes. Exosomes include membrane bound extracellular vesicles, which can be used to contain and delivery various types of biomolecules, such as proteins, carbohydrates, lipids, and nucleic acids, and complexes thereof (e.g., RNPs). Examples of exosomes include those described in Schroeder A, et al., J Intern Med. 2010 January;267 (1): 9-21; El-Andaloussi S, et al., Nat Protoc. 2012 December;7 (12): 2112-26; Uno Y, et al., Hum Gene Ther. 2011 June;22 (6): 711-9; Zou W, et al., Hum Gene Ther. 2011 April;22 (4): 465-75.

[0380] In an embodiment, the exosome may form a complex (e.g., by binding directly or indirectly) to one or more components of the cargo. In certain examples, a molecule of an exosome may be fused with first adapter protein and a component of the cargo may be fused with a second adapter protein. The first and the second adapter protein may specifically bind each other, thus associating the cargo with the exosome. Examples of such exosomes include those described in Ye Y, et al., Biomater. Sci. 2020 Apr. 28. doi: 10.1039/d0bm00427h.

### Genetically Modified Cells, Tissues, and Organisms

[0381] The present disclosure further provides cells comprising one or more components of the CRISPR-Cas systems, compositions, polynucleotides, vectors, delivery systems, or any combination thereof, as described herein. Also provided include cells modified by the CRISPR-Cas systems (i.e., “engineered cells”) and methods disclosed herein, and cell cultures, tissues, organs, organism comprising such engineered cells or progeny thereof.

[0382] In an embodiment, the present disclosure provides a method of modifying a cell or organism. a cell, a tissue, or an organism. The cell may be a prokaryotic cell or a eukaryotic cell. The cell may be a mammalian cell. The mammalian cell many be a non-human primate, bovine, porcine, rodent or mouse cell. The cell may be a non-mammalian eukaryotic cell such as poultry, fish, or shrimp. The cell may be a therapeutic T cell or antibody-producing B-cell. The cell may also be a plant cell. The plant cell may be of a crop plant such as cassava, corn, sorghum, wheat, or rice. The plant cell may also be of an algae, tree, or vegetable. The modification introduced to the cell by the present invention may be such that the cell and progeny of the cell are altered for improved production of biologic products such as an antibody, starch, alcohol or other desired cellular output. The modification introduced to the cell by the present invention may be such that the cell and progeny of the cell include an alteration that changes the biologic product produced.

[0383] In an embodiment, one or more polynucleotide molecules, vectors, or vector systems driving expression of one or more elements of the compositions, systems, or delivery systems comprising one or more elements of the nucleic acid-targeting system are introduced into a host cell such that expression of the elements of the nucleic acid-targeting system direct formation of a nucleic acid-targeting complex at one or more target sites. In an embodiment of the invention the host cell may be a eukaryotic cell, a prokaryotic cell, or a plant cell.

[0384] In an embodiment, the host cell is a cell of a cell line. Cell lines are available from a variety of sources known to those with skill in the art (see, e.g., the American Type Culture Collection (ATCC) (Manassas, Va.)). In an embodiment, a cell transfected with one or more vectors described herein is used to establish a new cell line comprising one or more vector-derived sequences. In an embodiment, a cell transiently transfected with the components of a system as described herein (such as by transient transfection of one or more vectors, or transfection with RNA), and modified through the activity of a complex, is used to establish a new cell line comprising cells containing the modification but lacking any other exogenous sequence. In an embodiment, cells transiently or non-transiently transfected with one or more vectors described herein, or cell lines derived from such cells are used in assessing one or more test compounds.

[0385] Further intended are isolated human cells or tissues, or organisms comprising the engineered cells disclosed herein (e.g., plants or animals (e.g., non-human animals)) comprising one or more of the components of the CRISPR-Cas systems, compositions, polynucleotide molecules, vectors, vector systems, or cells described in any of the embodiments herein. In an embodiment, host cells and cell lines modified by or comprising the compositions, systems or modified enzymes of present invention are provided, including (isolated) stem cells, and progeny thereof.

[0386] In an embodiment, the plants or non-human animals comprise at least one of the system components, polynucleotide molecules, vectors, vector systems, or cells described in any of the embodiments herein at least one tissue type of the plant or non-human animal. In an embodiment, non-human animals comprise at least one of the system components, polynucleotide molecules, vectors, vector systems, or cells described in any of the embodiments herein in at least one tissue type. In an embodiment, the presence of the system components is transient, in that they are degraded over time. In an embodiment, expression of the components of the systems and compositions described in any of the embodiments comprised in polynucleotide molecules, vectors, vector systems, or cells is limited to certain tissue types or regions in the plant or non-human animal. In an embodiment, the expression of the components of the systems and compositions described in any of the embodiments comprised in polynucleotide molecules, vectors, vector systems, or cells is dependent of a physiological cue. In an embodiment, expression of the components of the systems and compositions described in any of the embodiments comprised in polynucleotide molecules, vectors, vector systems, or cells may be triggered by an exogenous molecule. In an embodiment, expression of the components of the systems and compositions described in any of the embodiments comprised in polynucleotide molecules, vectors, vector systems, or cells is dependent on the expression of a non-cas molecule in the plant or non-human animal.

### Applications in Plants and Fungi

[0387] The compositions, systems, and methods described herein can be used to perform gene or genome interrogation or editing or manipulation in plants and fungi. For example, the applications include investigation and/or selection and/or interrogations and/or comparison and/or manipulations and/or transformation of plant genes or genomes; e.g., to create, identify, develop, optimize, or confer trait(s) or characteristic(s) to plant(s) or to transform a plant or fugus genome. There can accordingly be improved production of plants, new plants with new combinations of traits or characteristics or new plants with enhanced traits. The compositions, systems, and methods can be used with regard to plants in Site-Directed Integration (SDI) or Gene Editing (GE) or any Near Reverse Breeding (NRB) or Reverse Breeding (RB) techniques.

[0388] The compositions, systems, and methods herein may be used to confer desired traits (e.g., enhanced nutritional quality, increased resistance to diseases and resistance to biotic and abiotic stress, and increased production of commercially valuable plant products or heterologous compounds) on essentially any plants and fungi, and their cells and tissues. The compositions, systems, and methods may be used to modify endogenous genes or to modify their expression without the permanent introduction into the genome of any foreign gene.

[0389] In an embodiment, compositions, systems, and methods may be used in genome editing in plants or where RNAi or similar genome editing techniques have been used previously; see, e.g., Nekrasov, “Plant genome editing made easy: targeted mutagenesis in model and crop plants using the CRISPR-Cas system,” Plant Methods 2013, 9:39 (doi: 10.1186/1746-4811-9-39); Brooks, “Efficient gene editing in tomato in the first generation using the CRISPR-Cas9 system,” Plant Physiology September 2014 pp 114247577; Shan, “Targeted genome modification of crop plants using a CRISPR-Cas system,” Nature Biotechnology 31, 686-688 (2013); Feng, “Efficient genome editing in plants using a CRISPR/Cas system,” Cell Research (2013)23:1229-1232. doi: 10.1038/cr.2013.114; published online 20 Aug. 2013; Xie, “RNA-guided genome editing in plants using a CRISPR-Cas system,” Mol Plant. 2013 November;6 (6): 1975-83. doi: 10.1093/mp/sst119. Epub 2013 Aug. 17; Xu, “Gene targeting using the Agrobacterium tumefaciens-mediated CRISPR-Cas system in rice,” Rice 2014, 7:5 (2014), Zhou et al., “Exploiting SNPs for biallelic CRISPR mutations in the outcrossing woody perennial Populus reveals 4-coumarate: CoA ligase specificity and Redundancy,” New Phytologist (2015) (Forum)1-4 (available online only at www.newphytologist.com); Caliando et al, “Targeted DNA degradation using a CRISPR device stably carried in the host genome, NATURE COMMUNICATIONS 6:6989, DOI: 10.1038/ncomms7989, www.nature.com/naturecommunications DOI: 10.1038/ncomms7989; U.S. Pat. No. 6,603,061—Agrobacterium-Mediated Plant Transformation Method; U.S. Pat. No. 7,868,149-Plant Genome Sequences and Uses Thereof and US 2009/0100536-Transgenic Plants with Enhanced Agronomic Traits, Morrell et al “Crop genomics: advances and applications,” Nat Rev Genet. 2011 Dec. 29; 13 (2): 85-96, all the contents and disclosure of each of which are herein incorporated by reference in their entirety. Aspects of utilizing the compositions, systems, and methods may be analogous to the use of the CRISPR-Cas system in plants, and mention is made of the University of Arizona website “CRISPR-PLANT” (www.genome.arizona.edu/crispr/) (supported by Penn State and AGI).

[0390] The compositions, systems, and methods may also be used on protoplasts. A “protoplast” refers to a plant cell that has had its protective cell wall completely or partially removed using, for example, mechanical or enzymatic means resulting in an intact biochemical competent unit of living plant that can reform their cell wall, proliferate, regenerate, and grow into a whole plant under proper growing conditions.

[0391] The compositions, systems, and methods may be used for screening genes (e.g., endogenous, mutations) of interest. In an embodiment, genes of interest include those encoding enzymes involved in the production of a component of added nutritional value or generally genes affecting agronomic traits of interest, across species, phyla, and plant kingdom. By selectively targeting e.g., genes encoding enzymes of metabolic pathways, the genes responsible for certain nutritional aspects of a plant can be identified. Similarly, by selectively targeting genes which may affect a desirable agronomic trait, the relevant genes can be identified. Accordingly, the present invention encompasses screening methods for genes encoding enzymes involved in the production of compounds with a particular nutritional value and/or agronomic traits.

[0392] It is also understood that reference herein to animal cells may also apply, mutatis mutandis, to plant or fungal cells unless otherwise apparent; and the enzymes herein having reduced off-target effects and systems employing such enzymes can be used in plant applications, including those mentioned herein.

[0393] In some cases, nucleic acids introduced to plants and fungi may be codon optimized for expression in the plants and fungi. Methods of codon optimization include those described in Kwon K C, et al., Codon Optimization to Enhance Expression Yields Insights into Chloroplast Translation, Plant Physiol. 2016 September;172 (1): 62-77.

[0394] The components (e.g., Cas proteins) in the compositions and systems may further comprise one or more functional domains described herein. In an embodiment, the functional domains may be an exonuclease. Such exonuclease may increase the efficiency of the Cas proteins' function, e.g., mutagenesis efficiency. An example of the functional domain is Trex2, as described in Weiss T et al., www.biorxiv.org/content/10.1101/2020.04.11.037572v1, doi: doi.org/10.1101/2020.04.11.037572.

### Examples of Plants

[0395] The compositions, systems, and methods herein can be used to confer desired traits on essentially any plant. A wide variety of plants and plant cell systems may be engineered for the desired physiological and agronomic characteristics. In general, the term “plant” relates to any various photosynthetic, eukaryotic, unicellular, or multicellular organism of the kingdom Plantae characteristically growing by cell division, containing chloroplasts, and having cell walls comprised of cellulose. The term plant encompasses monocotyledonous and dicotyledonous plants.

[0396] The compositions, systems, and methods may be used over a broad range of plants, such as for example with dicotyledonous plants belonging to the orders Magniolales, Illiciales, Laurales, Piperales, Aristochiales, Nymphaeales, Ranunculales, Papeverales, Sarraceniaceae, Trochodendrales, Hamamelidales, Eucomiales, Leitneriales, Myricales, Fagales, Casuarinales, Caryophyllales, Batales, Polygonales, Plumbaginales, Dilleniales, Theales, Malvales, Urticales, Lecythidales, Violales, Salicales, Capparales, Ericales, Diapensales, Ebenales, Primulales, Rosales, Fabales, Podostemales, Haloragales, Myrtales, Cornales, Proteales, San tales, Rafflesiales, Celastrales, Euphorbiales, Rhamnales, Sapindales, Juglandales, Geraniales, Polygalales, Umbellales, Gentianales, Polemoniales, Lamiales, Plantaginales, Scrophulariales, Campanulales, Rubiales, Dipsacales, and Asterales; monocotyledonous plants such as those belonging to the orders Alismatales, Hydrocharitales, Najadales, Triuridales, Commelinales, Eriocaulales, Restionales, Poales, Juncales, Cyperales, Typhales, Bromeliales, Zingiberales, Arecales, Cyclanthales, Pandanales, Arales, Lilliales, and Orchid ales, or with plants belonging to Gymnospermae, e.g., those belonging to the orders Pinales, Ginkgoales, Cycadales, Araucariales, Cupressales and Gnetales.

[0397] The compositions, systems, and methods herein can be used over a broad range of plant species, included in the non-limitative list of dicot, nocot or gymnosperm genera hereunder: Atropa, Alseodaphne, Anacardium, Arachis, Beilschmiedia, Brassica, Carthamus, Cocculus, Croton, Cucumis, Citrus, Citrullus, Capsicum, Catharanthus, Cocos, Coffea, Cucurbita, Daucus, Duguetia, Eschscholzia, Ficus, Fragaria, Glaucium, Glycine, Gossypium, Helianthus, Hevea, Hyoscyamus, Lactuca, Landolphia, Linum, Litsea, Lycopersicon, Lupinus, Manihot, Majorana, Malus, Medicago, Nicotiana, Olea, Parthenium, Papaver, Persea, Phaseolus, Pistacia, Pisum, Pyrus, Prunus, Raphanus, Ricinus, Senecio, Sinomenium, Stephania, Sinapis, Solanum, Theobroma, Trifolium, Trigonella, Vicia, Vinca, Vilis, and Vigna; and the genera Allium, Andropogon, Aragrostis, Asparagus, Avena, Cynodon, Elaeis, Festuca, Festulolium, Heterocallis, Hordeum, Lemna, Lolium, Musa, Oryza, Panicum, Pannesetum, Phleum, Poa, Secale, Sorghum, Triticum, Zea, Abies, Cunninghamia, Ephedra, Picea, Pinus, and Pseudotsuga.

[0398] In an embodiment, target plants and plant cells for engineering include those monocotyledonous and dicotyledonous plants, such as crops including grain crops (e.g., wheat, maize, rice, millet, barley), fruit crops (e.g., tomato, apple, pear, strawberry, orange), forage crops (e.g., alfalfa), root vegetable crops (e.g., carrot, potato, sugar beets, yam), leafy vegetable crops (e.g., lettuce, spinach); flowering plants (e.g., petunia, rose, chrysanthemum), conifers and pine trees (e.g., pine fir, spruce); plants used in phytoremediation (e.g., heavy metal accumulating plants); oil crops (e.g., sunflower, rape seed) and plants used for experimental purposes (e.g., Arabidopsis). Specifically, the plants are intended to comprise without limitation angiosperm and gymnosperm plants such as acacia, alfalfa, amaranth, apple, apricot, artichoke, ash tree, asparagus, avocado, banana, barley, beans, beet, birch, beech, blackberry, blueberry, broccoli, Brussel's sprouts, cabbage, canola, cantaloupe, carrot, cassava, cauliflower, cedar, a cereal, celery, chestnut, cherry, Chinese cabbage, citrus, clementine, clover, coffee, corn, cotton, cowpea, cucumber, cypress, eggplant, elm, endive, eucalyptus, fennel, figs, fir, geranium, grape, grapefruit, groundnuts, ground cherry, gum hemlock, hickory, kale, kiwifruit, kohlrabi, larch, lettuce, leek, lemon, lime, locust, pine, maidenhair, maize, mango, maple, melon, millet, mushroom, mustard, nuts, oak, oats, oil palm, okra, onion, orange, an ornamental plant or flower or tree, papaya, palm, parsley, parsnip, pea, peach, peanut, pear, peat, pepper, persimmon, pigeon pea, pine, pineapple, plantain, plum, pomegranate, potato, pumpkin, radicchio, radish, rapeseed, raspberry, rice, rye, sorghum, safflower, sallow, soybean, spinach, spruce, squash, strawberry, sugar beet, sugarcane, sunflower, sweet potato, sweet corn, tangerine, tea, tobacco, tomato, trees, triticale, turf grasses, turnips, vine, walnut, watercress, watermelon, wheat, yams, yew, and zucchini.

[0399] The term plant also encompasses Algae, which are mainly photoautotrophs unified primarily by their lack of roots, leaves and other organs that characterize higher plants. The compositions, systems, and methods can be used over a broad range of “algae” or “algae cells.” Examples of algae include eukaryotic phyla, including the Rhodophyta (red algae), Chlorophyta (green algae), Phaeophyta (brown algae), Bacillariophyta (diatoms), Eustigmatophyta and dinoflagellates as well as the prokaryotic phylum Cyanobacteria (blue-green algae). Examples of algae species include those of Amphora, Anabaena, Anikstrodesmis, Botryococcus, Chaetoceros, Chlamydomonas, Chlorella, Chlorococcum, Cyclotella, Cylindrotheca, Dunaliella, Emiliana, Euglena, Hematococcus, Isochrysis, Monochrysis, Monoraphidium, Nannochloris, Nannnochloropsis, Navicula, Nephrochloris, Nephroselmis, Nitzschia, Nodularia, Nostoc, Oochromonas, Oocystis, Oscillartoria, Pavlova, Phaeodactylum, Playtmonas, Pleurochrysis, Porhyra, Pseudoanabaena, Pyramimonas, Stichococcus, Synechococcus, Synechocystis, Tetraselmis, Thalassiosira, and Trichodesmium.

### Plant Promoters

[0400] In order to ensure appropriate expression in a plant cell, the components of the components and systems herein may be placed under control of a plant promoter. A plant promoter is a promoter operable in plant cells. A plant promoter is capable of initiating transcription in plant cells, whether or not its origin is a plant cell. The use of different types of promoters is envisaged.

[0401] In an embodiment, the plant promoter is a constitutive plant promoter, which is a promoter that is able to express the open reading frame (ORF) that it controls in all or nearly all of the plant tissues during all or nearly all developmental stages of the plant (referred to as “constitutive expression”). One example of a constitutive promoter is the cauliflower mosaic virus 35S promoter. In an embodiment, the plant promoter is a regulated promoter, which directs gene expression not constitutively, but in a temporally- and/or spatially-regulated manner, and includes tissue-specific, tissue-preferred, and inducible promoters. Different promoters may direct the expression of a gene in different tissues or cell types, or at different stages of development, or in response to different environmental conditions. In an embodiment, the plant promoter is a tissue-preferred promoters, which can be utilized to target enhanced expression in certain cell types within a particular plant tissue, for instance vascular cells in leaves or roots or in specific cells of the seed.

[0402] Exemplary plant promoters include those obtained from plants, plant viruses, and bacteria such as Agrobacterium or Rhizobium which comprise genes expressed in plant cells. Additional examples of promoters include those described in Kawamata et al., (1997) Plant Cell Physiol 38:792-803; Yamamoto et al., (1997) Plant J 12:255-65; Hire et al, (1992) Plant Mol Biol 20:207-18, Kuster et al, (1995) Plant Mol Biol 29:759-72, and Capana et al., (1994) Plant Mol Biol 25:681-91.

[0403] In an embodiment, a plant promoter may be an inducible promoter, which is inducible and allows for spatiotemporal control of gene editing or gene expression may use a form of energy. The form of energy may include sound energy, electromagnetic radiation, chemical energy and/or thermal energy. Examples of inducible systems include tetracycline inducible promoters (Tet-On or Tet-Off), small molecule two-hybrid transcription activations systems (FKBP, ABA, etc.), or light inducible systems (Phytochrome, LOV domains, or cryptochrome), such as a Light Inducible Transcriptional Effector (LITE) that direct changes in transcriptional activity in a sequence-specific manner. In a particular example, some of the components of a light inducible system include a Cas protein, a light-responsive cytochrome heterodimer (e.g., from Arabidopsis thaliana), and a transcriptional activation/repression domain.

[0404] In an embodiment, the promoter may be a chemical-regulated promotor (where the application of an exogenous chemical induces gene expression) or a chemical-repressible promoter (where application of the chemical represses gene expression). Examples of chemical-inducible promoters include maize In2-2 promoter (activated by benzene sulfonamide herbicide safeners), the maize GST promoter (activated by hydrophobic electrophilic compounds used as pre-emergent herbicides), the tobacco PR-1 a promoter (activated by salicylic acid), promoters regulated by antibiotics (such as tetracycline-inducible and tetracycline-repressible promoters).

### Stable Integration in the Genome of Plants

[0405] In an embodiment, polynucleotides encoding the components of the compositions and systems may be introduced for stable integration into the genome of a plant cell. In some cases, vectors or expression systems may be used for such integration. The design of the vector or the expression system can be adjusted depending on for when, where and under what conditions the guide RNA and/or the Cas gene are expressed. In some cases, the polynucleotides may be integrated into an organelle of a plant, such as a plastid, mitochondrion, or a chloroplast. The elements of the expression system may be on one or more expression constructs which are either circular such as a plasmid or transformation vector, or non-circular such as linear double stranded DNA.

[0406] In an embodiment, the method of integration generally comprises the steps of selecting a suitable host cell or host tissue, introducing the construct(s) into the host cell or host tissue, and regenerating plant cells or plants therefrom. In an embodiment, the expression system for stable integration into the genome of a plant cell may contain one or more of the following elements: a promoter element that can be used to express the RNA and/or Cas enzyme in a plant cell; a 5′ untranslated region to enhance expression; an intron element to further enhance expression in certain cells, such as monocot cells; a multiple-cloning site to provide convenient restriction sites for inserting the guide molecule, e.g., guide RNA, and/or the Cas gene sequences and other desired elements; and a 3′ untranslated region to provide for efficient termination of the expressed transcript.

### Transient Expression in Plants

[0407] In an embodiment, the components of the compositions and systems may be transiently expressed in the plant cell. In an embodiment, the compositions and systems may modify a target nucleic acid only when both the guide molecule, e.g., guide RNA, and the Cas protein are present in a cell, such that genomic modification can further be controlled. As the expression of the Cas protein is transient, plants regenerated from such plant cells typically contain no foreign DNA. In certain examples, the Cas protein is stably expressed, and the guide sequence is transiently expressed.

[0408] DNA and/or RNA (e.g., mRNA) may be introduced to plant cells for transient expression. In such cases, the introduced nucleic acid may be provided in sufficient quantity to modify the cell but do not persist after a contemplated period of time has passed or after one or more cell divisions.

[0409] The transient expression may be achieved using suitable vectors. Exemplary vectors that may be used for transient expression include a PEAQ vector (may be tailored for Agrobacterium-mediated transient expression) and Cabbage Leaf Curl virus (CaLCuV), and vectors described in Sainsbury F. et al., Plant Biotechnol J. 2009 September;7 (7): 682-93; and Yin K et al., Scientific Reports volume 5, Article number: 14926 (2015).

[0410] Combinations of the different methods described above are also envisaged.

Translocation to and/or Expression in Specific Plant Organelles

[0411] The compositions and systems herein may comprise elements for translocation to and/or expression in a specific plant organelle.

### Chloroplast Targeting

[0412] In an embodiment, it is envisaged that the compositions and systems are used to specifically modify chloroplast genes or to ensure expression in the chloroplast. The compositions and systems (e.g., Cas proteins, guide molecules, or their encoding polynucleotides) may be transformed, compartmentalized, and/or targeted to the chloroplast. In an example, the introduction of genetic modifications in the plastid genome can reduce biosafety issues such as gene flow through pollen.

[0413] Examples of methods of chloroplast transformation include Particle bombardment, PEG treatment, and microinjection, and the translocation of transformation cassettes from the nuclear genome to the plastid. In an embodiment, targeting of chloroplasts may be achieved by incorporating in chloroplast localization sequence, and/or the expression construct a sequence encoding a chloroplast transit peptide (CTP) or plastid transit peptide, operably linked to the 5′ region of the sequence encoding the components of the compositions and systems. Additional examples of transforming, targeting and localization of chloroplasts include those described in WO2010061186, Protein Transport into Chloroplasts, 2010, Annual Review of Plant Biology, Vol. 61:157-180, and US20040142476, which are incorporated by reference herein in their entireties.

### Exemplary Applications in Plants

[0414] The compositions, systems, and methods may be used to generate genetic variation(s) in a plant (e.g., crop) of interest. One or more, e.g., a library of, guide molecules targeting one or more locations in a genome may be provided and introduced into plant cells together with the Cas effector protein. For example, a collection of genome-scale point mutations and gene knock-outs can be generated. In an embodiment, the compositions, systems, and methods may be used to generate a plant part or plant from the cells so obtained and screening the cells for a trait of interest. The target genes may include both coding and non-coding regions. In some cases, the trait is stress tolerant and the method is a method for the generation of stress-tolerant crop varieties.

[0415] In an embodiment, the compositions, systems, and methods are used to modify endogenous genes or to modify their expression. The expression of the components may induce targeted modification of the genome, either by direct activity of the Cas nuclease and optionally introduction of recombination template DNA, or by modification of genes targeted. The different strategies described herein above allow Cas-mediated targeted genome editing without requiring the introduction of the components into the plant genome.

[0416] In some cases, the modification may be performed without the permanent introduction into the genome of the plant of any foreign gene, including those encoding CRISPR components, so as to avoid the presence of foreign DNA in the genome of the plant. This can be of interest as the regulatory requirements for non-transgenic plants are less rigorous. Components which are transiently introduced into the plant cell are typically removed upon crossing.

[0417] For example, the modification may be performed by transient expression of the components of the compositions and systems. The transient expression may be performed by delivering the components of the compositions and systems with viral vectors, delivery into protoplasts, with the aid of particulate molecules such as nanoparticles or CPPs.

Generation of Plants with Desired Traits

[0418] The compositions, systems, and methods herein may be used to introduce desired traits to plants. The approaches include introduction of one or more foreign genes to confer a trait of interest, editing or modulating endogenous genes to confer a trait of interest.

### Agronomic Traits

[0419] In an embodiment, crop plants can be improved by influencing specific plant traits. Examples of the traits include improved agronomic traits such as herbicide resistance, disease resistance, abiotic stress tolerance, high yield, and superior quality, pesticide-resistance, disease resistance, insect and nematode resistance, resistance against parasitic weeds, drought tolerance, nutritional value, stress tolerance, self-pollination voidance, forage digestibility biomass, and grain yield.

[0420] In an embodiment, genes that confer resistance to pests or diseases may be introduced to plants. In cases there are endogenous genes that confer such resistance in plants, their expression and function may be enhanced (e.g., by introducing extra copies, modifications that enhance expression and/or activity).

[0421] Examples of genes that confer resistance include plant disease resistance genes (e.g., Cf-9, Pto, RSP2, SIDMR6-1), genes conferring resistance to a pest (e.g., those described in WO96/30517), Bacillus thuringiensis proteins, lectins, Vitamin-binding proteins (e.g., avidin), enzyme inhibitors (e.g., protease or proteinase inhibitors or amylase inhibitors), insect-specific hormones or pheromones (e.g., ecdysteroid or a juvenile hormone, variant thereof, a mimetic based thereon, or an antagonist or agonist thereof) or genes involved in the production and regulation of such hormone and pheromones, insect-specific peptides or neuropeptide, Insect-specific venom (e.g., produced by a snake, a wasp, etc., or analog thereof), Enzymes responsible for a hyperaccumulation of a monoterpene, a sesquiterpene, a steroid, hydroxamic acid, a phenylpropanoid derivative or another nonprotein molecule with insecticidal activity, Enzymes involved in the modification of biologically active molecule (e.g., a glycolytic enzyme, a proteolytic enzyme, a lipolytic enzyme, a nuclease, a cyclase, a transaminase, an esterase, a hydrolase, a phosphatase, a kinase, a phosphorylase, a polymerase, an elastase, a chitinase and a glucanase, whether natural or synthetic), molecules that stimulates signal transduction, Viral-invasive proteins or a complex toxin derived therefrom, Developmental-arrestive proteins produced in nature by a pathogen or a parasite, a developmental-arrestive protein produced in nature by a plant, or any combination thereof.

[0422] The compositions, systems, and methods may be used to identify, screen, introduce or remove mutations or sequences lead to genetic variability that give rise to susceptibility to certain pathogens, e.g., host specific pathogens. Such approach may generate plants that are non-host resistance, e.g., the host and pathogen are incompatible or there can be partial resistance against all races of a pathogen, typically controlled by many genes and/or also complete resistance to some races of a pathogen but not to other races.

[0423] In an embodiment, the compositions, systems, and methods may be used to modify genes involved in plant diseases. Such genes may be removed, inactivated, or otherwise regulated or modified. Examples of plant diseases include those described in [0045]-[0080] of US20140213619A1, which is incorporated by reference herein in its entirety.

[0424] In an embodiment, genes that confer resistance to herbicides may be introduced to plants. Examples of genes that confer resistance to herbicides include genes conferring resistance to herbicides that inhibit the growing point or meristem, such as an imidazolinone or a sulfonylurea, genes conferring glyphosate tolerance (e.g., resistance conferred by, e.g., mutant 5-enolpyruvylshikimate-3-phosphate synthase genes, aroA genes and glyphosate acetyl transferase (GAT) genes, respectively), or resistance to other phosphono compounds such as by glufosinate (phosphinothricin acetyl transferase (PAT) genes from Streptomyces species, including Streptomyces hygroscopicus and Streptomyces viridichromogenes), and to pyridinoxy or phenoxy proprionic acids and cyclohexones by ACCase inhibitor-encoding genes), genes conferring resistance to herbicides that inhibit photosynthesis (such as a triazine (psbA and gs+ genes) or a benzonitrile (nitrilase gene), and glutathione S-transferase), genes encoding enzymes detoxifying the herbicide or a mutant glutamine synthase enzyme that is resistant to inhibition, genes encoding a detoxifying enzyme is an enzyme encoding a phosphinothricin acetyltransferase (such as the bar or pat protein from Streptomyces species), genes encoding hydroxyphenylpyruvate dioxygenases (HPPD) inhibitors, e.g., naturally occurring HPPD resistant enzymes, and genes encoding a mutated or chimeric HPPD enzyme.

[0425] In an embodiment, genes involved in Abiotic stress tolerance may be introduced to plants. Examples of genes include those capable of reducing the expression and/or the activity of poly(ADP-ribose) polymerase (PARP) gene, transgenes capable of reducing the expression and/or the activity of the PARG encoding genes, genes coding for a plant-functional enzyme of the nicotineamide adenine dinucleotide salvage synthesis pathway including nicotinamidase, nicotinate phosphoribosyltransferase, nicotinic acid mononucleotide adenyl transferase, nicotinamide adenine dinucleotide synthetase or nicotine amide phosphorybosyltransferase, enzymes involved in carbohydrate biosynthesis, enzymes involved in the production of polyfructose (e.g., the inulin and levan-type), the production of alpha-1,6 branched alpha-1,4-glucans, the production of alternan, the production of hyaluronan.

[0426] In an embodiment, genes that improve drought resistance may be introduced to plants. Examples of genes Ubiquitin Protein Ligase protein (UPL) protein (UPL3), DR02, DR03, ABC transporter, and DREB1A.

### Nutritionally Improved Plants

[0427] In an embodiment, the compositions, systems, and methods may be used to produce nutritionally improved plants. In an embodiment, such plants may provide functional foods, e.g., a modified food or food ingredient that may provide a health benefit beyond the traditional nutrients it contains. In certain examples, such plants may provide nutraceuticals foods, e.g., substances that may be considered a food or part of a food and provides health benefits, including the prevention and treatment of disease. The nutraceutical foods may be useful in the prevention and/or treatment of diseases in animals and humans, e.g., cancers, diabetes, cardiovascular disease, and hypertension.

[0428] An improved plant may naturally produce one or more desired compounds and the modification may enhance the level or activity or quality of the compounds. In some cases, the improved plant may not naturally produce the compound(s), while the modification enables the plant to produce such compound(s). In some cases, the compositions, systems, and methods used to modify the endogenous synthesis of these compounds indirectly, e.g., by modifying one or more transcription factors that controls the metabolism of this compound.

[0429] Examples of nutritionally improved plants include plants comprising modified protein quality, content and/or amino acid composition, essential amino acid contents, oils and fatty acids, carbohydrates, vitamins and carotenoids, functional secondary metabolites, and minerals. In an embodiment, the improved plants may comprise or produce compounds with health benefits. Examples of nutritionally improved plants include those described in Newell-McGloughlin, Plant Physiology, July 2008, Vol. 147, pp. 939-953.

[0430] Examples of compounds that can be produced include carotenoids (e.g., α-Carotene or β-Carotene), lutein, lycopene, Zeaxanthin, Dietary fiber (e.g., insoluble fibers, β-Glucan, soluble fibers, fatty acids (e.g., ω-3 fatty acids, Conjugated linoleic acid, GLA,), Flavonoids (e.g., Hydroxycinnamates, flavonols, catechins and tannins), Glucosinolates, indoles, isothiocyanates (e.g., Sulforaphane), Phenolics (e.g., stilbenes, caffeic acid and ferulic acid, epicatechin), Plant stanols/sterols, Fructans, inulins, fructo-oligosaccharides, Saponins, Soybean proteins, Phytoestrogens (e.g., isoflavones, lignans), Sulfides and thiols such as diallyl sulphide, Allyl methyl trisulfide, dithiolthiones, Tannins, such as proanthocyanidins, or any combination thereof.

[0431] The compositions, systems, and methods may also be used to modify protein/starch functionality, shelf life, taste/aesthetics, fiber quality, and allergen, antinutrient, and toxin reduction traits.

[0432] Examples of genes and nucleic acids that can be modified to introduce the traits include stearyl-ACP desaturase, DNA associated with the single allele which may be responsible for maize mutants characterized by low levels of phytic acid, Tf RAP2.2 and its interacting partner SINAT2, Tf Dof1, and DOF Tf AtDof1.1 (OBP2).

### Modification of Polyploid Plants

[0433] The compositions, systems, and methods may be used to modify polyploid plants. Polyploid plants carry duplicate copies of their genomes (e.g., as many as six, such as in wheat). In some cases, the compositions, systems, and methods can be multiplexed to affect all copies of a gene, or to target dozens of genes at once. For instance, the compositions, systems, and methods may be used to simultaneously ensure a loss of function mutation in different genes responsible for suppressing defenses against a disease. The modification may be simultaneous suppression the expression of the TaMLO-Al, TaMLO-Bl and TaMLO-Dl nucleic acid sequence in a wheat plant cell and regenerating a wheat plant therefrom, in order to ensure that the wheat plant is resistant to powdery mildew (e.g., as described in WO2015109752).

### Regulation of Fruit-Ripening

[0434] The compositions, systems, and methods may be used to regulate ripening of fruits. Ripening is a normal phase in the maturation process of fruits and vegetables. Only a few days after it starts it may render a fruit or vegetable inedible, which can bring significant losses to both farmers and consumers.

[0435] In an embodiment, the compositions, systems, and methods are used to reduce ethylene production. In an embodiment, the compositions, systems, and methods may be used to suppress the expression and/or activity of ACC synthase, insert a ACC deaminase gene or a functional fragment thereof, insert a SAM hydrolase gene or functional fragment thereof, suppress ACC oxidase gene expression

[0436] Alternatively or additionally, the compositions, systems, and methods may be used to modify ethylene receptors (e.g., suppressing ETR1) and/or Polygalacturonase (PG). Suppression of a gene may be achieved by introducing a mutation, an antisense sequence, and/or a truncated copy of the gene to the genome.

### Increasing Storage Life of Plants

[0437] In an embodiment, the compositions, systems, and methods are used to modify genes involved in the production of compounds which affect storage life of the plant or plant part. The modification may be in a gene that prevents the accumulation of reducing sugars in potato tubers. Upon high-temperature processing, these reducing sugars react with free amino acids, resulting in brown, bitter-tasting products, and elevated levels of acrylamide, which is a potential carcinogen. In an embodiment, the methods provided herein are used to reduce or inhibit expression of the vacuolar invertase gene (VInv), which encodes a protein that breaks down sucrose to glucose and fructose.

### Reducing Allergens in Plants

[0438] In an embodiment, the compositions, systems, and methods are used to generate plants with a reduced level of allergens, making them safer for consumers. To this end, the compositions, systems, and methods may be used to identify and modify (e.g., suppress) one or more genes responsible for the production of plant allergens. Examples of such genes include Lol p5, as well as those in peanuts, soybeans, lentils, peas, lupin, green beans, mung beans, such as those described in Nicolaou et al., Current Opinion in Allergy and Clinical Immunology 2011; 11 (3): 222), which is incorporated by reference herein in its entirety.

### Generation of Male Sterile Plants

[0439] The compositions, systems, and methods may be used to generate male sterile plants. Hybrid plants typically have advantageous agronomic traits compared to inbred plants. However, for self-pollinating plants, the generation of hybrids can be challenging. In different plant types (e.g., maize and rice), genes have been identified which are important for plant fertility, more particularly male fertility. Plants that are as such genetically altered can be used in hybrid breeding programs.

[0440] The compositions, systems, and methods may be used to modify genes involved male fertility, e.g., inactivating (such as by introducing mutations to) genes required for male fertility. Examples of the genes involved in male fertility include cytochrome P450-like gene (MS26) or the meganuclease gene (MS45), and those described in Wan X et al., Mol Plant. 2019 Mar. 4; 12 (3): 321-342; and Kim Y J, et al., Trends Plant Sci. 2018 January;23 (1): 53-65.

### Increasing the Fertility Stage in Plants

[0441] In an embodiment, the compositions, systems, and methods may be used to prolong the fertility stage of a plant such as of a rice. For instance, a rice fertility stage gene such as Ehd3 can be targeted in order to generate a mutation in the gene and plantlets can be selected for a prolonged regeneration plant fertility stage.

### Production of Early Yield of Products

[0442] In an embodiment, the compositions, systems, and methods may be used to produce early yield of the product. For example, flowering process may be modulated, e.g., by mutating flowering repressor gene such as SP5G. Examples of such approaches include those described in Soyk S, et al., Nat Genet. 2017 January;49 (1): 162-168.

### Oil and Biofuel Production

[0443] The compositions, systems, and methods may be used to generate plants for oil and biofuel production. Biofuels include fuels made from plant and plant-derived resources. Biofuels may be extracted from organic matter whose energy has been obtained through a process of carbon fixation or are made through the use or conversion of biomass. This biomass can be used directly for biofuels or can be converted to convenient energy containing substances by thermal conversion, chemical conversion, and biochemical conversion. This biomass conversion can result in fuel in solid, liquid, or gas form. Biofuels include bioethanol and biodiesel. Bioethanol can be produced by the sugar fermentation process of cellulose (starch), which may be derived from maize and sugar cane. Biodiesel can be produced from oil crops such as rapeseed, palm, and soybean. Biofuels can be used for transportation.

### Generation of Plants for Production of Vegetable Oils and Biofuels

[0444] The compositions, systems, and methods may be used to generate algae (e.g., diatom) and other plants (e.g., grapes) that express or overexpress high levels of oil or biofuels.

[0445] In some cases, the compositions, systems, and methods may be used to modify genes involved in the modification of the quantity of lipids and/or the quality of the lipids. Examples of such genes include those involved in the pathways of fatty acid synthesis, e.g., acetyl-CoA carboxylase, fatty acid synthase, 3-ketoacyl_acyl-carrier protein synthase III, glycerol-3-phospate deshydrogenase (G3PDH), Enoyl-acyl carrier protein reductase (Enoyl-ACP-reductase), glycerol-3-phosphate acyltransferase, lysophosphatidic acyl transferase or diacylglycerol acyltransferase, phospholipid: diacylglycerol acyltransferase, phoshatidate phosphatase, fatty acid thioesterase such as palmitoyi protein thioesterase, or malic enzyme activities.

[0446] In further embodiments, it is envisaged to generate diatoms that have increased lipid accumulation. This can be achieved by targeting genes that decrease lipid catabolization. Examples of genes include those involved in the activation of triacylglycerol and free fatty acids, β-oxidation of fatty acids, such as genes of acyl-CoA synthetase, 3-ketoacyl-CoA thiolase, acyl-CoA oxidase activity and phosphoglucomutase.

[0447] In an embodiment, algae may be modified for production of oil and biofuels, including fatty acids (e.g., fatty esters such as acid methyl esters (FAME) and fatty acid ethyl esters (FAEE)). Examples of methods of modifying microalgae include those described in Stovicek et al. Metab. Eng. Comm., 2015; 2:1; U.S. Pat. No. 8,945,839; and International Patent Publication No. WO 2015/086795.

[0448] In an embodiment, one or more genes may be introduced (e.g., overexpressed) to the plants (e.g., algae) to produce oils and biofuels (e.g., fatty acids) from a carbon source (e.g., alcohol). Examples of the genes include genes encoding acyl-CoA synthases, ester synthases, thioesterases (e.g., tesA, ‘tesA, tesB, fatB, fatB2, fatB3, fatAl, or fatA), acyl-CoA synthases (e.g., fadD, JadK, BH3103, pfl-4354, EAV15023, fadDI, fadD2, RPC_4074,fadDD35, fadDD22, faa39), ester synthases (e.g., synthase/acyl-CoA: diacylglycerl acyltransferase from Simmondsia chinensis, Acinetobacter sp. ADP, Alcanivorax borkumensis, Pseudomonas aeruginosa, Fundibacter jadensis, Arabidopsis thaliana, or Alkaligenes eutrophus, or variants thereof).

[0449] Additionally or alternatively, one or more genes in the plants (e.g., algae) may be inactivated (e.g., expression of the genes is decreased). For examples, one or more mutations may be introduced to the genes. Examples of such genes include genes encoding acyl-CoA dehydrogenases (e.g., fade), outer membrane protein receptors, and transcriptional regulator (e.g., repressor) of fatty acid biosynthesis (e.g., fabR), pyruvate formate lyases (e.g., pflB), lactate dehydrogenases (e.g., IdhA).

### Organic Acid Production

[0450] In an embodiment, plants may be modified to produce organic acids such as lactic acid. The plants may produce organic acids using sugars, pentose or hexose sugars. To this end, one or more genes may be introduced (e.g., and overexpressed) in the plants. An example of such genes includes LDH gene.

[0451] In an embodiment, one or more genes may be inactivated (e.g., expression of the genes is decreased). For examples, one or more mutations may be introduced to the genes. The genes may include those encoding proteins involved an endogenous metabolic pathway which produces a metabolite other than the organic acid of interest and/or wherein the endogenous metabolic pathway consumes the organic acid.

[0452] Examples of genes that can be modified or introduced include those encoding pyruvate decarboxylases (pdc), fumarate reductases, alcohol dehydrogenases (adh), acetaldehyde dehydrogenases, phosphoenolpyruvate carboxylases (ppc), D-lactate dehydrogenases (d-ldh), L-lactate dehydrogenases (1-1dh), lactate 2-monooxygenases, lactate dehydrogenase, cytochrome-dependent lactate dehydrogenases (e.g., cytochrome B2-dependent L-lactate dehydrogenases).

### Enhancing Plant Properties for Biofuel Production

[0453] In an embodiment, the compositions, systems, and methods are used to alter the properties of the cell wall of plants to facilitate access by key hydrolyzing agents for a more efficient release of sugars for fermentation. By reducing the proportion of lignin in a plant the proportion of cellulose can be increased. In an embodiment, lignin biosynthesis may be downregulated in the plant so as to increase fermentable carbohydrates.

[0454] In an embodiment, one or more lignin biosynthesis genes may be down regulated. Examples of such genes include 4-coumarate 3-hydroxylases (C3H), phenylalanine ammonia-lyases (PAL), cinnamate 4-hydroxylases (C4H), hydroxycinnamoyl transferases (HCT), caffeic acid O-methyltransferases (COMT), caffeoyl CoA 3-O-methyltransferases (CCoAOMT), ferulate 5-hydroxylases (F5H), cinnamyl alcohol dehydrogenases (CAD), cinnamoyl CoA-reductases (CCR), 4-coumarate-CoA ligases (4CL), monolignol-lignin-specific glycosyltransferases, and aldehyde dehydrogenases (ALDH), and those described in WO 2008064289.

[0455] In an embodiment, plant mass that produces lower level of acetic acid during fermentation may be reduced. To this end, genes involved in polysaccharide acetylation (e.g., Cas1L and those described in WO 2010096488) may be inactivated.

### Other Microorganisms for Oils and Biofuel Production

[0456] In an embodiment, microorganisms other than plants may be used for production of oils and biofuels using the compositions, systems, and methods herein. Examples of the microorganisms include those of the genus of Escherichia, Bacillus, Lactobacillus, Rhodococcus, Synechococcus, Synechoystis, Pseudomonas, Aspergillus, Trichoderma, Neurospora, Fusarium, Humicola, Rhizomucor, Kluyveromyces, Pichia, Mucor, Myceliophtora, Penicillium, Phanerochaete, Pleurotus, Trametes, Chrysosporium, Saccharomyces, Stenotrophamonas, Schizosaccharomyces, Yarrowia, or Streptomyces.

### Plant Cultures and Regeneration

[0457] In an embodiment, the modified plants or plant cells may be cultured to regenerate a whole plant which possesses the transformed or modified genotype and thus the desired phenotype. Examples of regeneration techniques include those relying on manipulation of certain phytohormones in a tissue culture growth medium, relying on a biocide and/or herbicide marker which has been introduced together with the desired nucleotide sequences, obtaining from cultured protoplasts, plant callus, explants, organs, pollens, embryos, or parts thereof.

### Detecting Modifications in the Plant Genome-Selectable Markers

[0458] When the compositions, systems, and methods are used to modify a plant, suitable methods may be used to confirm and detect the modification made in the plant. In an embodiment, when a variety of modifications are made, one or more desired modifications or traits resulting from the modifications may be selected and detected. The detection and confirmation may be performed by biochemical and molecular biology techniques such as Southern analysis, PCR, Northern blot, S1 RNase protection, primer-extension or reverse transcriptase-PCR, enzymatic assays, ribozyme activity, gel electrophoresis, Western blot, immunoprecipitation, enzyme-linked immunoassays, in situ hybridization, enzyme staining, and immunostaining.

[0459] In some cases, one or more markers, such as selectable and detectable markers, may be introduced to the plants. Such markers may be used for selecting, monitoring, isolating cells and plants with desired modifications and traits. A selectable marker can confer positive or negative selection and is conditional or non-conditional on the presence of external substrates. Examples of such markers include genes and proteins that confer resistance to antibiotics, such as hygromycin (hpt) and kanamycin (nptII), and genes that confer resistance to herbicides, such as phosphinothricin (bar) and chlorosulfuron (als), enzyme capable of producing or processing a colored substances (e.g., the β-glucuronidase, luciferase, B or CI genes).

### Applications in Fungi

[0460] The compositions, systems, and methods described herein can be used to perform efficient and cost-effective gene or genome interrogation or editing or manipulation in fungi or fungal cells, such as yeast. The approaches and applications in plants may be applied to fungi as well.

[0461] A fungal cell may be any type of eukaryotic cell within the kingdom of fungi, such as phyla of Ascomycota, Basidiomycota, Blastocladiomycota, Chytridiomycota, Glomeromycota, Microsporidia, and Neocallimastigomycota. Examples of fungi or fungal cells in include yeasts, molds, and filamentous fungi.

[0462] In an embodiment, the fungal cell is a yeast cell. A yeast cell refers to any fungal cell within the phyla Ascomycota and Basidiomycota. Examples of yeasts include budding yeast, fission yeast, and mold, S. cerervisiae, Kluyveromyces marxianus, Issatchenkia orientalis, Candida spp. (e.g., Candida albicans), Yarrowia spp. (e.g., Yarrowia lipolytica), Pichia spp. (e.g., Pichia pastoris), Kluyveromyces spp. (e.g., Kluyveromyces lactis and Kluyveromyces marxianus), Neurospora spp. (e.g., Neurospora crassa), Fusarium spp. (e.g., Fusarium oxysporum), and Issatchenkia spp. (e.g., Issatchenkia orientalis, Pichia kudriavzevii and Candida acidothermophilum).

[0463] In an embodiment, the fungal cell is a filamentous fungal cell, which grow in filaments, e.g., hyphae or mycelia. Examples of filamentous fungal cells include Aspergillus spp. (e.g., Aspergillus niger), Trichoderma spp. (e.g., Trichoderma reesei), Rhizopus spp. (e.g., Rhizopus oryzae), and Mortierella spp. (e.g., Mortierella isabellina).

[0464] In an embodiment, the fungal cell is of an industrial strain. Industrial strains include any strain of fungal cell used in or isolated from an industrial process, e.g., production of a product on a commercial or industrial scale. Industrial strain may refer to a fungal species that is typically used in an industrial process, or it may refer to an isolate of a fungal species that may be also used for non-industrial purposes (e.g., laboratory research). Examples of industrial processes include fermentation (e.g., in production of food or beverage products), distillation, biofuel production, production of a compound, and production of a polypeptide. Examples of industrial strains include, without limitation, JAY270 and ATCC4124.

[0465] In an embodiment, the fungal cell is a polyploid cell whose genome is present in more than one copy. Polyploid cells include cells naturally found in a polyploid state, and cells that has been induced to exist in a polyploid state (e.g., through specific regulation, alteration, inactivation, activation, or modification of meiosis, cytokinesis, or DNA replication). A polyploid cell may be a cell whose entire genome is polyploid, or a cell that is polyploid in a particular genomic locus of interest. In an embodiment, the abundance of guide molecule, e.g., guide RNA, may more often be a rate-limiting component in genome engineering of polyploid cells than in haploid cells, and thus the methods using the CRISPR system described herein may take advantage of using certain fungal cell types.

[0466] In an embodiment, the fungal cell is a diploid cell, whose genome is present in two copies. Diploid cells include cells naturally found in a diploid state, and cells that have been induced to exist in a diploid state (e.g., through specific regulation, alteration, inactivation, activation, or modification of meiosis, cytokinesis, or DNA replication). A diploid cell may refer to a cell whose entire genome is diploid, or it may refer to a cell that is diploid in a particular genomic locus of interest.

[0467] In an embodiment, the fungal cell is a haploid cell, whose genome is present in one copy. Haploid cells include cells naturally found in a haploid state, or cells that have been induced to exist in a haploid state (e.g., through specific regulation, alteration, inactivation, activation, or modification of meiosis, cytokinesis, or DNA replication). A haploid cell may refer to a cell whose entire genome is haploid, or it may refer to a cell that is haploid in a particular genomic locus of interest.

[0468] The compositions and systems, and nucleic acid encoding thereof may be introduced to fungi cells using the delivery systems and methods herein. Examples of delivery systems include lithium acetate treatment, bombardment, electroporation, and those described in Kawai et al., 2010, Bioeng Bugs. 2010 November-December; 1 (6): 395-403.

[0469] In an embodiment, a yeast expression vector (e.g., those with one or more regulatory elements) may be used. Examples of such vectors include a centromeric (CEN) sequence, an autonomous replication sequence (ARS), a promoter, such as an RNA Polymerase III promoter, operably linked to a sequence or gene of interest, a terminator such as an RNA polymerase III terminator, an origin of replication, and a marker gene (e.g., auxotrophic, antibiotic, or other selectable markers). Examples of expression vectors for use in yeast may include plasmids, yeast artificial chromosomes, 2u plasmids, yeast integrative plasmids, yeast replicative plasmids, shuttle vectors, and episomal plasmids.

### Biofuel and Materials Production by Fungi

[0470] In an embodiment, the compositions, systems, and methods may be used for generating modified fungi for biofuel and material productions. For instance, the modified fungi for production of biofuel or biopolymers from fermentable sugars and optionally to be able to degrade plant-derived lignocellulose derived from agricultural waste as a source of fermentable sugars. Foreign genes required for biofuel production and synthesis may be introduced into fungi. In an embodiment, the genes may encode enzymes involved in the conversion of pyruvate to ethanol or another product of interest, degrade cellulose (e.g., cellulase), endogenous metabolic pathways which compete with the biofuel production pathway.

[0471] In an embodiment, the compositions, systems, and methods may be used for generating and/or selecting yeast strains with improved xylose or cellobiose utilization, isoprenoid biosynthesis, and/or lactic acid production. One or more genes involved in the metabolism and synthesis of these compounds may be modified and/or introduced to yeast cells. Examples of the methods and genes include lactate dehydrogenase, PDC1 and PDC5, and those described in Ha, S.J., et al. (2011) Proc. Natl. Acad. Sci. USA 108 (2): 504-9 and Galazka, J. M., et al. (2010) Science 330 (6000): 84-6; Jakočiūnas T et al., Metab Eng. 2015 March;28:213-222; Stovicek V, et al., FEMS Yeast Res. 2017 Aug. 1; 17 (5).

### Improved Plants and Yeast Cells

[0472] The present disclosure further provides improved plants and fungi. The improved and fungi may comprise one or more genes introduced, and/or one or more genes modified by the compositions, systems, and methods herein. The improved plants and fungi may have increased food or feed production (e.g., higher protein, carbohydrate, nutrient or vitamin levels), oil and biofuel production (e.g., methanol, ethanol), tolerance to pests, herbicides, drought, low or high temperatures, excessive water, etc.

[0473] The plants or fungi may have one or more parts that are improved, e.g., leaves, stems, roots, tubers, seeds, endosperm, ovule, and pollen. The parts may be viable, nonviable, regeneratable, and/or non-regeneratable.

[0474] The improved plants and fungi may include gametes, seeds, embryos, either zygotic or somatic, progeny and/or hybrids of improved plants and fungi. The progeny may be a clone of the produced plant or fungi or may result from sexual reproduction by crossing with other individuals of the same species to introgress further desirable traits into their offspring. The cell may be in vivo or ex vivo in the cases of multicellular organisms, particularly plants.

### Further Applications of the CRISPR-Cas System in Plants

[0475] Further applications of the compositions, systems, and methods on plants and fungi include visualization of genetic element dynamics (e.g., as described in Chen B, et al., Cell. 2013 Dec. 19; 155 (7): 1479-91), targeted gene disruption positive-selection in vitro and in vivo (as described in Malina A et al., Genes Dev. 2013 Dec. 1; 27 (23): 2602-14), epigenetic modification such as using fusion of Cas and histone-modifying enzymes (e.g., as described in Rusk N, Nat Methods. 2014 January; 11 (1): 28), identifying transcription regulators (e.g., as described in Waldrip Z J, Epigenetics. 2014 September;9 (9): 1207-11), anti-virus treatment for both RNA and DNA viruses (e.g., as described in Price A A, et al., Proc Natl Acad Sci USA. 2015 May 12; 112 (19): 6164-9; Ramanan V et al., Sci Rep. 2015 Jun. 2; 5:10833), alteration of genome complexity such as chromosome numbers (e.g., as described in Karimi-Ashtiyani R et al., Proc Natl Acad Sci USA. 2015 Sep. 8; 112 (36): 11211-6; Anton T, et al., Nucleus. 2014 March-April;5 (2): 163-72), self-cleavage of the CRISPR system for controlled inactivation/activation (e.g., as described Sugano S S et al., Plant Cell Physiol. 2014 March;55 (3): 475-81), multiplexed gene editing (as described in Kabadi A M et al., Nucleic Acids Res. 2014 Oct. 29; 42 (19): e147), development of kits for multiplex genome editing (as described in Xing H L et al., BMC Plant Biol. 2014 Nov. 29; 14:327), starch production (as described in Hebelstrup K H et al., Front Plant Sci. 2015 Apr. 23; 6:247), targeting multiple genes in a family or pathway (e.g., as described in Ma X et al., Mol Plant. 2015 August;8 (8): 1274-84), regulation of non-coding genes and sequences (e.g., as described in Lowder L G, et al., Plant Physiol. 2015 October; 169 (2): 971-85), editing genes in trees (e.g., as described in Belhaj K et al., Plant Methods. 2013 Oct. 11; 9 (1): 39; Harrison M M, et al., Genes Dev. 2014 Sep. 1; 28 (17): 1859-72; Zhou X et al., New Phytol. 2015 October;208 (2): 298-301), introduction of mutations for resistance to host-specific pathogens and pests.

[0476] Additional examples of modifications of plants and fungi that may be performed using the compositions, systems, and methods include those described in International Patent Publication Nos. WO2016/099887, WO2016/025131, WO2016/073433, WO2017/066175, WO2017/100158, WO 2017/105991, WO2017/106414, WO2016/100272, WO2016/100571, WO 2016/100568, WO 2016/100562, and WO 2017/019867.

### Applications in Non-Human Animals

[0477] The compositions, systems, and methods may be used to study and modify non-human animals, e.g., introducing desirable traits and disease resilience, treating diseases, facilitating breeding, etc. In an embodiment, the compositions, systems, and methods may be used to improve breeding and introducing desired traits, e.g., increasing the frequency of trait-associated alleles, introgression of alleles from other breeds/species without linkage drag, and creation of de novo favorable alleles. Genes and other genetic elements that can be targeted may be screened and identified. Examples of application and approaches include those described in Tait-Burkard C, et al., Livestock 2.0—genome editing for fitter, healthier, and more productive farmed animals. Genome Biol. 2018 Nov. 26; 19 (1): 204; Lillico S, Agricultural applications of genome editing in farmed animals. Transgenic Res. 2019 August;28 (Suppl 2): 57-60; Houston R D, et al., Harnessing genomics to fast-track genetic improvement in aquaculture. Nat Rev Genet. 2020 Apr. 16. doi: 10.1038/s41576-020-0227-y, which are incorporated herein by reference in their entireties. Applications described in other sections such as therapeutic, diagnostic, etc. can also be used on the animals herein.

[0478] The compositions, systems, and methods may be used on animals such as fish, amphibians, reptiles, mammals, and birds. The animals may be farm and agriculture animals, or pets. Examples of farm and agriculture animals include horses, goats, sheep, swine, cattle, llamas, alpacas, and birds, e.g., chickens, turkeys, ducks, and geese. The animals may be a non-human primate, e.g., baboons, capuchin monkeys, chimpanzees, lemurs, macaques, marmosets, tamarins, spider monkeys, squirrel monkeys, and vervet monkeys. Examples of pets include dogs, cats, horses, wolves, rabbits, ferrets, gerbils, hamsters, chinchillas, fancy rats, guinea pigs, canaries, parakeets, and parrots.

[0479] In an embodiment, one or more genes may be introduced (e.g., overexpressed) in the animals to obtain or enhance one or more desired traits. Growth hormones, insulin-like growth factors (IGF-1) may be introduced to increase the growth of the animals, e.g., pigs or salmon (such as described in Pursel V G et al., J Reprod Fertil Suppl. 1990; 40:235-45; Waltz E, Nature. 2017; 548:148). Fat-1 gene (e.g., from C elegans) may be introduced for production of larger ratio of n-3 to n-6 fatty acids may be induced, e.g., in pigs (such as described in Li M, et al., Genetics. 2018; 8:1747-54). Phytase (e.g., from E coli) xylanase (e.g., from Aspergillus niger), beta-glucanase (e.g., from Bacillus lichenformis) may be introduced to reduce the environmental impact through phosphorous and nitrogen release reduction, e.g., pigs (such as described in Golovan S P, et al., Nat Biotechnol. 2001; 19:741-5; Zhang X et al., elife. 2018). shRNA decoy may be introduced to induce avian influenza resilience e.g., in chicken (such as described in Lyall et al., Science. 2011; 331:223-6). Lysozyme or lysostaphin may be introduced to induce mastitis resilience e.g., in goat and cow (such as described in Maga E A et al., Foodborne Pathog Dis. 2006; 3:384-92; Wall R J, et al., Nat Biotechnol. 2005; 23:445-51). Histone deacetylase such as HDAC6 may be introduced to induce PRRSV resilience, e.g., in pig (such as described in Lu T., et al., PLOS One. 2017; 12: e0169317). CD163 may be modified (e.g., inactivated or removed) to introduce PRRSV resilience in pigs (such as described in Prather R S et al . . . , Sci Rep. 2017 Oct. 17; 7 (1): 13371). Similar approaches may be used to inhibit or remove viruses and bacteria (e.g., Swine Influenza Virus (SIV) strains which include influenza C and the subtypes of influenza A known as HIN1, H1N2, H2N1, H3N1, H3N2, and H2N3, as well as pneumonia, meningitis, and oedema) that may be transmitted from animals to humans.

[0480] In an embodiment, one or more genes may be modified or edited for disease resistance and production traits. Myostatin (e.g., GDF8) may be modified to increase muscle growth, e.g., in cow, sheep, goat, catfish, and pig (such as described in Crispo M et al., PLOS One. 2015; 10: e0136690; Wang X, et al., Anim Genet. 2018; 49:43-51; Khalil K, et al., Sci Rep. 2017; 7:7301; Kang J-D, et al., RSC Adv. 2017; 7:12541-9). Pc POLLED may be modified to induce horlessness, e.g., in cow (such as described in Carlson D F et al., Nat Biotechnol. 2016; 34:479-81). KISSIR may be modified to induce boretaint (hormone release during sexual maturity leading to undesired meat taste), e.g., in pigs. Dead end protein (dnd) may be modified to induce sterility, e.g., in salmon (such as described in Wargelius A, et al., Sci Rep. 2016; 6:21284). Nano2 and DDX may be modified to induce sterility (e.g., in surrogate hosts), e.g., in pigs and chicken (such as described Park K-E, et al., Sci Rep. 2017; 7:40176; Taylor L et al., Development. 2017; 144:928-34). CD163 may be modified to induce PRRSV resistance, e.g., in pigs (such as described in Whitworth K M, et al., Nat Biotechnol. 2015; 34:20-2). RELA may be modified to induce ASFV resilience, e.g., in pigs (such as described in Lillico S G, et al., Sci Rep. 2016; 6:21645). CD18 may be modified to induce Mannheimia (Pasteurella) haemolytica resilience, e.g., in cows (such as described in Shanthalingam S, et al., roc Natl Acad Sci USA. 2016; 113:13186-90). NRAMPI may be modified to induce tuberculosis resilience, e.g., in cows (such as described in Gao Y et al., Genome Biol. 2017; 18:13). Endogenous retrovirus genes may be modified or removed for xenotransplantation such as described in Yang L, et al. Science. 2015; 350:1101-4; Niu D et al., Science. 2017; 357:1303-7). Negative regulators of muscle mass (e.g., Myostatin) may be modified (e.g., inactivated) to increase muscle mass, e.g., in dogs (as described in Zou Q et al., J Mol Cell Biol. 2015 December;7 (6): 580-3).

[0481] Animals such as pigs with severe combined immunodeficiency (SCID) may generated (e.g., by modifying RAG2) to provide useful models for regenerative medicine, xenotransplantation (discussed also elsewhere herein), and tumor development. Examples of methods and approaches include those described Lee K, et al., Proc Natl Acad Sci USA. 2014 May 20; 111 (20): 7260-5; and Schomberg et al. FASEB Journal, April 2016; 30 (1): Suppl 571.1.

[0482] SNPs in the animals may be modified. Examples of methods and approaches include those described Tan W. et al., Proc Natl Acad Sci USA. 2013 Oct. 8; 110 (41): 16526-31; Mali P, et al., Science. 2013 Feb. 15; 339 (6121): 823-6.

[0483] Stem cells (e.g., induced pluripotent stem cells) may be modified and differentiated into desired progeny cells, e.g., as described in Heo Y T et al., Stem Cells Dev. 2015 Feb. 1; 24 (3): 393-402.

[0484] Profile analysis (such as Igenity) may be performed on animals to screen and identify genetic variations related to economic traits. The genetic variations may be modified to introduce or improve the traits, such as carcass composition, carcass quality, maternal and reproductive traits, and average daily gain.

### Pharmaceutical Formulations

[0485] Also described herein are pharmaceutical formulations that can contain an amount, effective amount, and/or least effective amount, and/or therapeutically effective amount of one or more compounds, molecules, compositions, vectors, vector systems, cells, or a combination thereof (which are also referred to as the primary active agent or ingredient elsewhere herein) described in greater detail elsewhere herein and a pharmaceutically acceptable carrier or excipient. As used herein, “pharmaceutical formulation” refers to the combination of an active agent, compound, or ingredient with a pharmaceutically acceptable carrier or excipient, making the composition suitable for diagnostic, therapeutic, or preventive use in vitro, in vivo, or ex vivo. As used herein, “pharmaceutically acceptable carrier or excipient” refers to a carrier or excipient that is useful in preparing a pharmaceutical formulation that is generally safe, non-toxic, and is neither biologically or otherwise undesirable, and includes a carrier or excipient that is acceptable for veterinary use as well as human pharmaceutical use. A “pharmaceutically acceptable carrier or excipient” as used in the specification and claims includes both one and more than one such carrier or excipient. When present, the compound can optionally be present in the pharmaceutical formulation as a pharmaceutically acceptable salt. In an embodiment, the pharmaceutical formulation can include, such as an active ingredient, a CRISPR-Cas system or component thereof or composition thereof described in greater detail elsewhere herein. In an embodiment, the pharmaceutical formulation can include, such as an active ingredient, a polynucleotide comprising one or more nucleic acid sequences encoding a CRISPR-Cas system or component thereof, or a vector comprising one or more of said polynucleotides, described in greater detail elsewhere herein. In an embodiment, the pharmaceutical formulation can include, such as an active ingredient, a delivery particle comprising one or more components, systems, compositions, polynucleotides, or vectors described in greater detail elsewhere herein. In an embodiment, the pharmaceutical formulation can include, such as an active ingredient one or more modified cells, such as one or more modified cells described in greater detail elsewhere herein.

[0486] In an embodiment, the active ingredient is present as a pharmaceutically acceptable salt of the active ingredient. As used herein, “pharmaceutically acceptable salt” refers to any acid or base addition salt whose counter-ions are non-toxic to the subject to which they are administered in pharmaceutical doses of the salts. Suitable salts include, hydrobromide, iodide, nitrate, bisulfate, phosphate, isonicotinate, lactate, salicylate, acid citrate, tartrate, oleate, tannate, pantothenate, bitartrate, ascorbate, succinate, maleate, gentisinate, fumarate, gluconate, glucaronate, saccharate, formate, benzoate, glutamate, methanesulfonate, ethanesulfonate, benzenesulfonate, p-toluenesulfonate, camphorsulfonate, napthalenesulfonate, propionate, malonate, mandelate, malate, phthalate, and pamoate.

[0487] The pharmaceutical formulations described herein can be administered to a subject in need thereof via any suitable method or route to a subject in need thereof. Suitable administration routes can include, but are not limited to auricular (otic), buccal, conjunctival, cutaneous, dental, electro-osmosis, endocervical, endosinusial, endotracheal, enteral, epidural, extra-amniotic, extracorporeal, hemodialysis, infiltration, interstitial, intra-abdominal, intra-amniotic, intra-arterial, intra-articular, intrabiliary, intrabronchial, intrabursal, intracardiac, intracartilaginous, intracaudal, intracavernous, intracavitary, intracerebral, intracisternal, intracorneal, intracoronal (dental), intracoronary, intracorporus cavernosum, intradermal, intradiscal, intraductal, intraduodenal, intradural, intraepidermal, intraesophageal, intragastric, intragingival, intraileal, intralesional, intraluminal, intralymphatic, intramedullary, intrameningeal, intramuscular, intraocular, intraovarian, intrapericardial, intraperitoneal, intrapleural, intraprostatic, intrapulmonary, intrasinal, intraspinal, intrasynovial, intratendinous, intratesticular, intrathecal, intrathoracic, intratubular, intratumor, intratympanic, intrauterine, intravascular, intravenous, intravenous bolus, intravenous drip, intraventricular, intravesical, intravitreal, iontophoresis, irrigation, laryngeal, nasal, nasogastric, occlusive dressing technique, ophthalmic, oral, oropharyngeal, other, parenteral, percutaneous, periarticular, peridural, perineural, periodontal, rectal, respiratory (inhalation), retrobulbar, soft tissue, subarachnoid, subconjunctival, subcutaneous, sublingual, submucosal, topical, transdermal, transmucosal, transplacental, transtracheal, transtympanic, ureteral, urethral, and/or vaginal administration, and/or any combination of the above administration routes, which typically depends on the disease to be treated and/or the active ingredient(s).

[0488] Where appropriate, compounds, molecules, compositions, vectors, vector systems, cells, or a combination thereof described in greater detail elsewhere herein can be provided to a subject in need thereof as an ingredient, such as an active ingredient or agent, in a pharmaceutical formulation. As such, also described are pharmaceutical formulations containing one or more of the compounds and salts thereof, or pharmaceutically acceptable salts thereof described herein. Suitable salts include, hydrobromide, iodide, nitrate, bisulfate, phosphate, isonicotinate, lactate, salicylate, acid citrate, tartrate, oleate, tannate, pantothenate, bitartrate, ascorbate, succinate, maleate, gentisinate, fumarate, gluconate, glucaronate, saccharate, formate, benzoate, glutamate, methanesulfonate, ethanesulfonate, benzenesulfonate, p-toluenesulfonate, camphorsulfonate, napthalenesulfonate, propionate, malonate, mandelate, malate, phthalate, and pamoate.

[0489] In an embodiment, the subject in need thereof has or is suspected of having a hematopoietic disease, a neurobiological disease or disorder, a psychiatric disease or disorder, a cancer, an autoimmune disease or disorder, a thrombosis disease, a heart disease, a kidney disease, a lung disease, or a blood vessel disease, or a combination thereof. As used herein, “agent” refers to any substance, compound, molecule, and the like, which can be biologically active or otherwise can induce a biological and/or physiological effect on a subject to which it is administered to. As used herein, “active agent” or “active ingredient” refers to a substance, compound, or molecule, which is biologically active or otherwise, induces a biological or physiological effect on a subject to which it is administered to. In other words, “active agent” or “active ingredient” refers to a component or components of a composition to which the whole or part of the effect of the composition is attributed. An agent can be a primary active agent, or in other words, the component(s) of a composition to which the whole or part of the effect of the composition is attributed. An agent can be a secondary agent, or in other words, the component(s) of a composition to which an additional part and/or other effect of the composition is attributed.

### Pharmaceutically Acceptable Carriers and Secondary Ingredients and Agents

[0490] The pharmaceutical formulation can include a pharmaceutically acceptable carrier. Suitable pharmaceutically acceptable carriers include, but are not limited to water, salt solutions, alcohols, gum arabic, vegetable oils, benzyl alcohols, polyethylene glycols, gelatin, carbohydrates such as lactose, amylose or starch, magnesium stearate, talc, silicic acid, viscous paraffin, perfume oil, fatty acid esters, hydroxy methylcellulose, and polyvinyl pyrrolidone, which do not deleteriously react with the active composition.

[0491] The pharmaceutical formulations can be sterilized, and if desired, mixed with agents, such as lubricants, preservatives, stabilizers, wetting agents, emulsifiers, salts for influencing osmotic pressure, buffers, coloring, flavoring and/or aromatic substances, and the like which do not deleteriously react with the active compound.

[0492] In an embodiment, the pharmaceutical formulation can also include an effective amount of secondary active agents, including but not limited to, biologic agents or molecules including, but not limited to, e.g., polynucleotides, amino acids, peptides, polypeptides, antibodies, aptamers, ribozymes, hormones, immunomodulators, antipyretics, anxiolytics, antipsychotics, analgesics, antispasmodics, anti-inflammatories, anti-histamines, anti-infectives, chemotherapeutics, and combinations thereof.

### Effective Amounts

[0493] In an embodiment, the amount of the primary active agent and/or optional secondary agent can be an effective amount, least effective amount, and/or therapeutically effective amount. As used herein, “effective amount”, “effective concentration”, and/or the like refers to the amount, concentration, etc. of the primary and/or optional secondary agent included in the pharmaceutical formulation that achieve one or more therapeutic effects or desired effect. As used herein, “least effective”, “least effective concentration”, and/or the like amount refers to the lowest amount, concentration, etc. of the primary and/or optional secondary agent that achieves the one or more therapeutic or other desired effects. As used herein, “therapeutically effective amount”, “therapeutically effective concentration” and/or the like refers to the amount, concentration, etc. of the primary and/or optional secondary agent included in the pharmaceutical formulation that achieves one or more therapeutic effects.

[0494] The effective amount, least effective amount, and/or therapeutically effective amount of the primary and optional secondary active agent described elsewhere herein contained in the pharmaceutical formulation can be any non-zero amount ranging from about 0 to 10, 20, 30, 40, 50, 60, 70, 80, 90, 100, 110, 120, 130, 140, 150, 160, 170, 180, 190, 200, 210, 220, 230, 240, 250, 260, 270, 280, 290, 300, 310, 320, 330, 340, 350, 360, 370, 380, 390, 400, 410, 420, 430, 440, 450, 460, 470, 480, 490, 500, 510, 520, 530, 540, 550, 560, 570, 580, 590, 600, 610, 620, 630, 640, 650, 660, 670, 680, 690, 700, 710, 720, 730, 740, 750, 760, 770, 780, 790, 800, 810, 820, 830, 840, 850, 860, 870, 880, 890, 900, 910, 920, 930, 940, 950, 960, 970, 980, 990, 1000 pg, ng, μg, mg, or g or be any numerical value or subrange within any of these ranges.

[0495] In an embodiment, the effective amount, least effective amount, and/or therapeutically effective amount can be an effective concentration, least effective concentration, and/or therapeutically effective concentration, which can each be any non-zero amount ranging from about 0 to 10, 20, 30, 40, 50, 60, 70, 80, 90, 100, 110, 120, 130, 140, 150, 160, 170, 180, 190, 200, 210, 220, 230, 240, 250, 260, 270, 280, 290, 300, 310, 320, 330, 340, 350, 360, 370, 380, 390, 400, 410, 420, 430, 440, 450, 460, 470, 480, 490, 500, 510, 520, 530, 540, 550, 560, 570, 580, 590, 600, 610, 620, 630, 640, 650, 660, 670, 680, 690, 700, 710, 720, 730, 740, 750, 760, 770, 780, 790, 800, 810, 820, 830, 840, 850, 860, 870, 880, 890, 900, 910, 920, 930, 940, 950, 960, 970, 980, 990, 1000 pM, nM, μM, mM, or M or be any numerical value or subrange within any of these ranges.

[0496] In other embodiments, the effective amount, least effective amount, and/or therapeutically effective amount of the primary and optional secondary active agent be any non-zero amount ranging from about 0 to 10, 20, 30, 40, 50, 60, 70, 80, 90, 100, 110, 120, 130, 140, 150, 160, 170, 180, 190, 200, 210, 220, 230, 240, 250, 260, 270, 280, 290, 300, 310, 320, 330, 340, 350, 360, 370, 380, 390, 400, 410, 420, 430, 440, 450, 460, 470, 480, 490, 500, 510, 520, 530, 540, 550, 560, 570, 580, 590, 600, 610, 620, 630, 640, 650, 660, 670, 680, 690, 700, 710, 720, 730, 740, 750, 760, 770, 780, 790, 800, 810, 820, 830, 840, 850, 860, 870, 880, 890, 900, 910, 920, 930, 940, 950, 960, 970, 980, 990, 1000 IU or be any numerical value or subrange within any of these ranges.

[0497] In an embodiment, the primary and/or the optional secondary active agent present in the pharmaceutical formulation can be any non-zero amount ranging from about 0 to 0.001, 0.002, 0.003, 0.004, 0.005, 0.006, 0.007, 0.008, 0.009, 0.01, 0.02, 0.03, 0.04, 0.05, 0.06, 0.07, 0.08, 0.09, 0.1, 0.11, 0.12, 0.13, 0.14, 0.15, 0.16, 0.17, 0.18, 0.19, 0.2, 0.21, 0.22, 0.23, 0.24, 0.25, 0.26, 0.27, 0.28, 0.29, 0.3, 0.31, 0.32, 0.33, 0.34, 0.35, 0.36, 0.37, 0.38, 0.39, 0.4, 0.41, 0.42, 0.43, 0.44, 0.45, 0.46, 0.47, 0.48, 0.49, 0.5, 0.51, 0.52, 0.53, 0.54, 0.55, 0.56, 0.57, 0.58, 0.59, 0.6, 0.61, 0.62, 0.63, 0.64, 0.65, 0.66, 0.67, 0.68, 0.69, 0.7, 0.71, 0.72, 0.73, 0.74, 0.75, 0.76, 0.77, 0.78, 0.79, 0.8, 0.81, 0.82, 0.83, 0.84, 0.85, 0.86, 0.87, 0.88, 0.89, 0.9, 0.91, 0.92, 0.93, 0.94, 0.95, 0.96, 0.97, 0.98, 0.9, to 1, 2, 3, 4, 5, 6, 7, 8, 9, 10, 11, 12, 13, 14, 15, 16, 17, 18, 19, 20, 21, 22, 23, 24, 25, 26, 27, 28, 29, 30, 31, 32, 33, 34, 35, 36, 37, 38, 39, 40, 41, 42, 43, 44, 45, 46, 47, 48, 49, 50, 51, 52, 53, 54, 55, 56, 57, 58, 59, 60, 61, 62, 63, 64, 65, 66, 67, 68, 69, 70, 71, 72, 73, 74, 75, 76, 77, 78, 79, 80, 81, 82, 83, 84, 85, 86, 87, 88, 89, 90, 91, 92, 93, 94, 95, 96, 97, 98, 99, 99.1, 99.2, 99.3, 99.4, 99.5, 99.6, 99.7, 99.8, 99.9% w/w, v/v, or w/v of the pharmaceutical formulation or be any numerical value or subrange within any of these ranges.

[0498] In an embodiment where a cell or cell population is present in the pharmaceutical formulation (e.g., as a primary and/or or secondary active agent), the effective amount of cells can be any amount ranging from about 1 or 2 cells to 1x101 cells/mL, 1x1020 cells/mL or more, such as about 1x101 cells/mL, 1x102 cells/mL, 1x103 cells/mL, 1x104 cells/mL, 1x10⁵ cells/mL, 1x106 cells/mL, 1x107 cells/mL, 1x108 cells/mL, 1x109 cells/mL, 1x1010 cells/mL, 1x1011 cells/mL, 1x1012 cells/mL, 1x1013 cells/mL, 1x1014 cells/mL, 1x1015 cells/mL, 1x1016 cells/mL, 1x1017 cells/mL, 1x1018 cells/mL, 1x1019 cells/mL, to/or about 1x1020/cells/mL or any numerical value or subrange within any of these ranges.

[0499] In an embodiment, the amount or effective amount, particularly where an infective particle is being delivered (e.g., a virus particle having the primary or secondary agent as a cargo), the effective amount of virus particles can be expressed as a titer (plaque forming units per unit of volume) or as a MOI (multiplicity of infection). In an embodiment, the effective amount can be about 1X101 particles per pL, nL, μL, mL, or L to 1X1020/particles per pL, nL, μL, mL, or L or more, such as about 1×101, 1x102, 1x103, 1x104, 1x105, 1x106, 1x107, 1x108, 1x109, 1x1010, 1x1011, 1x1012, 1x1013, 1x1014, 1x1015, 1x1016, 1x1017, 1x1018, 1x1019, to/or about 1×1020 particles per pL, nL, μL, mL, or L. In an embodiment, the effective titer can be about 1X101 transforming units per pL, nL, μL, mL, or L to 1X1020/transforming units per pL, nL, uL, mL, or L or more, such as about 1×101, 1x102, 1x103, 1x104, 1x105, 1x106, 1x107, 1x108, 1x109, 1x1010, 1x1011, 1x1012, 1x013, 1x1014, 1x1015, 1x1016, 1x1017, 1x1018, 1x1019, to/or about 1x1020 transforming units per pL, nL, uL, mL, or L or any numerical value or subrange within these ranges. In an embodiment, the MOI of the pharmaceutical formulation can range from about 0.1 to 10 or more, such as 0.1, 0.2, 0.3, 0.4, 0.5, 0.6, 0.7, 0.8, 0.9, 1, 1.1, 1.2, 1.3, 1.4, 1.5, 1.6, 1.7, 1.8, 1.9, 2, 2.1, 2.2, 2.3, 2.4, 2.5, 2.6, 2.7, 2.8, 2.9, 3, 3.1, 3.2, 3.3, 3.4, 3.5, 3.6, 3.7, 3.8, 3.9, 4, 4.1, 4.2, 4.3, 4.4, 4.5, 4.6, 4.7, 4.8, 4.9, 5, 5.1, 5.2, 5.3, 5.4, 5.5, 5.6, 5.7, 5.8, 5.9, 6, 6.1, 6.2, 6.3, 6.4, 6.5, 6.6, 6.7, 6.8, 6.9, 7, 7.1, 7.2, 7.3, 7.4, 7.5, 7.6, 7.7, 7.8, 7.9, 8, 8.1, 8.2, 8.3, 8.4, 8.5, 8.6, 8.7, 8.8, 8.9, 9, 9.1, 9.2, 9.3, 9.4, 9.5, 9.6, 9.7, 9.8, 9.9, 10 or more or any numerical value or subrange within these ranges.

[0500] In an embodiment, the amount or effective amount of the one or more of the active agent(s) described herein contained in the pharmaceutical formulation can range from about 1 μg/kg to about 10 mg/kg based upon the bodyweight of the subject in need thereof or average bodyweight of the specific patient population to which the pharmaceutical formulation can be administered.

[0501] In embodiments where there is a secondary agent contained in the pharmaceutical formulation, the effective amount of the secondary active agent will vary depending on the secondary agent, the primary agent, the administration route, subject age, disease, stage of disease, among other things, which will be one of ordinary skill in the art.

[0502] When optionally present in the pharmaceutical formulation, the secondary active agent can be included in the pharmaceutical formulation or can exist as a stand-alone compound or pharmaceutical formulation that can be administered contemporaneously or sequentially with the compound, derivative thereof, or pharmaceutical formulation thereof.

[0503] In an embodiment, the effective amount of the secondary active agent, when optionally present, is any non-zero amount ranging from about 0 to 1, 2, 3, 4, 5, 6, 7, 8, 9, 10, 11, 12, 13, 14, 15, 16, 17, 18, 19, 20, 21, 22, 23, 24, 25, 26, 27, 28, 29, 30, 31, 32, 33, 34, 35, 36, 37, 38, 39, 40, 41, 42, 43, 44, 45, 46, 47, 48, 49, 50, 51, 52, 53, 54, 55, 56, 57, 58, 59, 60, 61, 62, 63, 64, 65, 66, 67, 68, 69, 70, 71, 72, 73, 74, 75, 76, 77, 78, 79, 80, 81, 82, 83, 84, 85, 86, 87, 88, 89, 90, 91, 92, 93, 94, 95, 96, 97, 98, 99, 99.1, 99.2, 99.3, 99.4, 99.5, 99.6, 99.7, 99.8, 99.9% w/w, v/v, or w/v of the total active agents present in the pharmaceutical formulation or any numerical value or subrange within these ranges. In additional embodiments, the effective amount of the secondary active agent is any non-zero amount ranging from about 0 to 1, 2, 3, 4, 5, 6, 7, 8, 9, 10, 11, 12, 13, 14, 15, 16, 17, 18, 19, 20, 21, 22, 23, 24, 25, 26, 27, 28, 29, 30, 31, 32, 33, 34, 35, 36, 37, 38, 39, 40, 41, 42, 43, 44, 45, 46, 47, 48, 49, 50, 51, 52, 53, 54, 55, 56, 57, 58, 59, 60, 61, 62, 63, 64, 65, 66, 67, 68, 69, 70, 71, 72, 73, 74, 75, 76, 77, 78, 79, 80, 81, 82, 83, 84, 85, 86, 87, 88, 89, 90, 91, 92, 93, 94, 95, 96, 97, 98, 99, 99.1, 99.2, 99.3, 99.4, 99.5, 99.6, 99.7, 99.8, 99.9% w/w, v/v, or w/v of the total pharmaceutical formulation or any numerical value or subrange within these ranges.

### Dosage Forms

[0504] In an embodiment, the pharmaceutical formulations described herein can be provided in a dosage form. The dosage form can be administered to a subject in need thereof. The dosage form can be effective generate specific concentration, such as an effective concentration, at a given site in the subject in need thereof. As used herein, “dose,” “unit dose,” or “dosage” can refer to physically discrete units suitable for use in a subject, each unit containing a predetermined quantity of the primary active agent, and optionally present secondary active ingredient, and/or a pharmaceutical formulation thereof calculated to produce the desired response or responses in association with its administration. In an embodiment, the given site is proximal to the administration site. In an embodiment, the given site is distal to the administration site. In some cases, the dosage form contains a greater amount of one or more of the active ingredients present in the pharmaceutical formulation than the final intended amount needed to reach a specific region or location within the subject to account for loss of the active components such as via first and second pass metabolism.

[0505] The dosage forms can be adapted for administration by any appropriate route. Appropriate routes include, but are not limited to, oral (including buccal or sublingual), rectal, intraocular, inhaled, intranasal, topical (including buccal, sublingual, or transdermal), vaginal, parenteral, subcutaneous, intramuscular, intravenous, internasal, and intradermal. Other appropriate routes are described elsewhere herein. Such formulations can be prepared by any method known in the art.

[0506] Dosage forms adapted for oral administration can discrete dosage units such as capsules, pellets or tablets, powders or granules, solutions, or suspensions in aqueous or non-aqueous liquids; edible foams or whips, or in oil-in-water liquid emulsions or water-in-oil liquid emulsions. In an embodiment, the pharmaceutical formulations adapted for oral administration also include one or more agents which flavor, preserve, color, or help disperse the pharmaceutical formulation. Dosage forms prepared for oral administration can also be in the form of a liquid solution that can be delivered as a foam, spray, or liquid solution. The oral dosage form can be administered to a subject in need thereof. Where appropriate, the dosage forms described herein can be microencapsulated.

[0507] The dosage form can also be prepared to prolong or sustain the release of any ingredient. In an embodiment, compounds, molecules, compositions, vectors, vector systems, cells, or a combination thereof described herein can be the ingredient whose release is delayed. In an embodiment the primary active agent is the ingredient whose release is delayed. In an embodiment, an optional secondary agent can be the ingredient whose release is delayed. Suitable methods for delaying the release of an ingredient include, but are not limited to, coating or embedding the ingredients in material in polymers, wax, gels, and the like. Delayed release dosage formulations can be prepared as described in standard references such as “Pharmaceutical dosage form tablets,” eds. Liberman et. al. (New York, Marcel Dekker, Inc., 1989), “Remington—The science and practice of pharmacy”, 20^{th} ed., Lippincott Williams & Wilkins, Baltimore, MD, 2000, and “Pharmaceutical dosage forms and drug delivery systems”, 6^{th} Edition, Ansel et al., (Media, PA: Williams and Wilkins, 1995). These references provide information on excipients, materials, equipment, and processes for preparing tablets and capsules and delayed release dosage forms of tablets and pellets, capsules, and granules. The delayed release can be anywhere from about an hour to about 3 months or more.

[0508] Examples of suitable coating materials include, but are not limited to, cellulose polymers such as cellulose acetate phthalate, hydroxypropyl cellulose, hydroxypropyl methylcellulose, hydroxypropyl methylcellulose phthalate, and hydroxypropyl methylcellulose acetate succinate; polyvinyl acetate phthalate, acrylic acid polymers and copolymers, and methacrylic resins that are commercially available under the trade name EUDRAGIT® (Roth Pharma, Westerstadt, Germany), zein, shellac, and polysaccharides.

[0509] Coatings may be formed with a different ratio of water-soluble polymer, water insoluble polymers, and/or pH dependent polymers, with or without water insoluble/water soluble non-polymeric excipient, to produce the desired release profile. The coating is either performed on the dosage form (matrix or simple) which includes, but is not limited to, tablets (compressed with or without coated beads), capsules (with or without coated beads), beads, particle compositions, “ingredient as is” formulated as, but not limited to, suspension form or as a sprinkle dosage form.

[0510] Where appropriate, the dosage forms described herein can be a liposome. In these embodiments, primary active ingredient(s), and/or optional secondary active ingredient(s), and/or pharmaceutically acceptable salt thereof where appropriate are incorporated into a liposome. In embodiments where the dosage form is a liposome, the pharmaceutical formulation is thus a liposomal formulation. The liposomal formulation can be administered to a subject in need thereof.

[0511] Dosage forms adapted for topical administration can be formulated as ointments, creams, suspensions, lotions, powders, solutions, pastes, gels, sprays, aerosols, or oils. In an embodiment for treatments of the eye or other external tissues, for example the mouth or the skin, the pharmaceutical formulations are applied as a topical ointment or cream. When formulated in an ointment, a primary active ingredient, optional secondary active ingredient, and/or pharmaceutically acceptable salt thereof where appropriate can be formulated with a paraffinic or water-miscible ointment base. In other embodiments, the primary and/or secondary active ingredient can be formulated in a cream with an oil-in-water cream base or a water-in-oil base. Dosage forms adapted for topical administration in the mouth include lozenges, pastilles, and mouth washes.

[0512] Dosage forms adapted for nasal or inhalation administration include aerosols, solutions, suspension drops, gels, or dry powders. In an embodiment, a primary active ingredient, optional secondary active ingredient, and/or pharmaceutically acceptable salt thereof where appropriate can be in a dosage form adapted for inhalation is in a particle-size-reduced form that is obtained or obtainable by micronization. In an embodiment, the particle size of the size reduced (e.g., micronized) compound or salt or solvate thereof, is defined by a D50 value of about 0.5 to about 10 microns as measured by an appropriate method known in the art. Dosage forms adapted for administration by inhalation also include particle dusts or mists. Suitable dosage forms wherein the carrier or excipient is a liquid for administration as a nasal spray or drops include aqueous or oil solutions/suspensions of an active (primary and/or secondary) ingredient, which may be generated by various types of metered dose pressurized aerosols, nebulizers, or insufflators. The nasal/inhalation formulations can be administered to a subject in need thereof.

[0513] In an embodiment, the dosage forms are aerosol formulations suitable for administration by inhalation. In some of these embodiments, the aerosol formulation contains a solution or fine suspension of a primary active ingredient, secondary active ingredient, and/or pharmaceutically acceptable salt thereof where appropriate and a pharmaceutically acceptable aqueous or non-aqueous solvent. Aerosol formulations can be presented in single or multi-dose quantities in sterile form in a sealed container. For some of these embodiments, the sealed container is a single dose or multi-dose nasal or an aerosol dispenser fitted with a metering valve (e.g., metered dose inhaler), which is intended for disposal once the contents of the container have been exhausted.

[0514] Where the aerosol dosage form is contained in an aerosol dispenser, the dispenser contains a suitable propellant under pressure, such as compressed air, carbon dioxide, or an organic propellant, including but not limited to a hydrofluorocarbon. The aerosol formulation dosage forms in other embodiments are contained in a pump-atomizer. The pressurized aerosol formulation can also contain a solution or a suspension of a primary active ingredient, optional secondary active ingredient, and/or pharmaceutically acceptable salt thereof. In further embodiments, the aerosol formulation also contains co-solvents and/or modifiers incorporated to improve, for example, the stability and/or taste and/or fine particle mass characteristics (amount and/or profile) of the formulation. Administration of the aerosol formulation can be once daily or several times daily, for example 2, 3, 4, or 8 times daily, in which 1, 2, 3 or more doses are delivered each time. The aerosol formulations can be administered to a subject in need thereof.

[0515] For some dosage forms suitable and/or adapted for inhaled administration, the pharmaceutical formulation is a dry powder inhalable-formulation. In addition to a primary active agent, optional secondary active ingredient, and/or pharmaceutically acceptable salt thereof where appropriate, such a dosage form can contain a powder base such as lactose, glucose, trehalose, mannitol, and/or starch. In some of these embodiments, a primary active agent, secondary active ingredient, and/or pharmaceutically acceptable salt thereof where appropriate is in a particle-size reduced form. In further embodiments, a performance modifier, such as L-leucine or another amino acid, cellobiose octaacetate, and/or metals salts of stearic acid, such as magnesium or calcium stearate. In an embodiment, the aerosol formulations are arranged so that each metered dose of aerosol contains a predetermined amount of an active ingredient, such as the one or more of the compositions, compounds, vector(s), molecules, cells, and combinations thereof described herein.

[0516] Dosage forms adapted for vaginal administration can be presented as pessaries, tampons, creams, gels, pastes, foams, or spray formulations. Dosage forms adapted for rectal administration include suppositories or enemas. The vaginal formulations can be administered to a subject in need thereof.

[0517] Dosage forms adapted for parenteral administration and/or adapted for injection can include aqueous and/or non-aqueous sterile injection solutions, which can contain antioxidants, buffers, bacteriostats, solutes that render the composition isotonic with the blood of the subject, and aqueous and non-aqueous sterile suspensions, which can include suspending agents and thickening agents. The dosage forms adapted for parenteral administration can be presented in a single-unit dose or multi-unit dose containers, including but not limited to sealed ampoules or vials. The doses can be lyophilized and re-suspended in a sterile carrier to reconstitute the dose prior to administration. Extemporaneous injection solutions and suspensions can be prepared In an embodiment, from sterile powders, granules, and tablets. The parenteral formulations can be administered to a subject in need thereof.

[0518] For certain example embodiments, the dosage form contains a predetermined amount of a primary active agent, secondary active ingredient, and/or pharmaceutically acceptable salt thereof where appropriate per unit dose. In an embodiment, the predetermined amount of primary active agent, secondary active ingredient, and/or pharmaceutically acceptable salt thereof where appropriate can be an effective amount, a least effect amount, and/or a therapeutically effective amount. In other embodiments, the predetermined amount of a primary active agent, secondary active agent, and/or pharmaceutically acceptable salt thereof where appropriate, can be an appropriate fraction of the effective amount of the active ingredient.

### Co-Therapies and Combination Therapies

[0519] In an embodiment, the pharmaceutical formulation(s) described herein are part of a combination treatment or combination therapy. The combination treatment can include the pharmaceutical formulation described herein and an additional treatment modality. The additional treatment modality can be a chemotherapeutic, a biological therapeutic, surgery, radiation, diet modulation, environmental modulation, a physical activity modulation, and combinations thereof.

[0520] In an embodiment, the co-therapy or combination therapy can additionally include but not limited to, polynucleotides, amino acids, peptides, polypeptides, antibodies, aptamers, ribozymes, hormones, immunomodulators, antipyretics, anxiolytics, antipsychotics, analgesics, antispasmodics, anti-inflammatories, anti-histamines, anti-infectives, chemotherapeutics, and combinations thereof.

### Administration of the Pharmaceutical Formulations

[0521] The pharmaceutical formulations or dosage forms thereof described herein can be administered one or more times hourly, daily, monthly, or yearly (e.g., 1, 2, 3, 4, 5, 6, 7, 8, 9, 10, 11, 12, 13, 14, 15, 16, 17, 18, 19, 20, or more times hourly, daily, monthly, or yearly). In an embodiment, the pharmaceutical formulations or dosage forms thereof described herein can be administered continuously over a period of time ranging from minutes to hours to days. Devices and dosages forms are known in the art and described herein that are effective to provide continuous administration of the pharmaceutical formulations described herein. In an embodiment, the first one or a few initial amount(s) administered can be a higher dose than subsequent doses. This is typically referred to in the art as a loading dose or doses and a maintenance dose, respectively. In an embodiment, the pharmaceutical formulations can be administered such that the doses over time are tapered (increased or decreased) overtime so as to wean a subject gradually off of a pharmaceutical formulation or gradually introduce a subject to the pharmaceutical formulation.

[0522] As previously discussed, the pharmaceutical formulation can contain a predetermined amount of a primary active agent, secondary active agent, and/or pharmaceutically acceptable salt thereof where appropriate. In some of these embodiments, the predetermined amount can be an appropriate fraction of the effective amount of the active ingredient. Such unit doses may therefore be administered once or more than once a day, month, or year (e.g., 1, 2, 3, 4, 5, 6, or more times per day, month, or year). Such pharmaceutical formulations may be prepared by any of the methods well known in the art.

[0523] Where co-therapies or multiple pharmaceutical formulations are to be delivered to a subject, the different therapies or formulations can be administered sequentially or simultaneously. Sequential administration is administration where an appreciable amount of time occurs between administrations, such as more than about 15, 20, 30, 45, 60 minutes or more. The time between administrations in sequential administration can be on the order of hours, days, months, or even years, depending on the active agent present in each administration. Simultaneous administration refers to administration of two or more formulations at the same time or substantially at the same time (e.g., within seconds or just a few minutes apart), where the intent is that the formulations be administered together at the same time.

### Methods of Modifying a Target Polynucleotide and Therapeutic Uses Thereof

[0524] In an embodiment, the present disclosure provides a method of modifying a target polynucleotide. In an embodiment, a target polynucleotide can comprise any target nucleic acid sequence disclosed herein, e.g., a target nucleic sequence corresponding to a CRISPR-Cas guide molecule and susceptible to nuclease activity of a multimeric CRISPR-Cas complex. In an embodiment, the method comprises modifying a target polynucleotide in a cell, tissue, or organism. In an embodiment, the method of modifying the target polynucleotide is in vivo, ex vivo, or in vitro. In an embodiment, the cell or tissue is a host cell or tissue isolated from a subject.

[0525] In an embodiment, the method of modifying the target polynucleotide comprises contacting a sample comprising a target polynucleotide with one or more components of a CRISPR-Cas system (e.g., the CRISPR-Cas polypeptides and guide molecules), one or more or composition thereof (e.g., the multimeric CRISPR-Cas complex), one or more polynucleotides, vectors, delivery particles, engineered cells, or pharmaceutical compositions disclosed herein, or any combination thereof.

### Therapeutic Methods of Use

[0526] In an embodiment, contacting results in modification of a gene product or modification of the amount or expression of a gene product. In an embodiment, the target polynucleotide is a disease-or disorder-associated target polynucleotide.

[0527] Also provided herein are methods of diagnosing, prognosing, treating, and/or preventing a disease, state, or condition in or of a subject. Generally, the methods of diagnosing, prognosing, treating, and/or preventing a disease, state, or condition in or of a subject can include modifying a target polynucleotide in a subject or cell thereof using a composition, system, or component thereof described herein and/or include detecting a diseased or healthy polynucleotide in a subject or cell thereof using a composition, system, or component thereof described herein. In an embodiment, the method of treatment or prevention can include using a composition, system, or component thereof to modify a polynucleotide of an infectious organism (e.g., bacterial or virus) within a subject or cell thereof. In an embodiment, the method of treatment or prevention can include using a composition, system, or component thereof to modify a polynucleotide of an infectious organism or symbiotic organism within a subject. The composition, system, and components thereof can be used to develop models of diseases, states, or conditions. The composition, system, and components thereof can be used to detect a disease state or correction thereof, such as by a method of treatment or prevention described herein. The composition, system, and components thereof can be used to screen and select cells that can be used, for example, as treatments or preventions described herein. The composition, system, and components thereof can be used to develop biologically active agents that can be used to modify one or more biologic functions or activities in a subject or a cell thereof.

[0528] In general, the method can include delivering a composition, system, and/or component thereof to a subject or cell thereof, or to an infectious or symbiotic organism by a suitable delivery technique and/or composition. Once administered the components can operate as described elsewhere herein to elicit a nucleic acid modification event. In an embodiment, the nucleic acid modification event can occur at the genomic, epigenomic, and/or transcriptomic level. DNA and/or RNA cleavage, gene activation, and/or gene deactivation can occur. Additional features, uses, and advantages are described in greater detail below. On the basis of this concept, several variations are appropriate to elicit a genomic locus event, including DNA cleavage, gene activation, or gene deactivation. Using the provided compositions, the person skilled in the art can advantageously and specifically target single or multiple loci with the same or different functional domains to elicit one or more genomic locus events. In addition to treating and/or preventing a disease in a subject, the compositions may be applied in a wide variety of methods for screening in libraries in cells and functional modeling in vivo (e.g., gene activation of lincRNA and identification of function; gain-of-function modeling; loss-of-function modeling; the use the compositions of the invention to establish cell lines and transgenic animals for optimization and screening purposes).

[0529] In an embodiment, CRISPR-Cas is provided or expressed in an in vitro system or in a cell, transiently or stably, and targeted or triggered to non-specifically cleave cellular nucleic acids. In one embodiment, CRISPR-Cas is engineered to knock down ssDNA, for example viral ssDNA. In another embodiment, CRISPR-Cas is engineered to knock down RNA. The system can be devised such that the knockdown is dependent on a target DNA or RNA present in the cell or in vitro system or triggered by the addition of a target nucleic acid (e.g., DNA or RNA) to the system or cell.

[0530] In an embodiment, the CRISPR-Cas system is engineered to non-specifically cleave RNA (or DNA) in a subset of cells distinguishable by the presence of an aberrant DNA sequence, for instance where cleavage of the aberrant DNA might be incomplete or ineffectual. In one non-limiting example, a DNA translocation that is present in a cancer cell and drives cell transformation is targeted. Whereas a subpopulation of cells that undergoes chromosomal DNA and repair may survive, non-specific collateral ribonuclease (or deoxyribonuclease) activity advantageously leads to cell death of potential survivors.

[0531] The composition, system, and components thereof described elsewhere herein can be used to treat and/or prevent a disease, such as a genetic and/or epigenetic disease, in a subject. The composition, system, and components thereof described elsewhere herein can be used to treat and/or prevent genetic infectious diseases in a subject, such as bacterial infections, viral infections, fungal infections, parasite infections, and combinations thereof. The composition, system, and components thereof described elsewhere herein can be used to modify the composition or profile of a microbiome in a subject, which can in turn modify the health status of the subject. The composition, system, described herein can be used to modify cells ex vivo, which can then be administered to the subject whereby the modified cells can treat or prevent a disease or symptom thereof. This is also referred to in some contexts as adoptive therapy. The composition, system, described herein can be used to treat mitochondrial diseases, where the mitochondrial disease etiology involves a mutation in the mitochondrial DNA.

[0532] Also provided is a method of treating a subject, e.g., a subject in need thereof, comprising inducing gene editing by transforming the subject with the polynucleotide encoding one or more components of the composition, system, or complex or any of polynucleotides or vectors described herein and administering them to the subject. A suitable repair template may also be provided, for example delivered by a vector comprising said repair template. The repair template may be a recombination template herein. Also provided is a method of treating a subject, e.g., a subject in need thereof, comprising inducing transcriptional activation or repression of multiple target gene loci by transforming the subject with the polynucleotides or vectors described herein, wherein said polynucleotide or vector encodes or comprises one or more components of composition, system, complex or component thereof comprising multiple Cas effectors. Where any treatment is occurring ex vivo, for example in a cell culture, then it will be appreciated that the term ‘subject’ may be replaced by the phrase “cell or cell culture.”

[0533] Also provided is a method of treating a subject, e.g., a subject in need thereof, comprising inducing gene editing by transforming the subject with the Cas effector(s), advantageously encoding and expressing in vivo the remaining portions of the composition, system, (e.g., RNA, guides). A suitable repair template may also be provided, for example delivered by a vector comprising said repair template. Also provided is a method of treating a subject, e.g., a subject in need thereof, comprising inducing transcriptional activation or repression by transforming the subject with the Cas effector(s) advantageously encoding and expressing in vivo the remaining portions of the composition, system, (e.g., RNA, guides); advantageously In an embodiment the CRISPR enzyme is a catalytically inactive Cas effector and includes one or more associated functional domains. Where any treatment is occurring ex vivo, for example in a cell culture, then it will be appreciated that the term ‘subject’ may be replaced by the phrase “cell or cell culture.”

[0534] One or more components of the composition and system described herein can be included in a composition, such as a pharmaceutical composition, and administered to a host individually or collectively. Alternatively, these components may be provided in a single composition for administration to a host. Administration to a host may be performed via viral vectors known to the skilled person or described herein for delivery to a host (lentiviral vector, adenoviral vector, AAV vector). As explained herein, use of different selection markers (e.g., lentiviral gRNA selection) and concentration of gRNA (e.g., dependent upon whether multiple gRNAs are used) may be advantageous for eliciting an improved effect.

[0535] Thus, also described herein are methods of inducing one or more polynucleotide modifications in a eukaryotic or prokaryotic cell or component thereof (a mitochondria) of a subject, infectious organism, and/or organism of the microbiome of the subject. The modification can include the introduction, deletion, or substitution of one or more nucleotides at a target sequence of a polynucleotide of one or more cell(s). The modification can occur in vitro, ex vivo, in situ, or in vivo.

[0536] In an embodiment, the method of treating or inhibiting a condition or a disease caused by one or more mutations in a genomic locus in a eukaryotic organism or a non-human organism can include manipulation of a target sequence within a coding, non-coding or regulatory element of said genomic locus in a target sequence in a subject or a non-human subject in need thereof comprising modifying the subject or a non-human subject by manipulation of the target sequence and wherein the condition or disease is susceptible to treatment or inhibition by manipulation of the target sequence including providing treatment comprising delivering a composition comprising the particle delivery system or the delivery system or the virus particle of any one of the above embodiments or the cell of any one of the above embodiments.

[0537] Also provided herein is the use of the particle delivery system or the delivery system or the virus particle of any one of the above embodiments or the cell of any one of the above embodiments in ex vivo or in vivo gene or genome editing; or for use in in vitro, ex vivo or in vivo gene therapy. Also provided herein are particle delivery systems, non-viral delivery systems, and/or the virus particle of any one of the above embodiments or the cell of any one of the above embodiments used in the manufacture of a medicament for in vitro, ex vivo or in vivo gene or genome editing or for use in in vitro, ex vivo or in vivo gene therapy or for use in a method of modifying an organism or a non-human organism by manipulation of a target sequence in a genomic locus associated with a disease or in a method of treating or inhibiting a condition or disease caused by one or more mutations in a genomic locus in a eukaryotic organism or a non-human organism.

[0538] In an embodiment, polynucleotide modification can include the introduction, deletion, or substitution of 1-75 nucleotides at each target sequence of said polynucleotide of said cell(s). The modification can include the introduction, deletion, or substitution of at least 1, 5, 10, 11, 12, 13, 14, 15, 16, 17, 18, 19, 20, 21, 22, 23, 24, 25, 26, 27, 28, 29, 30, 35, 40, 45, 50, or 75 nucleotides at each target sequence. The modification can include the introduction, deletion, or substitution of at least 5, 10, 11, 12, 13, 14, 15, 16, 17, 18, 19, 20, 21, 22, 23, 24, 25, 26, 27, 28, 29, 30, 35, 40, 45, 50, or 75 nucleotides at each target sequence of said cell(s). The modification can include the introduction, deletion, or substitution of at least 10, 11, 12, 13, 14, 15, 16, 17, 18, 19, 20, 21, 22, 23, 24, 25, 26, 27, 28, 29, 30, 35, 40, 45, 50, or 75 nucleotides at each target sequence of said cell(s). The modification can include the introduction, deletion, or substitution of at least 20, 21, 22, 23, 24, 25, 26, 27, 28, 29, 30, 35, 40, 45, 50, or 75 nucleotides at each target sequence of said cell(s). The modification can include the introduction, deletion, or substitution of at least 40, 45, 50, 75, 100, 200, 300, 400 or 500 nucleotides at each target sequence of said cell(s). The modification can include the introduction, deletion, or substitution of at least 500, 600, 700, 800, 900, 1000, 1100, 1200, 1300, 1400, 1500, 1600, 1700, 1800, 1900, 2000, 2100, 2200, 2300, 2400, 2500, 2600, 2700, 2800, 2900, 3000, 3100, 3200, 3300, 3400, 3500, 3600, 3700, 3800, 3900, 4000, 4100, 4200, 4300, 4400, 4500, 4600, 4700, 4800, 4900, 5000, 5100, 5200, 5300, 5400, 5500, 5600, 5700, 5800, 5900, 6000, 6100, 6200, 6300, 6400, 6500, 6600, 6700, 6800, 6900, 7000, 7100, 7200, 7300, 7400, 7500, 7600, 7700, 7800, 7900, 8000, 8100, 8200, 8300, 8400, 8500, 8600, 8700, 8800, 8900, 9000, 9100, 9200, 9300, 9400, 9500, 9600, 9700, 9800, or 9900 to 10000 nucleotides at each target sequence of said cell(s).

[0539] In an embodiment, the modifications can include the introduction, deletion, or substitution of nucleotides at each target sequence of said cell(s) via nucleic acid components (e.g., guide(s) RNA(s) or sgRNA(s)), such as those mediated by a composition, system, or a component thereof described elsewhere herein. In an embodiment, the modifications can include the introduction, deletion, or substitution of nucleotides at a target or random sequence of said cell(s) via a composition, system, or technique.

[0540] In an embodiment, the composition, system, or component thereof can promote Non-Homologous End-Joining (NHEJ). In an embodiment, modification of a polynucleotide by a composition, system, or a component thereof, such as a diseased polynucleotide, can include NHEJ. In an embodiment, promotion of this repair pathway by the composition, system, or a component thereof can be used to target gene or polynucleotide specific knock-outs and/or knock-ins. In an embodiment, promotion of this repair pathway by the composition, system, or a component thereof can be used to generate NHEJ-mediated indels. Nuclease-induced NHEJ can also be used to remove (e.g., delete) sequence in a gene of interest. Generally, NHEJ repairs a double-strand break in the DNA by joining together the two ends; however, generally, the original sequence is restored only if two compatible ends, exactly as they were formed by the double-strand break, are perfectly ligated. The DNA ends of the double-strand break are frequently the subject of enzymatic processing, resulting in the addition or removal of nucleotides, at one or both strands, prior to rejoining of the ends. This results in the presence of insertion and/or deletion (indel) mutations in the DNA sequence at the site of the NHEJ repair. The indel can range in size from 1-50 or more base pairs. In an embodiment the indel can be 1, 2, 3, 4, 5, 6, 7, 8, 9, 10, 11, 12, 13, 14, 15, 16, 17, 18, 19, 20, 21, 22, 23, 24, 25, 26, 27, 28, 29, 30, 31, 32, 33, 34, 35, 36, 37, 38, 39, 40, 41, 42, 43, 44, 45, 46, 47, 48, 49, 50, 51, 52, 53, 54, 55, 56, 57, 58,f 59, 60, 61, 62, 63, 64, 65, 66, 67, 68, 69, 70, 71, 72, 73, 74, 75, 76, 77, 78, 79, 80, 81, 82, 83, 84, 85, 86, 87, 88, 89, 90, 91, 92, 93, 94, 95, 96, 97, 98, 99, 100, 101, 102, 103, 104, 105, 106, 107, 108, 109, 110, 111, 112, 113, 114, 115, 116, 117, 118, 119, 120, 121, 122, 123, 124, 125, 126, 127, 128, 129, 130, 131, 132, 133, 134, 135, 136, 137, 138, 139, 140, 141, 142, 143, 144, 145, 146, 147, 148, 149, 150, 151, 152, 153, 154, 155, 156, 157, 158, 159, 160, 161, 162, 163, 164, 165, 166, 167, 168, 169, 170, 171, 172, 173, 174, 175, 176, 177, 178, 179, 180, 181, 182, 183, 184, 185, 186, 187, 188, 189, 190, 191, 192, 193, 194, 195, 196, 197, 198, 199, 200, 201, 202, 203, 204, 205, 206, 207, 208, 209, 210, 211, 212, 213, 214, 215, 216, 217, 218, 219, 220, 221, 222, 223, 224, 225, 226, 227, 228, 229, 230, 231, 232, 233, 234, 235, 236, 237, 238, 239, 240, 241, 242, 243, 244, 245, 246, 247, 248, 249, 250, 251, 252, 253, 254, 255, 256, 257, 258, 259, 260, 261, 262, 263, 264, 265, 266, 267, 268, 269, 270, 271, 272, 273, 274, 275, 276, 277, 278, 279, 280, 281, 282, 283, 284, 285, 286, 287, 288, 289, 290, 291, 292, 293, 294, 295, 296, 297, 298, 299, 300, 301, 302, 303, 304, 305, 306, 307, 308, 309, 310, 311, 312, 313, 314, 315, 316, 317, 318, 319, 320, 321, 322, 323, 324, 325, 326, 327, 328, 329, 330, 331, 332, 333, 334, 335, 336, 337, 338, 339, 340, 341, 342, 343, 344, 345, 346, 347, 348, 349, 350, 351, 352, 353, 354, 355, 356, 357, 358, 359, 360, 361, 362, 363, 364, 365, 366, 367, 368, 369, 370, 371, 372, 373, 374, 375, 376, 377, 378, 379, 380, 381, 382, 383, 384, 385, 386, 387, 388, 389, 390, 391, 392, 393, 394, 395, 396, 397, 398, 399, 400, 401, 402, 403, 404, 405, 406, 407, 408, 409, 410, 411, 412, 413, 414, 415, 416, 417, 418, 419, 420, 421, 422, 423, 424, 425, 426, 427, 428, 429, 430, 431, 432, 433, 434, 435, 436, 437, 438, 439, 440, 441, 442, 443, 444, 445, 446, 447, 448, 449, 450, 451, 452, 453, 454, 455, 456, 457, 458, 459, 460, 461, 462, 463, 464, 465, 466, 467, 468, 469, 470, 471, 472, 473, 474, 475, 476, 477, 478, 479, 480, 481, 482, 483, 484, 485, 486, 487, 488, 489, 490, 491, 492, 493, 494, 495, 496, 497, 498, 499, or 500 base pairs or more. If a double-strand break is targeted near to a short target sequence, the deletion mutations caused by the NHEJ repair often span, and therefore remove, the unwanted nucleotides. For the deletion of larger DNA segments, introducing two double-strand breaks, one on each side of the sequence, can result in NHEJ between the ends with removal of the entire intervening sequence. Both of these approaches can be used to delete specific DNA sequences.

[0541] In an embodiment, composition, system, mediated NHEJ can be used in the method to delete small sequence motifs. In an embodiment, composition, system, mediated NHEJ can be used in the method to generate NHEJ-mediate indels that can be targeted to the gene, e.g., a coding region, e.g., an early coding region of a gene of interest can be used to knockout (i.e., eliminate expression of) a gene of interest. For example, early coding region of a gene of interest includes sequence immediately following a transcription start site, within a first exon of the coding sequence, or within 500 bp of the transcription start site (e.g., less than 500, 450, 400, 350, 300, 250, 200, 150, 100 or 50 bp). In an embodiment, in which a guide molecule, e.g., guide RNA, and Cas effector generate a double strand break for the purpose of inducing NHEJ-mediated indels, a guide molecule, e.g., guide RNA, may be configured to position one double-strand break in close proximity to a nucleotide of the target position. In an embodiment, the cleavage site may be between 0-500 bp away from the target position (e.g., less than 500, 400, 300, 200, 100, 50, 40, 30, 25, 20, 15, 10, 9, 8, 7, 6, 5, 4, 3, 2 or 1 bp from the target position). In an embodiment, in which two guide molecules, e.g., guide RNAs, complexing with one or more Cas nickases induce two single strand breaks for the purpose of inducing NHEJ-mediated indels, two guide molecules, e.g., guide RNAs, may be configured to position two single-strand breaks to provide for NHEJ repair a nucleotide of the target position.

[0542] For minimization of toxicity and off-target effect, it may be important to control the concentration of Cas mRNA and guide molecule, e.g., guide RNA, delivered. Optimal concentrations of Cas mRNA and guide molecule, e.g., guide RNA, can be determined by testing different concentrations in a cellular or non-human eukaryote animal model and using deep sequencing the analyze the extent of modification at potential off-target genomic loci. Alternatively, to minimize the level of toxicity and off-target effect, Cas nickase mRNA (for example S. pyogenes Cas9 with the D10A mutation) can be delivered with a pair of guide molecules, e.g., guide RNAs, targeting a site of interest. Guide sequences and strategies to minimize toxicity and off-target effects can be as in International Patent Publication No. WO 2014/093622 (PCT/US2013/074667); or, via mutation. Others are as described elsewhere herein. Typically, in the context of an endogenous CRISPR or system, formation of a CRISPR complex (comprising a guide sequence hybridized to a target sequence and complexed with one or more Cas proteins) results in cleavage, nicking, and/or another modification of one or both strands in or near (e.g., within 1, 2, 3, 4, 5, 6, 7, 8, 9, 10, 20, 50, or more base pairs from) the target sequence. In an embodiment, the tracr sequence, which may comprise or consist of all or a portion of a wild type tracr sequence (e.g., about or more than about 20, 26, 32, 45, 48, 54, 63, 67, 85, or more nucleotides of a wild type tracr sequence), can also form part of a CRISPR complex, such as by hybridization along at least a portion of the tracr sequence to all or a portion of a tracr mate sequence that is operably linked to the guide sequence.

[0543] In an embodiment, a method of modifying a target polynucleotide in a cell to treat or prevent a disease can include allowing a composition, system, or component thereof to bind to the target polynucleotide, e.g., to effect cleavage, nicking, or other modification as the composition, system is capable of said target polynucleotide, thereby modifying the target polynucleotide, wherein the composition, system, or component thereof, complex with a guide sequence, and hybridize said guide sequence to a target sequence within the target polynucleotide, wherein said guide sequence is optionally linked to a tracr mate sequence, which in turn can hybridize to a tracr sequence. In some of these embodiments, the composition, system, or component thereof can be or include a CRISPR-Cas effector complexed with a guide sequence. In an embodiment, modification can include cleaving or nicking one or two strands at the location of the target sequence by one or more components of the composition, system, or component thereof.

[0544] The cleavage, nicking, or other modification capable of being performed by the composition, system, can modify transcription of a target polynucleotide. In an embodiment, modification of transcription can include decreasing transcription of a target polynucleotide. In an embodiment, modification can include increasing transcription of a target polynucleotide. In an embodiment, the method includes repairing said cleaved target polynucleotide by homologous recombination with a recombination template polynucleotide, wherein said repair results in a modification such as, but not limited to, an insertion, deletion, or substitution of one or more nucleotides of said target polynucleotide. In an embodiment, said modification results in one or more amino acid changes in a protein expressed from a gene comprising the target sequence. In an embodiment, the modification imparted by the composition, system, or component thereof provides a transcript and/or protein that can correct a disease or a symptom thereof, including but not limited to, any of those described in greater detail elsewhere herein.

[0545] In an embodiment, the method of treating or preventing a disease can include delivering one or more vectors or vector systems to a cell, such as a eukaryotic or prokaryotic cell, wherein one or more vectors or vector systems include the composition, system, or component thereof. In an embodiment, the vector(s) or vector system(s) can be a viral vector or vector system, such as an AAV or lentiviral vector system, which are described in greater detail elsewhere herein. In an embodiment, the method of treating or preventing a disease can include delivering one or more viral particles, such as an AAV or lentiviral particle, containing the composition, system, or component thereof. In an embodiment, the viral particle has a tissue specific tropism. In an embodiment, the viral particle has a liver, muscle, eye, heart, pancreas, kidney, neuron, epithelial cell, endothelial cell, astrocyte, glial cell, immune cell, or red blood cell specific tropism.

[0546] It will be understood that the composition and system, according to the invention as described herein, such as the composition and system, for use in the methods according to the invention as described herein, may be suitably used for any type of application known for composition, system, preferably in eukaryotes. In certain aspects, the application is therapeutic, preferably therapeutic in a eukaryote organism, such as including but not limited to animals (including human), plants, algae, fungi (including yeasts), etc. Alternatively, or in addition, in certain aspects, the application may involve accomplishing or inducing one or more particular traits or characteristics, such as genotypic and/or phenotypic traits or characteristics, as also described elsewhere herein.

### Treating Diseases of the Circulatory System

[0547] In an embodiment, the composition, system, and/or component thereof described herein can be used to treat and/or prevent a circulatory system disease. Exemplary disease is provided, for example. In an embodiment the plasma exosomes of Wahlgren et al. (Nucleic Acids Research, 2012, Vol. 40, No. 17 e130) can be used to deliver the composition, system, and/or component thereof described herein to the blood. In an embodiment, the circulatory system disease can be treated by using a lentivirus to deliver the composition, system, described herein to modify hematopoietic stem cells (HSCs) in vivo or ex vivo (See, e.g., Drakopoulou, “Review Article, The Ongoing Challenge of Hematopoietic Stem Cell-Based Gene Therapy for β-Thalassemia,” Stem Cells International, Volume 2011, Article ID 987980, 10 pages, doi: 10.4061/2011/987980, which can be adapted for use with the composition, system, herein in view of the description herein). In an embodiment, the circulatory system disorder can be treated by correcting HSCs as to the disease using a composition, system, herein or a component thereof, wherein the composition, system, optionally includes a suitable HDR repair template (See, e.g., Cavazzana, “Outcomes of Gene Therapy for β-Thalassemia Major via Transplantation of Autologous Hematopoietic Stem Cells Transduced Ex Vivo with a Lentiviral βA-T87Q-Globin Vector.”; Cavazzana-Calvo, “Transfusion independence and HMGA2 activation after gene therapy of human β-thalassaemia”, Nature 7, 318-322 (16 Sep. 2010) doi: 10.1038/nature09328; Nienhuis, “Development of Gene Therapy for Thalassemia, Cold Spring Perspectives in Medicine, doi: 10.1101/cshperspect.a011833 (2012), LentiGlobin BB305, a lentiviral vector containing an engineered β-globin gene (βA-T87Q); and Xie et al., “Seamless gene correction of β-thalassaemia mutations in patient-specific iPSCs using CRISPR/Cas9 and piggyback” Genome Research gr.173427.114 (2014) www.genome.org/cgi/doi/10.1101/gr.173427.114 (Cold Spring Harbor Laboratory Press; Watts, “Hematopoietic Stem Cell Expansion and Gene Therapy” Cytotherapy 13 (10): 1164-1171. doi: 10.3109/14653249.2011.620748 (2011), which can be adapted for use with the composition, system, herein in view of the description herein). In an embodiment, iPSCs can be modified using a composition, system, described herein to correct a disease polynucleotide associated with a circulatory disease. In this regard, the teachings of Xu et al. (Sci Rep. 2015 Jul. 9; 5:12065. doi: 10.1038/srep12065) and Song et al. (Stem Cells Dev. 2015 May 1; 24 (9): 1053-65. doi: 10.1089/scd.2014.0347. Epub 2015 Feb. 5) with respect to modifying iPSCs can be adapted for use in view of the description herein with the composition, system, described herein.

[0548] The term “Hematopoietic Stem Cell” or “HSC” refers broadly those cells considered to be an HSC, e.g., blood cells that give rise to all the other blood cells and are derived from mesoderm; located in the red bone marrow, which is contained in the core of most bones. HSCs of the invention include cells having a phenotype of hematopoietic stem cells, identified by small size, lack of lineage (lin) markers, and markers that belong to the cluster of differentiation series, like: CD34, CD38, CD90, CD133, CD105, CD45, and also c-kit,-the receptor for stem cell factor. Hematopoietic stem cells are negative for the markers that are used for detection of lineage commitment, and are, thus, called Lin-; and, during their purification by FACS, a number of up to 14 different mature blood-lineage markers, e.g., CD13 & CD33 for myeloid, CD71 for erythroid, CD19 for B cells, CD61 for megakaryocytic, etc. for humans; and, B220 (murine CD45) for B cells, Mac-1 (CD11b/CD18) for monocytes, Gr-1 for Granulocytes, Ter119 for erythroid cells, I17Ra, CD3, CD4, CD5, CD8 for T cells, etc. Mouse HSC markers: CD34lo/—, SCA-1+, Thy 1.1+/lo, CD38+, C-kit+, lin−, and Human HSC markers: CD34+, CD59+, Thyl/CD90+, CD38lo/−, C-kit/CD117+, and lin−. HSCs are identified by markers. Hence in embodiments discussed herein, the HSCs can be CD34+ cells. HSCs can also be hematopoietic stem cells that are CD34−/CD38−. Stem cells that may lack c-kit on the cell surface that are considered in the art as HSCs are within the ambit of the invention, as well as CD133+ cells likewise considered HSCs in the art.

[0549] In an embodiment, the treatment or prevention for treating a circulatory system or blood disease can include modifying a human cord blood cell with any modification described herein. In an embodiment, the treatment or prevention for treating a circulatory system or blood disease can include modifying a granulocyte colony-stimulating factor-mobilized peripheral blood cell (mPB) with any modification described herein. In an embodiment, the human cord blood cell or mPB can be CD34+. In an embodiment, the cord blood cell(s) or mPB cell(s) modified can be autologous. In an embodiment, the cord blood cell(s) or mPB cell(s) can be allogenic. In addition to the modification of the disease gene(s), allogenic cells can be further modified using the composition, system, described herein to reduce the immunogenicity of the cells when delivered to the recipient. Such techniques are described elsewhere herein and e.g., Cartier, “MINI-SYMPOSIUM: X-Linked Adrenoleukodystrophypa, Hematopoietic Stem Cell Transplantation and Hematopoietic Stem Cell Gene Therapy in X-Linked Adrenoleukodystrophy,” Brain Pathology 20 (2010)857-862, which can be adapted for use with the composition, system, herein. The modified cord blood cell(s) or mPB cell(s) can be optionally expanded in vitro. The modified cord blood cell(s) or mPB cell(s) can be derived to a subject in need thereof using any suitable delivery technique.

[0550] The CRISPR-Cas (system may be engineered to target genetic locus or loci in HSCs. In an embodiment, the Cas effector(s) can be codon-optimized for a eukaryotic cell and especially a mammalian cell, e.g., a human cell, for instance, HSC, or iPSC and sgRNA targeting a locus or loci in HSC, such as circulatory disease, can be prepared. These may be delivered via particles. The particles may be formed by the Cas effector protein and the gRNA being admixed. The gRNA and Cas effector protein mixture can be, for example, admixed with a mixture comprising or consisting essentially of or consisting of surfactant, phospholipid, biodegradable polymer, lipoprotein and alcohol, whereby particles containing the gRNA and Cas effector protein may be formed. The invention comprehends so making particles and particles from such a method as well as uses thereof. Particles suitable delivery of the CRISRP-Cas systems in the context of blood or circulatory system or HSC delivery to the blood or circulatory system are described in greater detail elsewhere herein.

[0551] In an embodiment, after ex vivo modification the HSCs or iPCS can be expanded prior to administration to the subject. Expansion of HSCs can be via any suitable method such as that described by, Lee, “Improved ex vivo expansion of adult hematopoietic stem cells by overcoming CUL4-mediated degradation of HOXB4.” Blood. 2013 May 16; 121 (20): 4082-9. doi: 10.1182/blood-2012-09-455204. Epub 2013 Mar. 21.

[0552] In an embodiment, the HSCs or iPSCs modified can be autologous. In an embodiment, the HSCs or iPSCs can be allogenic. In addition to the modification of the disease gene(s), allogenic cells can be further modified using the composition, system, described herein to reduce the immunogenicity of the cells when delivered to the recipient. Such techniques are described elsewhere herein and e.g., Cartier, “MINI-SYMPOSIUM: X-Linked Adrenoleukodystrophypa, Hematopoietic Stem Cell Transplantation and Hematopoietic Stem Cell Gene Therapy in X-Linked Adrenoleukodystrophy,” Brain Pathology 20 (2010)857-862, which can be adapted for use with the composition, system, herein.

### Treating Neurological Diseases

[0553] In an embodiment, the compositions, systems, described herein can be used to treat diseases of the brain and CNS. Delivery options for the brain include encapsulation of CRISPR enzyme and guide molecule, e.g., guide RNA, in the form of either DNA or RNA, into liposomes and conjugating to molecular Trojan horses for trans-blood brain barrier (BBB) delivery. Molecular Trojan horses have been shown to be effective for delivery of B-gal expression vectors into the brain of non-human primates. The same approach can be used to delivery vectors containing CRISPR enzyme and guide molecule, e.g., guide RNA. For instance, Xia CF and Boado R J, Pardridge W M (“Antibody-mediated targeting of siRNA via the human insulin receptor using avidin-biotin technology.” Mol Pharm. 2009 May-June;6 (3): 747-51. doi: 10.1021/mp800194) describes how delivery of short interfering RNA (siRNA) to cells in culture, and in vivo, is possible with combined use of a receptor-specific monoclonal antibody (mAb) and avidin-biotin technology. The authors also report that because the bond between the targeting mAb and the siRNA is stable with avidin-biotin technology, and RNAi effects at distant sites such as brain are observed in vivo following an intravenous administration of the targeted siRNA, the teachings of which can be adapted for use with the compositions, systems, herein. In other embodiments, an artificial virus can be generated for CNS and/or brain delivery. See e.g., Zhang et al. (Mol Ther. 2003 January;7 (1): 11-8.)), the teachings of which can be adapted for use with the compositions, systems, herein.

### Treating Hearing Diseases

[0554] In an embodiment the composition and system described herein can be used to treat a hearing disease or hearing loss in one or both ears. Deafness is often caused by lost or damaged hair cells that cannot relay signals to auditory neurons. In such cases, cochlear implants may be used to respond to sound and transmit electrical signals to the nerve cells. But these neurons often degenerate and retract from the cochlea as fewer growth factors are released by impaired hair cells.

[0555] In an embodiment, the composition, system, or modified cells can be delivered to one or both ears for treating or preventing hearing disease or loss by any suitable method or technique. Suitable methods and techniques include, but are not limited to, those set forth in US Patent Publication No. 20120328580 describes injection of a pharmaceutical composition into the ear (e.g., auricular administration), such as into the luminae of the cochlea (e.g., the Scala media, Sc vestibulae, and Sc tympani), e.g., using a syringe, e.g., a single-dose syringe. For example, one or more of the compounds described herein can be administered by intratympanic injection (e.g., into the middle ear), and/or injections into the outer, middle, and/or inner ear; administration in situ, via a catheter or pump (see e.g., McKenna et al., (U.S. Patent Publication No. 2006/0030837) and Jacobsen et al., (U.S. Pat. No. 7,206,639); administration in combination with a mechanical device such as a cochlear implant or a hearing aid, which is worn in the outer ear (see e.g., Patent Publication No. 2007/0093878, which provides an exemplary cochlear implant suitable for delivery of the compositions, systems, described herein to the ear). Such methods are routinely used in the art, for example, for the administration of steroids and antibiotics into human ears. Injection can be, for example, through the round window of the ear or through the cochlear capsule. Other inner ear administration methods are known in the art (see, e.g., Salt and Plontke, Drug Discovery Today, 10:1299-1306, 2005). In an embodiment, a catheter or pump can be positioned, e.g., in the ear (e.g., the outer, middle, and/or inner ear) of a patient during a surgical procedure. In an embodiment, a catheter or pump can be positioned, e.g., in the ear (e.g., the outer, middle, and/or inner ear) of a patient without the need for a surgical procedure.

[0556] In general, the cell therapy methods described in US Patent Publication No. 20120328580 can be used to promote complete or partial differentiation of a cell to or towards a mature cell type of the inner ear (e.g., a hair cell) in vitro. Cells resulting from such methods can then be transplanted or implanted into a patient in need of such treatment. The cell culture methods required to practice these methods, including methods for identifying and selecting suitable cell types, methods for promoting complete or partial differentiation of selected cells, methods for identifying complete or partially differentiated cell types, and methods for implanting complete or partially differentiated cells are described below.

[0557] Cells suitable for use in the present invention include, but are not limited to, cells that are capable of differentiating completely or partially into a mature cell of the inner ear, e.g., a hair cell (e.g., an inner and/or outer hair cell), when contacted, e.g., in vitro, with one or more of the compounds described herein. Exemplary cells that are capable of differentiating into a hair cell include, but are not limited to stem cells (e.g., inner ear stem cells, adult stem cells, bone marrow derived stem cells, embryonic stem cells, mesenchymal stem cells, skin stem cells, iPS cells, and fat derived stem cells), progenitor cells (e.g., inner ear progenitor cells), support cells (e.g., Deiters' cells, pillar cells, inner phalangeal cells, tectal cells and Hensen's cells), and/or germ cells. The use of stem cells for the replacement of inner ear sensory cells is described in Li et al., (U.S. Patent Publication No. 2005/0287127) and Li et al., (U.S. patent application Ser. No. 11/953,797). The use of bone marrow derived stem cells for the replacement of inner ear sensory cells is described in Edge et al., PCT/US2007/084654. iPS cells are described, e.g., at Takahashi et al., Cell, Volume 131, Issue 5, Pages 861-872 (2007); Takahashi and Yamanaka, Cell 126, 663-76 (2006); Okita et al., Nature 448, 260-262 (2007); Yu, J. et al., Science 318 (5858): 1917-1920 (2007); Nakagawa et al., Nat. Biotechnol. 26:101-106 (2008); and Zaehres and Scholer, Cell 131 (5): 834-835 (2007). Such suitable cells can be identified by analyzing (e.g., qualitatively or quantitatively) the presence of one or more tissue specific genes. For example, gene expression can be detected by detecting the protein product of one or more tissue-specific genes. Protein detection techniques involve staining proteins (e.g., using cell extracts or whole cells) using antibodies against the appropriate antigen. In this case, the appropriate antigen is the protein product of the tissue-specific gene expression. Although, in principle, a first antibody (i.e., the antibody that binds the antigen) can be labeled, it is more common (and improves the visualization) to use a second antibody directed against the first (e.g., an anti-lgG). This second antibody is conjugated either with fluorochromes, or appropriate enzymes for colorimetric reactions, or gold beads (for electron microscopy), or with the biotin-avidin system, so that the location of the primary antibody, and thus the antigen, can be recognized.

[0558] The composition and system may be delivered to the ear by direct application of pharmaceutical composition to the outer ear, with compositions modified from US Patent Publication No. 20110142917. In an embodiment the pharmaceutical composition is applied to the ear canal. Delivery to the ear may also be referred to as aural or otic delivery.

[0559] In an embodiment, the compositions, systems, or components thereof and/or vectors or vector systems can be delivered to ear via a transfection to the inner ear through the intact round window by a novel proteidic delivery technology which may be applied to the nucleic acid-targeting system of the present invention (see, e.g., Qi et al., Gene Therapy (2013), 1-9). About 40 μl of 10 mM RNA may be contemplated as the dosage for administration to the ear.

[0560] According to Rejali et al. (Hear Res. 2007 June;228 (1-2): 180-7), cochlear implant function can be improved by good preservation of the spiral ganglion neurons, which are the target of electrical stimulation by the implant and brain derived neurotrophic factor (BDNF) has previously been shown to enhance spiral ganglion survival in experimentally deafened ears. Rejali et al. tested a modified design of the cochlear implant electrode that includes a coating of fibroblast cells transduced by a viral vector with a BDNF gene insert. To accomplish this type of ex vivo gene transfer, Rejali et al. transduced guinea pig fibroblasts with an adenovirus with a BDNF gene cassette insert and determined that these cells secreted BDNF and then attached BDNF-secreting cells to the cochlear implant electrode via an agarose gel, and implanted the electrode in the scala tympani. Rejali et al. determined that the BDNF expressing electrodes were able to preserve significantly more spiral ganglion neurons in the basal turns of the cochlea after 48 days of implantation when compared to control electrodes and demonstrated the feasibility of combining cochlear implant therapy with ex vivo gene transfer for enhancing spiral ganglion neuron survival. Such a system may be applied to the nucleic acid-targeting system of the present invention for delivery to the ear.

[0561] In an embodiment, the system set forth in Mukherjea et al. (Antioxidants & Redox Signaling, Volume 13, Number 5, 2010) can be adapted for transtympanic administration of the composition, system, or component thereof to the ear. In an embodiment, a dosage of about 2 mg to about 4 mg of CRISPR Cas for administration to a human.

[0562] In an embodiment, the system set forth in [Jung et al. (Molecular Therapy, vol. 21 no. 4, 834-841, April 2013) can be adapted for vestibular epithelial delivery of the composition, system, or component thereof to the ear. In an embodiment, a dosage of about 1 to about 30 mg of CRISPR Cas for administration to a human.

### Treating Diseases in Non-Dividing Cells

[0563] In an embodiment, the gene or transcript to be corrected is in a non-dividing cell. Exemplary non-dividing cells are muscle cells or neurons. Non-dividing (especially non-dividing, fully differentiated) cell types present issues for gene targeting or genome engineering, for example because homologous recombination (HR) is generally suppressed in the G1 cell-cycle phase. However, while studying the mechanisms by which cells control normal DNA repair systems, Durocher discovered a previously unknown switch that keeps HR “off” in non-dividing cells and devised a strategy to toggle this switch back on. Orthwein et al. (Daniel Durocher's lab at the Mount Sinai Hospital in Ottawa, Canada) recently reported (Nature 16142, published online 9 Dec. 2015) have shown that the suppression of HR can be lifted and gene targeting successfully concluded in both kidney (293T) and osteosarcoma (U2OS) cells. Tumor suppressors, BRCA1, PALB2 and BRAC2 are known to promote DNA DSB repair by HR. They found that formation of a complex of BRCA1 with PALB2-BRAC2 is governed by a ubiquitin site on PALB2, such that action on the site by an E3 ubiquitin ligase. This E3 ubiquitin ligase is composed of KEAP1 (a PALB2-interacting protein) in complex with cullin-3 (CUL3)-RBX1. PALB2 ubiquitylation suppresses its interaction with BRCA1 and is counteracted by the deubiquitylase USP11, which is itself under cell cycle control. Restoration of the BRCA1-PALB2 interaction combined with the activation of DNA-end resection is sufficient to induce homologous recombination in G1, as measured by a number of methods including a CRISPR-Cas-based gene-targeting assay directed at USP11 or KEAP1 (expressed from a pX459 vector). However, when the BRCA1-PALB2 interaction was restored in resection-competent G1 cells using either KEAP1 depletion or expression of the PALB2-KR mutant, a robust increase in gene-targeting events was detected. These teachings can be adapted for and/or applied to the Cas compositions, systems, described herein.

[0564] Thus, reactivation of HR in cells, especially non-dividing, fully differentiated cell types is preferred, in an embodiment. In an embodiment, promotion of the BRCA1-PALB2 interaction is preferred in an embodiment. In an embodiment, the target ell is a non-dividing cell. In an embodiment, the target cell is a neuron or muscle cell. In an embodiment, the target cell is targeted in vivo. In an embodiment, the cell is in G1 and HR is suppressed. In an embodiment, use of KEAP1 depletion, for example inhibition of expression of KEAP1 activity, is preferred. KEAP1 depletion may be achieved through siRNA, for example as shown in Orthwein et al. Alternatively, expression of the PALB2-KR mutant (lacking all eight Lys residues in the BRCA1-interaction domain is preferred, either in combination with KEAP1 depletion or alone. PALB2-KR interacts with BRCA1 irrespective of cell cycle position. Thus, promotion or restoration of the BRCA1-PALB2 interaction, especially in G1 cells, is preferred in an embodiment, especially where the target cells are non-dividing, or where removal and return (ex vivo gene targeting) is problematic, for example neuron or muscle cells. KEAP1 siRNA is available from ThermoFischer. In an embodiment, a BRCA1-PALB2 complex may be delivered to the G1 cell. In an embodiment, PALB2 deubiquitylation may be promoted for example by increased expression of the deubiquitylase USP11, so it is envisaged that a construct may be provided to promote or up-regulate expression or activity of the deubiquitylase USP11.

### Treating Diseases of the Eye

[0565] In an embodiment, the disease to be treated is a disease that affects the eyes. Thus, In an embodiment, the composition, system, or component thereof described herein is delivered to one or both eyes.

[0566] The composition, system, can be used to correct ocular defects that arise from several genetic mutations further described in Genetic Diseases of the Eye, Second Edition, edited by Elias I. Traboulsi, Oxford University Press, 2012.

[0567] In an embodiment, the condition to be treated or targeted is an eye disorder. In an embodiment, the eye disorder may include glaucoma. In an embodiment, the eye disorder includes a retinal degenerative disease. In an embodiment, the retinal degenerative disease is selected from Stargardt disease, Bardet-Biedl Syndrome, Best disease, Blue Cone Monochromacy, Choroidermia, Cone-rod dystrophy, Congenital Stationary Night Blindness, Enhanced S-Cone Syndrome, Juvenile X-Linked Retinoschisis, Leber Congenital Amaurosis, Malattia Leventinesse, Norrie Disease or X-linked Familial Exudative Vitreoretinopathy, Pattern Dystrophy, Sorsby Dystrophy, Usher Syndrome, Retinitis Pigmentosa, Achromatopsia or Macular dystrophies or degeneration, Retinitis Pigmentosa, Achromatopsia, and age related macular degeneration. In an embodiment, the retinal degenerative disease is Leber Congenital Amaurosis (LCA) or Retinitis Pigmentosa. Other exemplary eye diseases are described in greater detail elsewhere herein.

[0568] In an embodiment, the composition, system, is delivered to the eye, optionally via intravitreal injection or subretinal injection. Intraocular injections may be performed with the aid of an operating microscope. For subretinal and intravitreal injections, eyes may be prolapsed by gentle digital pressure and fundi visualized using a contact lens system consisting of a drop of a coupling medium solution on the cornea covered with a glass microscope slide coverslip. For subretinal injections, the tip of a 10-mm 34-gauge needle, mounted on a 5-μl Hamilton syringe may be advanced under direct visualization through the superior equatorial sclera tangentially towards the posterior pole until the aperture of the needle was visible in the subretinal space. Then, 2 μl of vector suspension may be injected to produce a superior bullous retinal detachment, thus confirming subretinal vector administration. This approach creates a self-sealing sclerotomy allowing the vector suspension to be retained in the subretinal space until it is absorbed by the RPE, usually within 48 h of the procedure. This procedure may be repeated in the inferior hemisphere to produce an inferior retinal detachment. This technique results in the exposure of approximately 70% of neurosensory retina and RPE to the vector suspension. For intravitreal injections, the needle tip may be advanced through the sclera 1 mm posterior to the corneoscleral limbus and 2 μl of vector suspension injected into the vitreous cavity. For intracameral injections, the needle tip may be advanced through a corneoscleral limbal paracentesis, directed towards the central cornea, and 2 μl of vector suspension may be injected. For intracameral injections, the needle tip may be advanced through a corneoscleral limbal paracentesis, directed towards the central cornea, and 2 μl of vector suspension may be injected. These vectors may be injected at titers of either 1.0-1.4×1010 or 1.0-1.4×109 transducing units (TU)/ml.

[0569] In an embodiment, for administration to the eye, lentiviral vectors. In an embodiment, the lentiviral vector is an equine infectious anemia virus (EIAV) vector. Exemplary EIAV vectors for eye delivery are described in Balagaan, J Gene Med 2006; 8:275-285, Published online 21 Nov. 2005 in Wiley InterScience (www.interscience.wiley.com). DOI: 10.1002/jgm.845; Binley et al., HUMAN GENE THERAPY 23:980-991 (September 2012), which can be adapted for use with the composition, system, described herein. In an embodiment, the dosage can be 1.1×105 transducing units per eye (TU/eye) in a total volume of 100 μl.

[0570] Other viral vectors can also be used for delivery to the eye, such as AAV vectors, such as those described in Campochiaro et al., Human Gene Therapy 17:167-176 (February 2006), Millington-Ward et al. (Molecular Therapy, vol. 19 no. 4, 642-649 April 2011; Dalkara et al. (Sci Transl Med 5, 189ra76 (2013)), which can be adapted for use with the composition, system, described herein. In an embodiment, the dose can range from about 106 to 109.5 particle units. In the context of the Millington-Ward AAV vectors, a dose of about 2×1011 to about 6×1013 virus particles can be administered. In the context of Dalkara vectors, a dose of about 1×1015 to about 1×1016 vg/ml administered to a human.

[0571] In an embodiment, the sd-rxRNA® system of R×i Pharmaceuticals may be used/and or adapted for delivering composition, system, to the eye. In this system, a single intravitreal administration of 3 μg of sd-rxRNA results in sequence-specific reduction of PPIB mRNA levels for 14 days. The sd-rxRNAR system may be applied to the nucleic acid-targeting system of the present invention, contemplating a dose of about 3 to 20 mg of CRISPR administered to a human.

[0572] In other embodiments, the methods of US Patent Publication No. 20130183282, which is directed to methods of cleaving a target sequence from the human rhodopsin gene, may also be modified to the nucleic acid-targeting system of the present invention.

[0573] In other embodiments, the methods of US Patent Publication No. 20130202678 for treating retinopathies and sight-threatening ophthalmologic disorders relating to delivering of the Puf-A gene (which is expressed in retinal ganglion and pigmented cells of eye tissues and displays a unique anti-apoptotic activity) to the sub-retinal or intravitreal space in the eye may be used or adapted. In particular, desirable targets are zgc: 193933, prdmla, spata2, tex10, rbb4, ddx3, zp2.2, Blimp-1 and HtrA2, all of which may be targeted by the composition, system, of the present invention.

[0574] Wu (Cell Stem Cell, 13:659-62, 2013) designed a guide RNA that led Cas9 to a single base pair mutation that causes cataracts in mice, where it induced DNA cleavage. Then using either the other wild type allele or oligos given to the zygotes repair mechanisms corrected the sequence of the broken allele and corrected the cataract-causing genetic defect in mutant mouse. This approach can be adapted to and/or applied to the compositions, systems, described herein.

[0575] US Patent Publication No. 20120159653, describes use of zinc finger nucleases to genetically modify cells, animals and proteins associated with macular degeneration (MD), the teachings of which can be applied to and/or adapted for the compositions, systems, described herein.

[0576] One aspect of US Patent Publication No. 20120159653 relates to editing of any chromosomal sequences that encode proteins associated with MD which may be applied to the nucleic acid-targeting system of the present invention.

### Treating Muscle Diseases and Cardiovascular Diseases

[0577] In an embodiment, the composition, system can be used to treat and/or prevent a muscle disease and associated circulatory or cardiovascular disease or disorder. The present invention also contemplates delivering the composition, system, described herein, e.g., Cas effector protein systems, to the heart. For the heart, a myocardium tropic adeno-associated virus (AAVM) is preferred, in particular AAVM41 which showed preferential gene transfer in the heart (see, e.g., Lin-Yanga et al., PNAS, Mar. 10, 2009, vol. 106, no. 10). Administration may be systemic or local. A dosage of about 1-10×1014 vector genomes is contemplated for systemic administration. See also, e.g., Eulalio et al. (2012) Nature 492:376 and Somasuntharam et al. (2013) Biomaterials 34:7790, the teachings of which can be adapted for and/or applied to the compositions, systems, described herein.

[0578] For example, US Patent Publication No. 20110023139, the teachings of which can be adapted for and/or applied to the compositions, systems, described herein describes use of zinc finger nucleases to genetically modify cells, animals and proteins associated with cardiovascular disease. Cardiovascular diseases generally include high blood pressure, heart attacks, heart failure, and stroke and TIA. Any chromosomal sequence involved in cardiovascular disease, or the protein encoded by any chromosomal sequence involved in cardiovascular disease, may be utilized in the methods described in this disclosure. The cardiovascular-related proteins are typically selected based on an experimental association of the cardiovascular-related protein to the development of cardiovascular disease. For example, the production rate or circulating concentration of a cardiovascular-related protein may be elevated or depressed in a population having a cardiovascular disorder relative to a population lacking the cardiovascular disorder. Differences in protein levels may be assessed using proteomic techniques including but not limited to Western blot, immunohistochemical staining, enzyme linked immunosorbent assay (ELISA), and mass spectrometry. Alternatively, the cardiovascular-related proteins may be identified by obtaining gene expression profiles of the genes encoding the proteins using genomic techniques including but not limited to DNA microarray analysis, serial analysis of gene expression (SAGE), and quantitative real-time polymerase chain reaction (Q-PCR).

[0579] The compositions, systems, herein can be used for treating diseases of the muscular system. The present invention also contemplates delivering the composition, system, described herein, effector protein systems, to muscle(s).

[0580] In an embodiment, the muscle disease to be treated is a muscle dystrophy such as DMD. In an embodiment, the composition, system, such as a system capable of RNA modification, described herein can be used to achieve exon skipping to achieve correction of the diseased gene. As used herein, the term “exon skipping” refers to the modification of pre-mRNA splicing by the targeting of splice donor and/or acceptor sites within a pre-mRNA with one or more complementary antisense oligonucleotide(s) (AONs). By blocking access of a spliceosome to one or more splice donor or acceptor site, an AON may prevent a splicing reaction thereby causing the deletion of one or more exons from a fully-processed mRNA. Exon skipping may be achieved in the nucleus during the maturation process of pre-mRNAs. In an embodiment, exon skipping may include the masking of key sequences involved in the splicing of targeted exons by using a composition, system, described herein capable of RNA modification. In an embodiment, exon skipping can be achieved in dystrophin mRNA. In an embodiment, the composition, system, can induce exon skipping at exon 1, 2, 3, 4, 5, 6, 7, 8, 10, 11, 12, 13, 14, 15, 16, 17, 18, 19, 20, 21, 22, 23, 24, 25, 26, 27, 28, 29, 30, 31, 32, 33, 34, 45, 36, 37, 38, 39, 40, 41, 42, 43, 44, 45, 46, 47, 48, 49, 50, 51, 52, 53, 54, 55, 56, 57, 58, 59, 60, 61, 62, 63, 64, 65, 66, 67, 68, 69, 70, 71, 72, 73, 74, 75, 76, 77, 78, 79, or any combination thereof of the dystrophin mRNA. In an embodiment, the composition, system, can induce exon skipping at exon 43, 44, 50, 51, 52, 55, or any combination thereof of the dystrophin mRNA. Mutations in these exons, can also be corrected using non-exon skipping polynucleotide modification methods.

[0581] In an embodiment, for treatment of a muscle disease, the method of Bortolanza et al. Molecular Therapy vol. 19 no. 11, 2055-264 November 2011) may be applied to an AAV expressing CRISPR Cas and injected into humans at a dosage of about 2×1015 or 2× 1016 vg of vector. The teachings of Bortolanza et al., can be adapted for and/or applied to the compositions, systems, described herein.

[0582] In an embodiment, the method of Dumonceaux et al. (Molecular Therapy vol. 18 no. 5, 881-887 May 2010) may be applied to an AAV expressing CRISPR Cas and injected into humans, for example, at a dosage of about 1014 to about 1015 vg of vector. The teachings of Dumonceaux described herein can be adapted for and/or applied to the compositions, systems, described herein.

[0583] In an embodiment, the method of Kinouchi et al. (Gene Therapy (2008)15, 1126-1130) may be applied to CRISPR Cas systems described herein and injected into a human, for example, at a dosage of about 500 to 1000 ml of a 40 uM solution into the muscle.

[0584] In an embodiment, the method of Hagstrom et al. (Molecular Therapy Vol. 10, No. 2, August 2004) can be adapted for and/or applied to the compositions, systems, herein and injected at a dose of about 15 to about 50 mg into the great saphenous vein of a human.

[0585] In an embodiment, the method comprises treating a sickle cell related disease, e.g., sickle cell trait, sickle cell disease such as sickle cell anemia, β-thalassaemia. For example, the method and system may be used to modify the genome of the sickle cell, e.g., by correcting one or more mutations of the β-globin gene. In the case of β-thalassaemia, sickle cell anemia can be corrected by modifying HSCs with the systems. The system allows the specific editing of the cell's genome by cutting its DNA and then letting it repair itself. The Cas protein is inserted and directed by an RNA guide to the mutated point and then it cuts the DNA at that point. Simultaneously, a healthy version of the sequence is inserted. This sequence is used by the cell's own repair system to fix the induced cut. In this way, the CRISPR-Cas allows the correction of the mutation in the previously obtained stem cells. The methods and systems may be used to correct HSCs as to sickle cell anemia using a systems that targets and corrects the mutation (e.g., with a suitable HDR template that delivers a coding sequence for β-globin, advantageously non-sickling β-globin); specifically, the guide molecule, e.g., guide RNA, can target mutation that give rise to sickle cell anemia, and the HDR can provide coding for proper expression of β-globin. A guide molecule, e.g., guide RNA, that targets the mutation-and-Cas protein containing particle is contacted with HSCs carrying the mutation. The particle also can contain a suitable HDR template to correct the mutation for proper expression of β-globin; or the HSC can be contacted with a second particle or a vector that contains or delivers the HDR template. The so contacted cells can be administered; and optionally treated/expanded; cf. Cartier. The HDR template can provide for the HSC to express an engineered β-globin gene (e.g., βA-T87Q), or β-globin.

### Treating Diseases of the Liver and Kidney

[0586] In an embodiment, the composition, system, or component thereof described herein can be used to treat a disease of the kidney or liver. Thus, in an embodiment, delivery of the CRISRP-Cas system or component thereof described herein is to the liver or kidney.

[0587] Delivery strategies to induce cellular uptake of the therapeutic nucleic acid include physical force or vector systems such as viral-, lipid-or complex-based delivery, or nanocarriers. From the initial applications with less possible clinical relevance, when nucleic acids were addressed to renal cells with hydrodynamic high-pressure injection systemically, a wide range of gene therapeutic viral and non-viral carriers have been applied already to target posttranscriptional events in different animal kidney disease models in vivo (Csaba Révész and Péter Hamar (2011). Delivery Methods to Target RNAs in the Kidney, Gene Therapy Applications, Prof. Chunsheng Kang (Ed.), ISBN: 978-953-307-541-9, InTech, Available from: www.intechopen.com/books/gene-therapy-applications/delivery-methods-to-target-rnas-inthe-kidney). Delivery methods to the kidney may include those in Yuan et al. (Am J Physiol Renal Physiol 295: F605-F617, 2008). The method of Yuang et al. may be applied to the CRISPR Cas system of the present invention contemplating a 1-2 g subcutaneous injection of CRISPR Cas conjugated with cholesterol to a human for delivery to the kidneys. In an embodiment, the method of Molitoris et al. (J Am Soc Nephrol 20:1754-1764, 2009) can be adapted to the CRISRP-Cas system of the present invention and a cumulative dose of 12-20 mg/kg to a human can be used for delivery to the proximal tubule cells of the kidneys. In an embodiment, the methods of Thompson et al. (Nucleic Acid Therapeutics, Volume 22, Number 4, 2012) can be adapted to the CRISRP-Cas system of the present invention and a dose of up to 25 mg/kg can be delivered via i.v. administration. In an embodiment, the method of Shimizu et al. (J Am Soc Nephrol 21:622-633, 2010) can be adapted to the CRISRP-Cas system of the present invention and a dose of about of 10-20 μmol CRISPR Cas complexed with nanocarriers in about 1-2 liters of a physiologic fluid for i.p. administration can be used.

[0588] Other various delivery vehicles can be used to deliver the composition, system to the kidney such as viral, hydrodynamic, lipid, polymer nanoparticles, aptamers and various combinations thereof (see e.g., Larson et al., Surgery, (August 2007), Vol. 142, No. 2, pp. (262-269); Hamar et al., Proc Natl Acad Sci, (October 2004), Vol. 101, No. 41, pp. (14883-14888); Zheng et al., Am J Pathol, (October 2008), Vol. 173, No. 4, pp. (973-980); Feng et al., Transplantation, (May 2009), Vol. 87, No. 9, pp. (1283-1289); Q. Zhang et al., PloS ONE, (July 2010), Vol. 5, No. 7, e11709, pp. (1-13); Kushibikia et al., J Controlled Release, (July 2005), Vol. 105, No. 3, pp. (318-331); Wang et al., Gene Therapy, (July 2006), Vol. 13, No. 14, pp. (1097-1103); Kobayashi et al., Journal of Pharmacology and Experimental Therapeutics, (February 2004), Vol. 308, No. 2, pp. (688-693); Wolfrum et al., Nature Biotechnology, (September 2007), Vol. 25, No. 10, pp. (1149-1157); Molitoris et al., J Am Soc Nephrol, (August 2009), Vol. 20, No. 8 pp. (1754-1764); Mikhaylova et al., Cancer Gene Therapy, (March 2011), Vol. 16, No. 3, pp. (217-226); Y. Zhang et al., J Am Soc Nephrol, (April 2006), Vol. 17, No. 4, pp. (1090-1101); Singhal et al., Cancer Res, (May 2009), Vol. 69, No. 10, pp. (4244-4251); Malek et al., Toxicology and Applied Pharmacology, (April 2009), Vol. 236, No. 1, pp. (97-108); Shimizu et al., J Am Soc Nephrology, (April 2010), Vol. 21, No. 4, pp. (622-633); Jiang et al., Molecular Pharmaceutics, (May-June 2009), Vol. 6, No. 3, pp. (727-737); Cao et al, J Controlled Release, (June 2010), Vol. 144, No. 2, pp. (203-212); Ninichuk et al., Am J Pathol, (March 2008), Vol. 172, No. 3, pp. (628-637); Purschke et al., Proc Natl Acad Sci, (March 2006), Vol. 103, No. 13, pp. (5173-5178).

[0589] In an embodiment, delivery is to liver cells. In an embodiment, the liver cell is a hepatocyte. Delivery of the composition and system herein may be via viral vectors, especially AAV (and in particular AAV2/6) vectors. These can be administered by intravenous injection. A preferred target for the liver, whether in vitro or in vivo, is the albumin gene. This is a so-called ‘safe harbor” as albumin is expressed at very high levels and so some reduction in the production of albumin following successful gene editing is tolerated. It is also preferred as the high levels of expression seen from the albumin promoter/enhancer allows for useful levels of correct or transgene production (from the inserted recombination template) to be achieved even if only a small fraction of hepatocytes are edited. See sites identified by Wechsler et al. (reported at the 57th Annual Meeting and Exposition of the American Society of Hematology-abstract available online at ash.confex.com/ash/2015/webprogram/Paper86495.html and presented on 6th December 2015) which can be adapted for use with the compositions, systems, herein.

[0590] Exemplary liver and kidney diseases that can be treated and/or prevented are described elsewhere herein.

### Treating Epithelial and Lung Diseases

[0591] In an embodiment, the disease treated or prevented by the composition and system described herein can be a lung or epithelial disease. The compositions and systems described herein can be used for treating epithelial and/or lung diseases. The present invention also contemplates delivering the composition, system, described herein, to one or both lungs.

[0592] In an embodiment, as viral vector can be used to deliver the composition, system, or component thereof to the lungs. In an embodiment, the AAVis an AAV-1, AAV-2, AAV-5, AAV-6, and/or AAV-9 for delivery to the lungs (see, e.g., Li et al., Molecular Therapy, vol. 17 no. 12, 2067-277 December 2009). In an embodiment, the MOI can vary from 1×103 to 4×105 vector genomes/cell. In an embodiment, the delivery vector can be an RSV vector as in Zamora et al. (Am J Respir Crit Care Med Vol 183. pp 531-538, 2011. The method of Zamora et al. may be applied to the nucleic acid-targeting system of the present invention and an aerosolized CRISPR Cas, for example with a dosage of 0.6 mg/kg, may be contemplated for the present invention.

[0593] Subjects treated for a lung disease may for example receive pharmaceutically effective amount of aerosolized AAV vector system per lung endobronchially delivered while spontaneously breathing. As such, aerosolized delivery is preferred for AAV delivery in general. An adenovirus or an AAV particle may be used for delivery. Suitable gene constructs, each operably linked to one or more regulatory sequences, may be cloned into the delivery vector. In this instance, the following constructs are provided as examples: Cbh or EF1α promoter for Cas, U6 or H1 promoter for guide RNA): A preferred arrangement is to use a CFTRdelta508 targeting guide, a repair template for deltaF508 mutation and a codon optimized Cas enzyme, with optionally one or more nuclear localization signal or sequence(s) (NLS(s)), e.g., two (2) NLSs.

### Treating Diseases of the Skin

[0594] The compositions and systems described herein can be used for the treatment of skin diseases. The present invention also contemplates delivering the composition and system, described herein, to the skin.

[0595] In an embodiment, delivery to the skin (intradermal delivery) of the composition, system, or component thereof can be via one or more microneedles or microneedle containing device. For example, In an embodiment the device and methods of Hickerson et al. (Molecular Therapy-Nucleic Acids (2013)2, e129) can be used and/or adapted to deliver the composition, system, described herein, for example, at a dosage of up to 300 μl of 0.1 mg/ml CRISPR-Cas system to the skin.

[0596] In an embodiment, the methods and techniques of Leachman et al. (Molecular Therapy, vol. 18 no. 2, 442-446 February 2010) can be used and/or adapted for delivery of a CIRPSR-Cas system described herein to the skin.

[0597] In an embodiment, the methods and techniques of Zheng et al. (PNAS, Jul. 24, 2012, vol. 109, no. 30, 11975-11980) can be used and/or adapted for nanoparticle delivery of a CIRPSR-Cas system described herein to the skin. In an embodiment, as dosage of about 25 nM applied in a single application can achieve gene knockdown in the skin.

### Treating Cancer

[0598] The compositions, systems, described herein can be used for the treatment of cancer. The present invention also contemplates delivering the composition, system, described herein, to a cancer cell. Also, as is described elsewhere herein the compositions, systems, can be used to modify an immune cell, such as a CAR or CAR T cell, which can then in turn be used to treat and/or prevent cancer. This is also described in International Patent Publication No. WO 2015/161276, the disclosure of which is hereby incorporated by reference and described herein below.

[0599] Target genes suitable for the treatment or prophylaxis of cancer can include those set forth in Tables 8 and 9. In an embodiment, target genes for cancer treatment and prevention can also include those described in International Patent Publication No. WO 2015/048577 the disclosure of which is hereby incorporated by reference and can be adapted for and/or applied to the composition, system, described herein.

### Adoptive Cell Therapy

[0600] The compositions, systems, and components thereof described herein can be used to modify cells for an adoptive cell therapy. In an embodiment of the invention, methods and compositions which involve editing a target nucleic acid sequence, or modulating expression of a target nucleic acid sequence, and applications thereof in connection with cancer immunotherapy are comprehended by adapting the composition, system, of the present invention. In an embodiment, the compositions, systems, and methods may be used to modify a stem cell (e.g., induced pluripotent cell) to derive modified natural killer cells, gamma delta T cells, and alpha beta T cells, which can be used for the adoptive cell therapy. In certain examples, the compositions, systems, and methods may be used to modify modified natural killer cells, gamma delta T cells, and alpha beta T cells.

[0601] As used herein, “ACT”, “adoptive cell therapy” and “adoptive cell transfer” may be used interchangeably. In an embodiment, Adoptive cell therapy (ACT) can refer to the transfer of cells to a patient with the goal of transferring the functionality and characteristics into the new host by engraftment of the cells (see, e.g., Mettananda et al., Editing an α-globin enhancer in primary human hematopoietic stem cells as a treatment for-thalassemia, Nat Commun. 2017 Sept 4; 8 (1): 424). As used herein, the term “engraft” or “engraftment” refers to the process of cell incorporation into a tissue of interest in vivo through contact with existing cells of the tissue. Adoptive cell therapy (ACT) can refer to the transfer of cells, most commonly immune-derived cells, back into the same patient or into a new recipient host with the goal of transferring the immunologic functionality and characteristics into the new host. If possible, use of autologous cells helps the recipient by minimizing GVHD issues. The adoptive transfer of autologous tumor infiltrating lymphocytes (TIL) (Zacharakis et al., (2018) Nat Med. 2018 June;24 (6): 724-730; Besser et al., (2010) Clin. Cancer Res 16 (9)2646-55; Dudley et al., (2002) Science 298 (5594): 850-4; and Dudley et al., (2005) Journal of Clinical Oncology 23 (10): 2346-57.) or genetically re-directed peripheral blood mononuclear cells (Johnson et al., (2009) Blood 114 (3): 535-46; and Morgan et al., (2006) Science 314 (5796)126-9) has been used to successfully treat patients with advanced solid tumors, including melanoma, metastatic breast cancer and colorectal carcinoma, as well as patients with CD19-expressing hematologic malignancies (Kalos et al., (2011) Science Translational Medicine 3 (95): 95ra73). In an embodiment, allogenic cells immune cells are transferred (see, e.g., Ren et al., (2017) Clin Cancer Res 23 (9)2255-2266). As described further herein, allogenic cells can be edited to reduce alloreactivity and prevent graft-versus-host disease. Thus, use of allogenic cells allows for cells to be obtained from healthy donors and prepared for use in patients as opposed to preparing autologous cells from a patient after diagnosis.

[0602] Aspects of the invention involve the adoptive transfer of immune system cells, such as T cells, specific for selected antigens, such as tumor associated antigens or tumor specific neoantigens (see, e.g., Maus et al., 2014, Adoptive Immunotherapy for Cancer or Viruses, Annual Review of Immunology, Vol. 32:189-225; Rosenberg and Restifo, 2015, Adoptive cell transfer as personalized immunotherapy for human cancer, Science Vol. 348 no. 6230 pp. 62-68; Restifo et al., 2015, Adoptive immunotherapy for cancer: harnessing the T cell response. Nat. Rev. Immunol. 12 (4): 269-281; and Jenson and Riddell, 2014, Design and implementation of adoptive therapy with chimeric antigen receptor-modified T cells. Immunol Rev. 257 (1): 127-144; and Rajasagi et al., 2014, Systematic identification of personal tumor-specific neoantigens in chronic lymphocytic leukemia. Blood. 2014 July 17; 124 (3): 453-62).

[0603] In an embodiment, an antigen (such as a tumor antigen) to be targeted in adoptive cell therapy (such as particularly CAR or TCR T-cell therapy) of a disease (such as particularly of tumor or cancer) may be selected from a group consisting of: MR1 (see, e.g., Crowther, et al., 2020, Genome-wide CRISPR-Cas9 screening reveals ubiquitous T cell cancer targeting via the monomorphic MHC class I-related protein MR1, Nature Immunology volume 21, pages 178-185), B cell maturation antigen (BCMA) (see, e.g., Friedman et al., Effective Targeting of Multiple BCMA-Expressing Hematological Malignancies by Anti-BCMA CAR T Cells, Hum Gene Ther. 2018 Mar. 8; Berdeja J G, et al. Durable clinical responses in heavily pretreated patients with relapsed/refractory multiple myeloma: updated results from a multicenter study of bb2121 anti-Bcma CAR T cell therapy. Blood. 2017; 130:740; and Mouhieddine and Ghobrial, Immunotherapy in Multiple Myeloma: The Era of CAR T Cell Therapy, Hematologist, May-June 2018, Volume 15, issue 3); PSA (prostate-specific antigen); prostate-specific membrane antigen (PSMA); PSCA (Prostate stem cell antigen); Tyrosine-protein kinase transmembrane receptor ROR1; fibroblast activation protein (FAP); Tumor-associated glycoprotein 72 (TAG72); Carcinoembryonic antigen (CEA); Epithelial cell adhesion molecule (EPCAM); Mesothelin; Human Epidermal growth factor Receptor 2 (ERBB2 (Her2/neu)); Prostase; Prostatic acid phosphatase (PAP); elongation factor 2 mutant (ELF2M); Insulin-like growth factor 1 receptor (IGF-1R); gplOO; BCR-ABL (breakpoint cluster region-Abelson); tyrosinase; New York esophageal squamous cell carcinoma 1 (NY-ESO-1); κ-light chain, LAGE (L antigen); MAGE (melanoma antigen); Melanoma-associated antigen 1 (MAGE-A1); MAGE A3; MAGE A6; legumain; Human papillomavirus (HPV) E6; HPV E7; prostein; survivin; PCTAI (Galectin 8); Melan-A/MART-1; Ras mutant; TRP-1 (tyrosinase related protein 1, or gp75); Tyrosinase-related Protein 2 (TRP2); TRP-2/INT2 (TRP-2/intron 2); RAGE (renal antigen); receptor for advanced glycation end products 1 (RAGE1); Renal ubiquitous 1, 2 (RU1, RU2); intestinal carboxyl esterase (iCE); Heat shock protein 70-2 (HSP70-2) mutant; thyroid stimulating hormone receptor (TSHR); CD123; CD171; CD19; CD20; CD22; CD26; CD30; CD33; CD44v7/8 (cluster of differentiation 44, exons 7/8); CD53; CD92; CD100; CD148; CD150; CD200; CD261; CD262; CD362; CS-1 (CD2 subset 1, CRACC, SLAMF7, CD319, and 19A24); C-type lectin-like molecule-1 (CLL-1); ganglioside GD3 (aNeu5Ac (2-8) aNeu5Ac (2-3) bDGalp (1-4) bDGlcp (1-1) Cer); Tn antigen (Tn Ag); Fms-Like Tyrosine Kinase 3 (FLT3); CD38; CD138; CD44v6; B7H3 (CD276); KIT (CD117); Interleukin-13 receptor subunit alpha-2 (IL-13Ra2); Interleukin 11 receptor alpha (IL-11Ra); prostate stem cell antigen (PSCA); Protease Serine 21 (PRSS21); vascular endothelial growth factor receptor 2 (VEGFR2); Lewis (Y) antigen; CD24; Platelet-derived growth factor receptor beta (PDGFR-beta); stage-specific embryonic antigen-4 (SSEA-4); Mucin 1, cell surface associated (MUC1); mucin 16 (MUC16); epidermal growth factor receptor (EGFR); epidermal growth factor receptor variant III (EGFRvIII); neural cell adhesion molecule (NCAM); carbonic anhydrase IX (CAIX); Proteasome (Prosome, Macropain) Subunit, Beta Type, 9 (LMP2); ephrin type-A receptor 2 (EphA2); Ephrin B2; Fucosyl GM1; sialyl Lewis adhesion molecule (sLe); ganglioside GM3 (aNeu5Ac (2-3) bDGalp (1-4) bDGlcp (1-1) Cer); TGS5; high molecular weight-melanoma-associated antigen (HMWMAA); 0-acetyl-GD2 ganglioside (OAcGD2); Folate receptor alpha; Folate receptor beta; tumor endothelial marker 1 (TEMI/CD248); tumor endothelial marker 7-related (TEM7R); claudin 6 (CLDN6); G protein-coupled receptor class C group 5, member D (GPRC5D); chromosome X open reading frame 61 (CXORF61); CD97; CD179a; anaplastic lymphoma kinase (ALK); Polysialic acid; placenta-specific 1 (PLAC1); hexasaccharide portion of globoH glycoceramide (GloboH); mammary gland differentiation antigen (NY-BR-1); uroplakin 2 (UPK2); Hepatitis A virus cellular receptor 1 (HAVCR); adrenoceptor beta 3 (ADRB3); pannexin 3 (PANX3); G protein-coupled receptor 20 (GPR20); lymphocyte antigen 6 complex, locus K 9 (LY6K); Olfactory receptor 51E2 (OR51E2); TCR Gamma Alternate Reading Frame Protein (TARP); Wilms tumor protein (WT1); ETS translocation-variant gene 6, located on chromosome 12p (ETV6-AML); sperm protein 17 (SPA17); X Antigen Family, Member IA (XAGE1); angiopoietin-binding cell surface receptor 2 (Tie 2); CT (cancer/testis (antigen)); melanoma cancer testis antigen-1 (MAD-CT-1); melanoma cancer testis antigen-2 (MAD-CT-2); Fos-related antigen 1; p53; p53 mutant; human Telomerase reverse transcriptase (hTERT); sarcoma translocation breakpoints; melanoma inhibitor of apoptosis (ML-IAP); ERG (transmembrane protease, serine 2 (TMPRSS2) ETS fusion gene); N-Acetyl glucosaminyl-transferase V (NA17); paired box protein Pax-3 (PAX3); Androgen receptor; Cyclin B1; Cyclin D1; v-myc avian myelocytomatosis viral oncogene neuroblastoma derived homolog (MYCN); Ras Homolog Family Member C (RhoC); Cytochrome P450 1B1 (CYP1B1); CCCTC-Binding Factor (Zinc Finger Protein)-Like (BORIS); Squamous Cell Carcinoma Antigen Recognized By T Cells-1 or 3 (SARTI, SART3); Paired box protein Pax-5 (PAX5); proacrosin binding protein sp32 (OY-TES1); lymphocyte-specific protein tyrosine kinase (LCK); A kinase anchor protein 4 (AKAP-4); synovial sarcoma, X breakpoint-1,-2,-3 or 4 (SSX1, SSX2, SSX3, SSX4); CD79a; CD79b; CD72; Leukocyte-associated immunoglobulin-like receptor 1 (LAIR1); Fc fragment of IgA receptor (FCAR); Leukocyte immunoglobulin-like receptor subfamily A member 2 (LILRA2); CD300 molecule-like family member f (CD300LF); C-type lectin domain family 12 member A (CLEC12A); bone marrow stromal cell antigen 2 (BST2); EGF-like module-containing mucin-like hormone receptor-like 2 (EMR2); lymphocyte antigen 75 (LY75); Glypican-3 (GPC3); Fc receptor-like 5 (FCRL5); mouse double minute 2 homolog (MDM2); livin; alphafetoprotein (AFP); transmembrane activator and CAML Interactor (TACI); B-cell activating factor receptor (BAFF-R); V-Ki-ras2 Kirsten rat sarcoma viral oncogene homolog (KRAS); immunoglobulin lambda-like polypeptide 1 (IGLL1); 707-AP (707 alanine proline); ART-4 (adenocarcinoma antigen recognized by T4 cells); BAGE (B antigen; b-catenin/m, b-catenin/mutated); CAMEL (CTL-recognized antigen on melanoma); CAPI (carcinoembryonic antigen peptide 1); CASP-8 (caspase-8); CDC27m (cell-division cycle 27 mutated); CDK4/m (cycline-dependent kinase 4 mutated); Cyp-B (cyclophilin B); DAM (differentiation antigen melanoma); EGP-2 (epithelial glycoprotein 2); EGP-40 (epithelial glycoprotein 40); Erbb2, 3, 4 (erythroblastic leukemia viral oncogene homolog-2,-3, 4); FBP (folate binding protein); fAchR (Fetal acetylcholine receptor); G250 (glycoprotein 250); GAGE (G antigen); GnT-V (N-acetylglucosaminyltransferase V); HAGE (helicose antigen); ULA-A (human leukocyte antigen-A); HST2 (human signet ring tumor 2); KIAA0205; KDR (kinase insert domain receptor); LDLR/FUT (low density lipid receptor/GDP L-fucose: b-D-galactosidase 2-a-L fucosyltransferase); LICAM (LI cell adhesion molecule); MC1R (melanocortin 1 receptor); Myosin/m (myosin mutated); MUM-1,-2,-3 (melanoma ubiquitous mutated 1, 2, 3); NA88-A (NA cDNA clone of patient M88); KG2D (Natural killer group 2, member D) ligands; oncofetal antigen (h5T4); p190 minor bcr-abl (protein of 190KD bcr-abl); Pml/RARa (promyelocytic leukemia/retinoic acid receptor a); PRAME (preferentially expressed antigen of melanoma); SAGE (sarcoma antigen); TEL/AMLI (translocation Ets-family leukemia/acute myeloid leukemia 1); TPI/m (triosephosphate isomerase mutated); CD70; and any combination thereof.

[0604] In an embodiment, an antigen to be targeted in adoptive cell therapy (such as particularly CAR or TCR T-cell therapy) of a disease (such as particularly of tumor or cancer) is a tumor-specific antigen (TSA).

[0605] In an embodiment, an antigen to be targeted in adoptive cell therapy (such as particularly CAR or TCR T-cell therapy) of a disease (such as particularly of tumor or cancer) is a neoantigen.

[0606] In an embodiment, an antigen to be targeted in adoptive cell therapy (such as particularly CAR or TCR T-cell therapy) of a disease (such as particularly of tumor or cancer) is a tumor-associated antigen (TAA).

[0607] In an embodiment, an antigen to be targeted in adoptive cell therapy (such as particularly CAR or TCR T-cell therapy) of a disease (such as particularly of tumor or cancer) is a universal tumor antigen. In an embodiment, the universal tumor antigen is selected from the group consisting of: a human telomerase reverse transcriptase (hTERT), survivin, mouse double minute 2 homolog (MDM2), cytochrome P450 1B 1 (CYP1B), HER2/neu, Wilms' tumor gene 1 (WT1), livin, alphafetoprotein (AFP), carcinoembryonic antigen (CEA), mucin 16 (MUC16), MUC1, prostate-specific membrane antigen (PSMA), p53, cyclin (Dl), and any combinations thereof.

[0608] In an embodiment, an antigen (such as a tumor antigen) to be targeted in adoptive cell therapy (such as particularly CAR or TCR T-cell therapy) of a disease (such as particularly of tumor or cancer) may be selected from a group consisting of: CD19, BCMA, CD70, CLL-1, MAGE A3, MAGE A6, HPV E6, HPV E7, WTI, CD22, CD171, ROR1, MUC16, and SSX2. In an embodiment, the antigen may be CD19. For example, CD19 may be targeted in hematologic malignancies, such as in lymphomas, more particularly in B-cell lymphomas, such as without limitation in diffuse large B-cell lymphoma, primary mediastinal b-cell lymphoma, transformed follicular lymphoma, marginal zone lymphoma, mantle cell lymphoma, acute lymphoblastic leukemia including adult and pediatric ALL, non-Hodgkin lymphoma, indolent non-Hodgkin lymphoma, or chronic lymphocytic leukemia. For example, BCMA may be targeted in multiple myeloma or plasma cell leukemia (see, e.g., 2018 American Association for Cancer Research (AACR) Annual meeting Poster: Allogeneic Chimeric Antigen Receptor T Cells Targeting B Cell Maturation Antigen). For example, CLLI may be targeted in acute myeloid leukemia. For example, MAGE A3, MAGE A6, SSX2, and/or KRAS may be targeted in solid tumors. For example, HPV E6 and/or HPV E7 may be targeted in cervical cancer or head and neck cancer. For example, WTI may be targeted in acute myeloid leukemia (AML), myelodysplastic syndromes (MDS), chronic myeloid leukemia (CML), non-small cell lung cancer, breast, pancreatic, ovarian, or colorectal cancers, or mesothelioma. For example, CD22 may be targeted in B cell malignancies, including non-Hodgkin lymphoma, diffuse large B-cell lymphoma, or acute lymphoblastic leukemia. For example, CD171 may be targeted in neuroblastoma, glioblastoma, or lung, pancreatic, or ovarian cancers. For example, ROR1 may be targeted in ROR1+malignancies, including non-small cell lung cancer, triple negative breast cancer, pancreatic cancer, prostate cancer, ALL, chronic lymphocytic leukemia, or mantle cell lymphoma. For example, MUC16 may be targeted in MUC16ecto+ epithelial ovarian, fallopian tube or primary peritoneal cancer. For example, CD70 may be targeted in both hematologic malignancies as well as in solid cancers such as renal cell carcinoma (RCC), gliomas (e.g., GBM), and head and neck cancers (HNSCC). CD70 is expressed in both hematologic malignancies as well as in solid cancers, while its expression in normal tissues is restricted to a subset of lymphoid cell types (see, e.g., 2018 American Association for Cancer Research (AACR) Annual meeting Poster: Allogeneic CRISPR Engineered Anti-CD70 CAR-T Cells Demonstrate Potent Preclinical Activity Against Both Solid and Hematological Cancer Cells).

[0609] Various strategies may for example be employed to genetically modify T cells by altering the specificity of the T cell receptor (TCR) for example by introducing new TCR a and B chains with selected peptide specificity (see U.S. Pat. No. 8,697,854; PCT Patent Publications: WO2003020763, WO2004033685, WO2004044004, WO2005114215, WO2006000830, WO2008038002, WO2008039818, WO2004074322, WO2005113595, WO2006125962, WO2013166321, WO2013039889, WO2014018863, WO2014083173; U.S. Pat. No. 8,088,379).

[0610] As an alternative to, or addition to, TCR modifications, chimeric antigen receptors (CARs) may be used in order to generate immunoresponsive cells, such as T cells, specific for selected targets, such as malignant cells, with a wide variety of receptor chimera constructs having been described (see U.S. Pat. Nos. 5,843,728; 5,851,828; 5,912,170; 6,004,811; 6,284,240; 6,392,013; 6,410,014; 6,753, 162; 8,211,422; and, PCT Publication WO 9215322).

[0611] In general, CARs are comprised of an extracellular domain, a transmembrane domain, and an intracellular domain, wherein the extracellular domain comprises an antigen-binding domain that is specific for a predetermined target. While the antigen-binding domain of a CAR is often an antibody or antibody fragment (e.g., a single chain variable fragment, scFv), the binding domain is not particularly limited so long as it results in specific recognition of a target. For example, in an embodiment, the antigen-binding domain may comprise a receptor, such that the CAR is capable of binding to the ligand of the receptor. Alternatively, the antigen-binding domain may comprise a ligand, such that the CAR is capable of binding the endogenous receptor of that ligand.

[0612] The antigen-binding domain of a CAR is generally separated from the transmembrane domain by a hinge or spacer. The spacer is also not particularly limited, and it is designed to provide the CAR with flexibility. For example, a spacer domain may comprise a portion of a human Fc domain, including a portion of the CH3 domain, or the hinge region of any immunoglobulin, such as IgA, IgD, IgE, IgG, or IgM, or variants thereof. Furthermore, the hinge region may be modified so as to prevent off-target binding by FcRs or other potential interfering objects. For example, the hinge may comprise an IgG4 Fc domain with or without a S228P, L235E, and/or N297Q mutation (according to Kabat numbering) in order to decrease binding to FcRs. Additional spacers/hinges include, but are not limited to, CD4, CD8, and CD28 hinge regions.

[0613] The transmembrane domain of a CAR may be derived either from a natural or from a synthetic source. Where the source is natural, the domain may be derived from any membrane bound or transmembrane protein. Transmembrane regions of particular use in this disclosure may be derived from CD8, CD28, CD3, CD45, CD4, CD5, CDS, CD9, CD 16, CD22, CD33, CD37, CD64, CD80, CD86, CD 134, CD137, CD 154, TCR. Alternatively, the transmembrane domain may be synthetic, in which case it will comprise predominantly hydrophobic residues such as leucine and valine. Preferably a triplet of phenylalanine, tryptophan and valine will be found at each end of a synthetic transmembrane domain. Optionally, a short oligo- or polypeptide linker, preferably between 2 and 10 amino acids in length may form the linkage between the transmembrane domain and the cytoplasmic signaling domain of the CAR. A glycine-serine doublet provides a particularly suitable linker.

[0614] Alternative CAR constructs may be characterized as belonging to successive generations. First-generation CARs typically consist of a single-chain variable fragment of an antibody specific for an antigen, for example comprising a VL linked to a VH of a specific antibody, linked by a flexible linker, for example by a CD8a hinge domain and a CD8a transmembrane domain, to the transmembrane and intracellular signaling domains of either CD3ζ or FcRγ (scFv-CD3ζ or scFv-FcRγ; see U.S. Pat. Nos. 7,741,465; 5,912,172; 5,906,936). Second-generation CARs incorporate the intracellular domains of one or more costimulatory molecules, such as CD28, OX40 (CD134), or 4-1BB (CD137) within the endodomain (for example scFv-CD28/OX40/4-1BB-CD3ζ; see U.S. Pat. Nos. 8,911,993; 8,916,381; 8,975,071; 9,101,584; 9,102,760; 9,102,761). Third-generation CARs include a combination of costimulatory endodomains, such a CD33-chain, CD97, GDI la-CD18, CD2, ICOS, CD27, CD154, CDS, OX40, 4-1BB, CD2, CD7, LIGHT, LFA-1, NKG2C, B7-H3, CD30, CD40, PD-1, or CD28 signaling domains (for example scFv-CD28-4-1BB-CD3ζ or scFv-CD28-OX40-CD3ζ; see U.S. Pat. Nos. 8,906,682; 8,399,645; 5,686,281; PCT Publication No. WO 2014/134165; PCT Publication No. WO 2012/079000). In an embodiment, the primary signaling domain comprises a functional signaling domain of a protein selected from the group consisting of CD3 zeta, CD3 gamma, CD3 delta, CD3 epsilon, common FcR gamma (FCERIG), FcR beta (Fc Epsilon R1b), CD79a, CD79b, Fc gamma RIIa, DAP10, and DAP12. In an embodiment, the primary signaling domain comprises a functional signaling domain of CD3ζ or FcRγ. In an embodiment, the one or more costimulatory signaling domains comprise a functional signaling domain of a protein selected, each independently, from the group consisting of: CD27, CD28, 4-1BB (CD137), OX40, CD30, CD40, PD-1, ICOS, lymphocyte function-associated antigen-1 (LFA-1), CD2, CD7, LIGHT, NKG2C, B7-H3, a ligand that specifically binds with CD83, CDS, ICAM-1, GITR, BAFFR, HVEM (LIGHTR), SLAMF7, NKp80 (KLRF1), CD160, CD19, CD4, CD8 alpha, CD8 beta, IL2R beta, IL2R gamma, IL7R alpha, ITGA4, VLA1, CD49a, ITGA4, IA4, CD49D, ITGA6, VLA-6, CD49f, ITGAD, CD11d, ITGAE, CD103, ITGAL, CD11a, LFA-1, ITGAM, CD11b, ITGAX, CD11c, ITGB1, CD29, ITGB2, CD18, ITGB7, TNFR2, TRANCE/RANKL, DNAMI (CD226), SLAMF4 (CD244, 2B4), CD84, CD96 (Tactile), CEACAMI, CRTAM, Ly9 (CD229), CD160 (BY55), PSGLI, CD100 (SEMA4D), CD69, SLAMF6 (NTB-A, Ly108), SLAM (SLAMF1, CD150, IPO-3), BLAME (SLAMF8), SELPLG (CD162), LTBR, LAT, GADS, SLP-76, PAG/Cbp, NKp44, NKp30, NKp46, and NKG2D. In an embodiment, the one or more costimulatory signaling domains comprise a functional signaling domain of a protein selected, each independently, from the group consisting of: 4-1BB, CD27, and CD28. In an embodiment, a chimeric antigen receptor may have the design as described in U.S. Pat. No. 7,446,190, comprising an intracellular domain of CD3% chain (such as amino acid residues 52-163 of the human CD3 zeta chain, as shown in SEQ ID NO: 14 of U.S. Pat. No. 7,446,190), a signaling region from CD28 and an antigen-binding element (or portion or domain, such as scFv). The CD28 portion, when between the zeta chain portion and the antigen-binding element, may suitably include the transmembrane and signaling domains of CD28 (such as amino acid residues 114-220 of SEQ ID NO: 10, full sequence shown in SEQ ID NO: 6 of U.S. Pat. No. 7,446,190; these can include the following portion of CD28 as set forth in Genbank identifier NM_006139. Alternatively, when the zeta sequence lies between the CD28 sequence and the antigen-binding element, intracellular domain of CD28 can be used alone (such as amino sequence set forth in SEQ ID NO: 9 of U.S. Pat. No. 7,446,190). Hence, certain embodiments employ a CAR comprising (a) a zeta chain portion comprising the intracellular domain of human CD35 chain, (b) a costimulatory signaling region, and (c) an antigen-binding element (or portion or domain), wherein the costimulatory signaling region comprises the amino acid sequence encoded by SEQ ID NO: 6 of U.S. Pat. No. 7,446,190.

[0615] Alternatively, costimulation may be orchestrated by expressing CARs in antigen-specific T cells, chosen so as to be activated and expanded following engagement of their native αβTCR, for example by antigen on professional antigen-presenting cells, with attendant costimulation. In addition, additional engineered receptors may be provided on the immunoresponsive cells, for example to improve targeting of a T-cell attack and/or minimize side effects.

[0616] By means of an example and without limitation, Kochenderfer et al., (2009) J Immunother. 32 (7): 689-702 described anti-CD19 chimeric antigen receptors (CAR). FMC63-28Z CAR contained a single chain variable region moiety (scFv) recognizing CD19 derived from the FMC63 mouse hybridoma (described in Nicholson et al., (1997) Molecular Immunology 34:1157-1165), a portion of the human CD28 molecule, and the intracellular component of the human TCR-ζ molecule. FMC63-CD828BBZ CAR contained the FMC63 scFv, the hinge and transmembrane regions of the CD8 molecule, the cytoplasmic portions of CD28 and 4-1BB, and the cytoplasmic component of the TCR-ζ molecule. The exact sequence of the CD28 molecule included in the FMC63-28Z CAR corresponded to Genbank identifier NM_006139; the sequence included all amino acids starting with the amino acid sequence IEVMYPPPY (SEQ ID NO: 83) and continuing all the way to the carboxy-terminus of the protein. To encode the anti-CD19 scFv component of the vector, the authors designed a DNA sequence which was based on a portion of a previously published CAR (Cooper et al., (2003) Blood 101:1637-1644). This sequence encoded the following components in frame from the 5′ end to the 3′ end: an Xhol site, the human granulocyte-macrophage colony-stimulating factor (GM-CSF) receptor α-chain signal sequence, the FMC63 light chain variable region (as in Nicholson et al., supra), a linker peptide (as in Cooper et al., supra), the FMC63 heavy chain variable region (as in Nicholson et al., supra), and a NotI site. A plasmid encoding this sequence was digested with Xhol and NotI. To form the MSGV-FMC63-28Z retroviral vector, the XhoI and NotI-digested fragment encoding the FMC63 scFv was ligated into a second Xhol and NotI-digested fragment that encoded the MSGV retroviral backbone (as in Hughes et al., (2005) Human Gene Therapy 16:457-472) as well as part of the extracellular portion of human CD28, the entire transmembrane and cytoplasmic portion of human CD28, and the cytoplasmic portion of the human TCR-ζ (molecule (as in Maher et al., 2002) Nature Biotechnology 20:70-75). The FMC63-28Z CAR is included in the KTE-C19 (axicabtagene ciloleucel) anti-CD19 CAR-T therapy product in development by Kite Pharma, Inc. for the treatment of inter alia patients with relapsed/refractory aggressive B-cell non-Hodgkin lymphoma (NHL). Accordingly, in an embodiment, cells intended for adoptive cell therapies, more particularly immunoresponsive cells such as T cells, may express the FMC63-28Z CAR as described by Kochenderfer et al. (supra). Hence, In an embodiment, cells intended for adoptive cell therapies, more particularly immunoresponsive cells such as T cells, may comprise a CAR comprising an extracellular antigen-binding element (or portion or domain, such as scFv) that specifically binds to an antigen, an intracellular signaling domain comprising an intracellular domain of a CD3ζ chain, and a costimulatory signaling region comprising a signaling domain of CD28. Preferably, the CD28 amino acid sequence is as set forth in Genbank identifier NM 006139 (sequence version 1, 2 or 3) starting with the amino acid sequence IEVMYPPPY (SEQ ID NO: 83) and continuing all the way to the carboxy-terminus of the protein. Preferably, the antigen is CD19, more preferably the antigen-binding element is an anti-CD19 scFv, even more preferably the anti-CD19 scFv as described by Kochenderfer et al. (supra).

[0617] Additional anti-CD19 CARs are further described in International Patent Publication No. WO 2015/187528. More particularly Example 1 and Table 1 of WO2015187528, incorporated by reference herein, demonstrate the generation of anti-CD19 CARs based on a fully human anti-CD19 monoclonal antibody (47G4, as described in US20100104509) and murine anti-CD19 monoclonal antibody (as described in Nicholson et al. and explained above). Various combinations of a signal sequence (human CD8-alpha or GM-CSF receptor), extracellular and transmembrane regions (human CD8-alpha) and intracellular T-cell signaling domains (CD28-CD3; 4-1BB-CD3ζ; CD27-CD3ζ; CD28-CD27-CD3ζ, 4-1BB-CD27-CD3ζ; CD27-4-1BB-CD3ζ; CD28-CD27-FceRI gamma chain; or CD28-FceRI gamma chain) were disclosed. Hence, In an embodiment, cells intended for adoptive cell therapies, more particularly immunoresponsive cells such as T cells, may comprise a CAR comprising an extracellular antigen-binding element that specifically binds to an antigen, an extracellular and transmembrane region as set forth in Table 1 of WO2015187528 and an intracellular T-cell signaling domain as set forth in Table 1 of No. WO 2015/187528. Preferably, the antigen is CD19, more preferably the antigen-binding element is an anti-CD19 scFv, even more preferably the mouse or human anti-CD19 scFv as described in Example 1 of. WO 2015/187528. In an embodiment, the CAR comprises, consists essentially of or consists of an amino acid sequence of SEQ ID NO: 1, SEQ ID NO: 2, SEQ ID NO: 3, SEQ ID NO: 4, SEQ ID NO: 5, SEQ ID NO: 6, SEQ ID NO: 7, SEQ ID NO: 8, SEQ ID NO: 9, SEQ ID NO: 10, SEQ ID NO: 11, SEQ ID NO: 12, or SEQ ID NO: 13 as set forth in Table 1 of WO2015187528.

[0618] By means of an example and without limitation, a chimeric antigen receptor that recognizes the CD70 antigen is described in WO2012058460A2 (see also, Park et al., CD70 as a target for chimeric antigen receptor T cells in head and neck squamous cell carcinoma, Oral Oncol. 2018 March;78:145-150; and Jin et al., CD70, a novel target of CAR T-cell therapy for gliomas, Neuro Oncol. 2018 January 10; 20 (1): 55-65). CD70 is expressed by diffuse large B-cell and follicular lymphoma and also by the malignant cells of Hodgkins lymphoma, Waldenstrom's macroglobulinemia and multiple myeloma, and by HTLV-1- and EBV-associated malignancies. (Agathanggelou et al. Am. J. Pathol. 1995; 147:1152-1160; Hunter et al., Blood 2004; 104:4881. 26; Lens et al., J Immunol. 2005; 174:6212-6219; Baba et al., J Virol. 2008; 82:3843-3852.) In addition, CD70 is expressed by non-hematological malignancies such as renal cell carcinoma and glioblastoma. (Junker et al., J Urol. 2005; 173:2150-2153; Chahlavi et al., Cancer Res 2005; 65:5428-5438) Physiologically, CD70 expression is transient and restricted to a subset of highly activated T, B, and dendritic cells.

[0619] By means of an example and without limitation, chimeric antigen receptor that recognizes BCMA has been described (see, e.g., US20160046724A1; WO2016014789A2; WO2017211900A1; WO2015158671A1; US20180085444A1; WO2018028647A1; US20170283504A1; and WO2013154760A1).

[0620] In an embodiment, the immune cell may, in addition to a CAR or exogenous TCR as described herein, further comprise a chimeric inhibitory receptor (inhibitory CAR) that specifically binds to a second target antigen and is capable of inducing an inhibitory or immunosuppressive or repressive signal to the cell upon recognition of the second target antigen. In an embodiment, the chimeric inhibitory receptor comprises an extracellular antigen-binding element (or portion or domain) configured to specifically bind to a target antigen, a transmembrane domain, and an intracellular immunosuppressive or repressive signaling domain. In an embodiment, the second target antigen is an antigen that is not expressed on the surface of a cancer cell or infected cell or the expression of which is downregulated on a cancer cell or an infected cell. In an embodiment, the second target antigen is an MHC-class I molecule. In an embodiment, the intracellular signaling domain comprises a functional signaling portion of an immune checkpoint molecule, such as for example PD-1 or CTLA4. Advantageously, the inclusion of such inhibitory CAR reduces the chance of the engineered immune cells attacking non-target (e.g., non-cancer) tissues.

[0621] Alternatively, T-cells expressing CARs may be further modified to reduce or eliminate expression of endogenous TCRs in order to reduce off-target effects. Reduction or elimination of endogenous TCRs can reduce off-target effects and increase the effectiveness of the T cells (U.S. Pat. No. 9,181,527). T cells stably lacking expression of a functional TCR may be produced using a variety of approaches. T cells internalize, sort, and degrade the entire T cell receptor as a complex, with a half-life of about 10 hours in resting T cells and 3 hours in stimulated T cells (von Essen, M. et al. 2004. J. Immunol. 173:384-393). Proper functioning of the TCR complex requires the proper stoichiometric ratio of the proteins that compose the TCR complex. TCR function also requires two functioning TCR zeta proteins with ITAM motifs. The activation of the TCR upon engagement of its MHC-peptide ligand requires the engagement of several TCRs on the same T cell, which all must signal properly. Thus, if a TCR complex is destabilized with proteins that do not associate properly or cannot signal optimally, the T cell will not become activated sufficiently to begin a cellular response.

[0622] Accordingly, in an embodiment, TCR expression may eliminated using RNA interference (e.g., shRNA, siRNA, miRNA, etc.), CRISPR, or other methods that target the nucleic acids encoding specific TCRs (e.g., TCR-α and TCR-β) and/or CD3 chains in primary T cells. By blocking expression of one or more of these proteins, the T cell will no longer produce one or more of the key components of the TCR complex, thereby destabilizing the TCR complex and preventing cell surface expression of a functional TCR.

[0623] In some instances, CAR may also comprise a switch mechanism for controlling expression and/or activation of the CAR. For example, a CAR may comprise an extracellular, transmembrane, and intracellular domain, in which the extracellular domain comprises a target-specific binding element that comprises a label, binding domain, or tag that is specific for a molecule other than the target antigen that is expressed on or by a target cell. In such embodiments, the specificity of the CAR is provided by a second construct that comprises a target antigen binding domain (e.g., an scFv or a bispecific antibody that is specific for both the target antigen and the label or tag on the CAR) and a domain that is recognized by or binds to the label, binding domain, or tag on the CAR. See, e.g., WO 2013/044225, WO 2016/000304, WO 2015/057834, WO 2015/057852, WO 2016/070061, U.S. Pat. No. 9,233,125, US 2016/0129109. In this way, a T-cell that expresses the CAR can be administered to a subject, but the CAR cannot bind its target antigen until the second composition comprising an antigen-specific binding domain is administered.

[0624] Alternative switch mechanisms include CARs that require multimerization in order to activate their signaling function (see, e.g., US Patent Publication Nos. US 2015/0368342, US 2016/0175359, US 2015/0368360) and/or an exogenous signal, such as a small molecule drug (US 2016/0166613, Yung et al., Science, 2015), in order to elicit a T-cell response. Some CARs may also comprise a “suicide switch” to induce cell death of the CAR T-cells following treatment (Buddee et al., PLOS One, 2013) or to downregulate expression of the CAR following binding to the target antigen (International Patent Publication No. WO 2016/011210).

[0625] Alternative techniques may be used to transform target immunoresponsive cells, such as protoplast fusion, lipofection, transfection or electroporation. A wide variety of vectors may be used, such as retroviral vectors, lentiviral vectors, adenoviral vectors, adeno-associated viral vectors, plasmids, or transposons, such as a Sleeping Beauty transposon (see U.S. Pat. Nos. 6,489,458; 7,148,203; 7,160,682; 7,985,739; 8,227,432), may be used to introduce CARs, for example using 2nd generation antigen-specific CARs signaling through CD3ζ and either CD28 or CD137. Viral vectors may, for example, include vectors based on HIV, SV40, EBV, HSV or BPV.

[0626] Cells that are targeted for transformation may, for example, include T cells, Natural Killer (NK) cells, cytotoxic T lymphocytes (CTL), regulatory T cells, human embryonic stem cells, tumor-infiltrating lymphocytes (TIL) or a pluripotent stem cell from which lymphoid cells may be differentiated. T cells expressing a desired CAR may, for example, be selected through co-culture with γ-irradiated activating and propagating cells (AaPC), which co-express the cancer antigen and co-stimulatory molecules. The engineered CAR T-cells may be expanded, for example, by co-culture on AaPC in presence of soluble factors, such as IL-2 and IL-21. This expansion may for example be carried out so as to provide memory CAR+ T cells (which may, for example, be assayed by non-enzymatic digital array and/or multi-panel flow cytometry). In this way, CAR T cells may be provided that have specific cytotoxic activity against antigen-bearing tumors (optionally in conjunction with production of desired chemokines such as interferon-y). CAR T cells of this kind may, for example, be used in animal models, for example, to treat tumor xenografts.

[0627] In an embodiment, ACT includes co-transferring CD4+ Th1 cells and CD8+ CTLs to induce a synergistic antitumor response (see, e.g., Li et al., Adoptive cell therapy with CD4+ T helper 1 cells and CD8+ cytotoxic T cells enhances complete rejection of an established tumor, leading to generation of endogenous memory responses to non-targeted tumor epitopes. Clin Transl Immunology. 2017 October; 6 (10): e160).

[0628] In an embodiment, Th17 cells are transferred to a subject in need thereof. Th17 cells have been reported to directly eradicate melanoma tumors in mice to a greater extent than Th1 cells (Muranski P, et al., Tumor-specific Th17-polarized cells eradicate large established melanoma. Blood. 2008 Jul. 15; 112 (2): 362-73; and Martin-Orozco N, et al., T helper 17 cells promote cytotoxic T cell activation in tumor immunity. Immunity. 2009 Nov. 20; 31 (5): 787-98). Those studies involved an adoptive T cell transfer (ACT) therapy approach, which takes advantage of CD4+ T cells that express a TCR recognizing tyrosinase tumor antigen. Exploitation of the TCR leads to rapid expansion of Th17 populations to large numbers ex vivo for reinfusion into the autologous tumor-bearing hosts.

[0629] In an embodiment, ACT may include autologous iPSC-based vaccines, such as irradiated iPSCs in autologous anti-tumor vaccines (see e.g., Kooreman, Nigel G. et al., Autologous iPSC-Based Vaccines Elicit Anti-tumor Responses In Vivo, Cell Stem Cell 22, 1-13, 2018, doi.org/10.1016/j.stem. 2018.01.016).

[0630] Unlike T-cell receptors (TCRs) that are MHC restricted, CARs can potentially bind any cell surface-expressed antigen and can thus be more universally used to treat patients (see Irving et al., Engineering Chimeric Antigen Receptor T-Cells for Racing in Solid Tumors: Don't Forget the Fuel, Front. Immunol., 3 Apr. 2017, doi.org/10.3389/fimmu.2017.00267). In an embodiment, in the absence of endogenous T-cell infiltrate (e.g., due to aberrant antigen processing and presentation), which precludes the use of TIL therapy and immune checkpoint blockade, the transfer of CAR T-cells may be used to treat patients (see, e.g., Hinrichs C S, Rosenberg S A. Exploiting the curative potential of adoptive T-cell therapy for cancer. Immunol Rev (2014) 257 (1): 56-71. doi: 10.1111/imr.12132).

[0631] Approaches such as the foregoing may be adapted to provide methods of treating and/or increasing survival of a subject having a disease, such as a neoplasia, for example, by administering an effective amount of an immunoresponsive cell comprising an antigen recognizing receptor that binds a selected antigen, wherein the binding activates the immunoresponsive cell, thereby treating or preventing the disease (such as a neoplasia, a pathogen infection, an autoimmune disorder, or an allogeneic transplant reaction).

[0632] In an embodiment, the treatment can be administered after lymphodepleting pretreatment in the form of chemotherapy (typically a combination of cyclophosphamide and fludarabine) or radiation therapy. Initial studies in ACT had short lived responses and the transferred cells did not persist in vivo for very long (Houot et al., T-cell-based immunotherapy: adoptive cell transfer and checkpoint inhibition. Cancer Immunol Res (2015) 3 (10): 1115-22; and Kamta et al., Advancing Cancer Therapy with Present and Emerging Immuno-Oncology Approaches. Front. Oncol. (2017) 7:64). Immune suppressor cells like Tregs and MDSCs may attenuate the activity of transferred cells by outcompeting them for the necessary cytokines. Not being bound by a theory lymphodepleting pretreatment may eliminate the suppressor cells allowing the TILs to persist.

[0633] In one embodiment, the treatment can be administrated into patients undergoing an immunosuppressive treatment (e.g., glucocorticoid treatment). The cells, or population of cells, may be made resistant to at least one immunosuppressive agent due to the inactivation of a gene encoding a receptor for such immunosuppressive agent. In an embodiment, the immunosuppressive treatment provides for the selection and expansion of the immunoresponsive T cells within the patient.

[0634] In an embodiment, the treatment can be administered before primary treatment (e.g., surgery or radiation therapy) to shrink a tumor before the primary treatment. In another embodiment, the treatment can be administered after primary treatment to remove any remaining cancer cells.

[0635] In an embodiment, immunometabolic barriers can be targeted therapeutically prior to and/or during ACT to enhance responses to ACT or CAR T-cell therapy and to support endogenous immunity (see, e.g., Irving et al., Engineering Chimeric Antigen Receptor T-Cells for Racing in Solid Tumors: Don't Forget the Fuel, Front. Immunol., 3 Apr. 2017, doi.org/10.3389/fimmu.2017.00267).

[0636] The administration of cells or population of cells, such as immune system cells or cell populations, such as more particularly immunoresponsive cells or cell populations, as disclosed herein may be carried out in any convenient manner, including by aerosol inhalation, injection, ingestion, transfusion, implantation, or transplantation. The cells or population of cells may be administered to a patient subcutaneously, intradermally, intratumorally, intranodally, intramedullary, intramuscularly, intrathecally, by intravenous or intralymphatic injection, or intraperitoneally. In an embodiment, the disclosed CARs may be delivered or administered into a cavity formed by the resection of tumor tissue (i.e., intracavity delivery) or directly into a tumor prior to resection (i.e., tumoral delivery). In one embodiment, the cell compositions of the present invention are preferably administered by intravenous injection.

[0637] The administration of the cells or population of cells can consist of the administration of 104-109 cells per kg body weight, preferably 105 to 106 cells/kg body weight including all integer values of cell numbers within those ranges. Dosing in CAR T cell therapies may for example involve administration of from 106 to 109 cells/kg, with or without a course of lymphodepletion, for example with cyclophosphamide. The cells or population of cells can be administrated in one or more doses. In another embodiment, the effective amount of cells is administrated as a single dose. In another embodiment, the effective amount of cells is administrated as more than one dose over a period time. Timing of administration is within the judgment of managing physician and depends on the clinical condition of the patient. The cells or population of cells may be obtained from any source, such as a blood bank or a donor. While individual needs vary, determination of optimal ranges of effective amounts of a given cell type for a particular disease or conditions are within the skill of one in the art. An effective amount means an amount which provides a therapeutic or prophylactic benefit. The dosage administrated will be dependent upon the age, health and weight of the recipient, kind of concurrent treatment, if any, frequency of treatment and the nature of the effect desired.

[0638] In another embodiment, the effective amount of cells or composition comprising those cells are administrated parenterally. The administration can be an intravenous administration. The administration can be directly done by injection within a tumor.

[0639] To guard against possible adverse reactions, engineered immunoresponsive cells may be equipped with a transgenic safety switch, in the form of a transgene that renders the cells vulnerable to exposure to a specific signal. For example, the herpes simplex viral thymidine kinase (TK) gene may be used in this way, for example by introduction into allogeneic T lymphocytes used as donor lymphocyte infusions following stem cell transplantation (Greco, et al., Improving the safety of cell therapy with the TK-suicide gene. Front. Pharmacol. 2015; 6:95). In such cells, administration of a nucleoside prodrug such as ganciclovir or acyclovir causes cell death. Alternative safety switch constructs include inducible caspase 9, for example triggered by administration of a small-molecule dimerizer that brings together two nonfunctional icasp9 molecules to form the active enzyme. A wide variety of alternative approaches to implementing cellular proliferation controls have been described (see U.S. Patent Publication No. 20130071414; International Patent Publication WO 2011/146862; International Patent Publication WO 2014/011987; International Patent Publication WO 2013/040371; Zhou et al. BLOOD, 2014, 123/25:3895-3905; Di Stasi et al., The New England Journal of Medicine 2011; 365:1673-1683; Sadelain M, The New England Journal of Medicine 2011; 365:1735-173; Ramos et al., Stem Cells 28 (6): 1107-15 (2010)).

[0640] In a further refinement of adoptive therapies, genome editing may be used to tailor immunoresponsive cells to alternative implementations, for example providing edited CAR T cells (see Poirot et al., 2015, Multiplex genome edited T-cell manufacturing platform for “off-the-shelf” adoptive T-cell immunotherapies, Cancer Res 75 (18): 3853; Ren et al., 2017, Multiplex genome editing to generate universal CAR T cells resistant to PD1 inhibition, Clin Cancer Res. 2017 May 1; 23 (9): 2255-2266. doi: 10.1158/1078-0432.CCR-16-1300. Epub 2016 Nov. 4; Qasim et al., 2017, Molecular remission of infant B-ALL after infusion of universal TALEN gene-edited CAR T cells, Sci Transl Med. 2017 January 25; 9 (374); Legut, et al., 2018, CRISPR-mediated TCR replacement generates superior anticancer transgenic T cells. Blood, 131 (3), 311-322; and Georgiadis et al., Long Terminal Repeat CRISPR-CAR-Coupled “Universal” T Cells Mediate Potent Anti-leukemic Effects, Molecular Therapy, In Press, Corrected Proof, Available online 6 Mar. 2018). Cells may be edited using any CRISPR system and method of use thereof as described herein. The composition and systems may be delivered to an immune cell by any method described herein. In preferred embodiments, cells are edited ex vivo and transferred to a subject in need thereof. Immunoresponsive cells, CAR T cells or any cells used for adoptive cell transfer may be edited. Editing may be performed for example to insert or knock-in an exogenous gene, such as an exogenous gene encoding a CAR or a TCR, at a preselected locus in a cell (e.g., TRAC locus); to eliminate potential alloreactive T-cell receptors (TCR) or to prevent inappropriate pairing between endogenous and exogenous TCR chains, such as to knock-out or knock-down expression of an endogenous TCR in a cell; to disrupt the target of a chemotherapeutic agent in a cell; to block an immune checkpoint, such as to knock-out or knock-down expression of an immune checkpoint protein or receptor in a cell; to knock-out or knock-down expression of other gene or genes in a cell, the reduced expression or lack of expression of which can enhance the efficacy of adoptive therapies using the cell; to knock-out or knock-down expression of an endogenous gene in a cell, said endogenous gene encoding an antigen targeted by an exogenous CAR or TCR; to knock-out or knock-down expression of one or more MHC constituent proteins in a cell; to activate a T cell; to modulate cells such that the cells are resistant to exhaustion or dysfunction; and/or increase the differentiation and/or proliferation of functionally exhausted or dysfunctional CD8+ T-cells (see International Patent Publication Nos. WO 2013/176915, WO 2014/059173, WO 2014/172606, WO 2014/184744, and WO 2014/191128).

[0641] In an embodiment, editing may result in inactivation of a gene. By inactivating a gene it is intended that the gene of interest is not expressed in a functional protein form. In a particular embodiment, the system specifically catalyzes cleavage in one targeted gene thereby inactivating said targeted gene. The nucleic acid strand breaks caused are commonly repaired through the distinct mechanisms of homologous recombination or non-homologous end joining (NHEJ). However, NHEJ is an imperfect repair process that often results in changes to the DNA sequence at the site of the cleavage. Repair via non-homologous end joining (NHEJ) often results in small insertions or deletions (Indel) and can be used for the creation of specific gene knockouts. Cells in which a cleavage induced mutagenesis event has occurred can be identified and/or selected by well-known methods in the art. In an embodiment, homology directed repair (HDR) is used to concurrently inactivate a gene (e.g., TRAC) and insert an endogenous TCR or CAR into the inactivated locus.

[0642] Hence, in an embodiment, editing of cells, particularly cells intended for adoptive cell therapies, more particularly immunoresponsive cells such as T cells, may be performed to insert or knock-in an exogenous gene, such as an exogenous gene encoding a CAR or a TCR, at a preselected locus in a cell. Conventionally, nucleic acid molecules encoding CARs or TCRs are transfected or transduced to cells using randomly integrating vectors, which, depending on the site of integration, may lead to clonal expansion, oncogenic transformation, variegated transgene expression and/or transcriptional silencing of the transgene. Directing of transgene(s) to a specific locus in a cell can minimize or avoid such risks and advantageously provide for uniform expression of the transgene(s) by the cells. Without limitation, suitable ‘safe harbor’ loci for directed transgene integration include CCR5 or AAVS1. Homology-directed repair (HDR) strategies are known and described elsewhere in this specification allowing to insert transgenes into desired loci (e.g., TRAC locus).

[0643] Further suitable loci for insertion of transgenes, in particular CAR or exogenous TCR transgenes, include without limitation loci comprising genes coding for constituents of endogenous T-cell receptor, such as T-cell receptor alpha locus (TRA) or T-cell receptor beta locus (TRB), for example T-cell receptor alpha constant (TRAC) locus, T-cell receptor beta constant 1 (TRBC1) locus or T-cell receptor beta constant 2 (TRBC1) locus. Advantageously, insertion of a transgene into such locus can simultaneously achieve expression of the transgene, potentially controlled by the endogenous promoter, and knock-out expression of the endogenous TCR. This approach has been exemplified in Eyquem et al., (2017) Nature 543:113-117, wherein the authors used CRISPR/Cas9 gene editing to knock-in a DNA molecule encoding a CD19-specific CAR into the TRAC locus downstream of the endogenous promoter; the CAR-T cells obtained by CRISPR were significantly superior in terms of reduced tonic CAR signaling and exhaustion.

[0644] T cell receptors (TCR) are cell surface receptors that participate in the activation of T cells in response to the presentation of antigen. The TCR is generally made from two chains, a and B, which assemble to form a heterodimer and associates with the CD3-transducing subunits to form the T cell receptor complex present on the cell surface. Each a and B chain of the TCR consists of an immunoglobulin-like N-terminal variable (V) and constant (C) region, a hydrophobic transmembrane domain, and a short cytoplasmic region. As for immunoglobulin molecules, the variable region of the a and B chains are generated by V (D) J recombination, creating a large diversity of antigen specificities within the population of T cells. However, in contrast to immunoglobulins that recognize intact antigen, T cells are activated by processed peptide fragments in association with an MHC molecule, introducing an extra dimension to antigen recognition by T cells, known as MHC restriction. Recognition of MHC disparities between the donor and recipient through the T cell receptor leads to T cell proliferation and the potential development of graft versus host disease (GVHD). The inactivation of TCRα or TCRβ can result in the elimination of the TCR from the surface of T cells preventing recognition of alloantigen and thus GVHD. However, TCR disruption generally results in the elimination of the CD3 signaling component and alters the means of further T cell expansion.

[0645] Hence, in an embodiment, editing of cells, particularly cells intended for adoptive cell therapies, more particularly immunoresponsive cells such as T cells, may be performed to knock-out or knock-down expression of an endogenous TCR in a cell. For example, NHEJ-based or HDR-based gene editing approaches can be employed to disrupt the endogenous TCR alpha and/or beta chain genes. For example, gene editing system or systems, such as CRISPR/Cas system or systems, can be designed to target a sequence found within the TCR beta chain conserved between the beta 1 and beta 2 constant region genes (TRBC1 and TRBC2) and/or to target the constant region of the TCR alpha chain (TRAC) gene.

[0646] Allogeneic cells are rapidly rejected by the host immune system. It has been demonstrated that, allogeneic leukocytes present in non-irradiated blood products will persist for no more than 5 to 6 days (Boni, Muranski et al. 2008 Blood 1; 112 (12): 4746-54). Thus, to prevent rejection of allogeneic cells, the host's immune system usually has to be suppressed to some extent. However, in the case of adoptive cell transfer the use of immunosuppressive drugs also have a detrimental effect on the introduced therapeutic T cells. Therefore, to effectively use an adoptive immunotherapy approach in these conditions, the introduced cells would need to be resistant to the immunosuppressive treatment. Thus, in a particular embodiment, the present invention further comprises a step of modifying T cells to make them resistant to an immunosuppressive agent, preferably by inactivating at least one gene encoding a target for an immunosuppressive agent. An immunosuppressive agent is an agent that suppresses immune function by one of several mechanisms of action. An immunosuppressive agent can be, but is not limited to a calcineurin inhibitor, a target of rapamycin, an interleukin-2 receptor α-chain blocker, an inhibitor of inosine monophosphate dehydrogenase, an inhibitor of dihydrofolic acid reductase, a corticosteroid, or an immunosuppressive antimetabolite. The present invention allows conferring immunosuppressive resistance to T cells for immunotherapy by inactivating the target of the immunosuppressive agent in T cells. As non-limiting examples, targets for an immunosuppressive agent can be a receptor for an immunosuppressive agent such as: CD52, glucocorticoid receptor (GR), a FKBP family gene member and a cyclophilin family gene member.

[0647] In an embodiment, editing of cells, particularly cells intended for adoptive cell therapies, more particularly immunoresponsive cells such as T cells, may be performed to block an immune checkpoint, such as to knock-out or knock-down expression of an immune checkpoint protein or receptor in a cell. Immune checkpoints are inhibitory pathways that slow down or stop immune reactions and prevent excessive tissue damage from uncontrolled activity of immune cells. In an embodiment, the immune checkpoint targeted is the programmed death-1 (PD-1 or CD279) gene (PDCD1). In other embodiments, the immune checkpoint targeted is cytotoxic T-lymphocyte-associated antigen (CTLA-4). In additional embodiments, the immune checkpoint targeted is another member of the CD28 and CTLA4 Ig superfamily such as BTLA, LAG3, ICOS, PDL1 or KIR. In further additional embodiments, the immune checkpoint targeted is a member of the TNFR superfamily such as CD40, OX40, CD137, GITR, CD27 or TIM-3.

[0648] Additional immune checkpoints include Src homology 2 domain-containing protein tyrosine phosphatase 1 (SHP-1) (Watson H A, et al., SHP-1: the next checkpoint target for cancer immunotherapy? Biochem Soc Trans. 2016 April 15; 44 (2): 356-62). SHP-1 is a widely expressed inhibitory protein tyrosine phosphatase (PTP). In T-cells, it is a negative regulator of antigen-dependent activation and proliferation. It is a cytosolic protein, and therefore not amenable to antibody-mediated therapies, but its role in activation and proliferation makes it an attractive target for genetic manipulation in adoptive transfer strategies, such as chimeric antigen receptor (CAR) T cells. Immune checkpoints may also include T cell immunoreceptor with Ig and ITIM domains (TIGIT/Vstm3/WUCAM/VSIG9) and VISTA (Le Mercier I, et al., (2015) Beyond CTLA-4 and PD-1, the generation Z of negative checkpoint regulators. Front. Immunol. 6:418).

[0649] International Patent Publication No. WO 2014/172606 relates to the use of MTI and/or MT2 inhibitors to increase proliferation and/or activity of exhausted CD8+ T-cells and to decrease CD8+ T-cell exhaustion (e.g., decrease functionally exhausted or unresponsive CD8+ immune cells). In an embodiment, metallothioneins are targeted by gene editing in adoptively transferred T cells.

[0650] In an embodiment, targets of gene editing may be at least one targeted locus involved in the expression of an immune checkpoint protein. Such targets may include, but are not limited to CTLA4, PPP2CA, PPP2CB, PTPN6, PTPN22, PDCDI, ICOS (CD278), PDL1, KIR, LAG3, HAVCR2, BTLA, CD160, TIGIT, CD96, CRTAM, LAIRI, SIGLEC7, SIGLEC9, CD244 (2B4), TNFRSF10B, TNFRSF10A, CASP8, CASP10, CASP3, CASP6, CASP7, FADD, FAS, TGFBRII, TGFRBRI, SMAD2, SMAD3, SMAD4, SMAD10, SKI, SKIL, TGIF1, ILIORA, ILIORB, HMOX2, IL6R, IL6ST, EIF2AK4, CSK, PAGI, SITI, FOXP3, PRDMI, BATF, VISTA, GUCY1A2, GUCY1A3, GUCY1B2, GUCY1B3, MTI, MT2, CD40, OX40, CD137, GITR, CD27, SHP-1, TIM-3, CEACAM-1, CEACAM-3, or CEACAM-5. In preferred embodiments, the gene locus involved in the expression of PD-1 or CTLA-4 genes is targeted. In other preferred embodiments, combinations of genes are targeted, such as but not limited to PD-1 and TIGIT. By means of an example and without limitation, International Patent Publication No. WO 2016/196388 concerns an engineered T cell comprising (a) a genetically engineered antigen receptor that specifically binds to an antigen, which receptor may be a CAR; and (b) a disrupted gene encoding a PD-L1, an agent for disruption of a gene encoding a PD-L1, and/or disruption of a gene encoding PD-L1, wherein the disruption of the gene may be mediated by a gene editing nuclease, a zinc finger nuclease (ZFN), CRISPR/Cas9 and/or TALEN. WO2015142675 relates to immune effector cells comprising a CAR in combination with an agent (such as the composition or system herein) that increases the efficacy of the immune effector cells in the treatment of cancer, wherein the agent may inhibit an immune inhibitory molecule, such as PD1, PD-L1, CTLA-4, TIM-3, LAG-3, VISTA, BTLA, TIGIT, LAIRI, CD160, 2B4, TGFR beta, CEACAM-1, CEACAM-3, or CEACAM-5. Ren et al., (2017) Clin Cancer Res 23 (9) 2255-2266 performed lentiviral delivery of CAR and electro-transfer of Cas9 mRNA and gRNAs targeting endogenous TCR, β-2 microglobulin (B2M) and PDI simultaneously, to generate gene-disrupted allogeneic CAR T cells deficient of TCR, HLA class I molecule and PD1.

[0651] In an embodiment, cells may be engineered to express a CAR, wherein expression and/or function of methylcytosine dioxygenase genes (TET1, TET2 and/or TET3) in the cells has been reduced or eliminated, (such as the composition or system herein) (for example, as described in WO201704916).

[0652] In an embodiment, editing of cells, particularly cells intended for adoptive cell therapies, more particularly immunoresponsive cells such as T cells, may be performed to knock-out or knock-down expression of an endogenous gene in a cell, said endogenous gene encoding an antigen targeted by an exogenous CAR or TCR, thereby reducing the likelihood of targeting of the engineered cells. In an embodiment, the targeted antigen may be one or more antigen selected from the group consisting of CD38, CD138, CS-1, CD33, CD26, CD30, CD53, CD92, CD100, CD148, CD150, CD200, CD261, CD262, CD362, human telomerase reverse transcriptase (hTERT), survivin, mouse double minute 2 homolog (MDM2), cytochrome P450 1B1 (CYP1B), HER2/neu, Wilms' tumor gene 1 (WT1), livin, alphafetoprotein (AFP), carcinoembryonic antigen (CEA), mucin 16 (MUC16), MUCI, prostate-specific membrane antigen (PSMA), p53, cyclin (D1), B cell maturation antigen (BCMA), transmembrane activator and CAML Interactor (TACI), and B-cell activating factor receptor (BAFF-R) (for example, as described in International Patent Publication Nos. WO 2016/011210 and WO 2017/011804).

[0653] In an embodiment, editing of cells, particularly cells intended for adoptive cell therapies, more particularly immunoresponsive cells such as T cells, may be performed to knock-out or knock-down expression of one or more MHC constituent proteins, such as one or more HLA proteins and/or beta-2 microglobulin (B2M), in a cell, whereby rejection of non-autologous (e.g., allogeneic) cells by the recipient's immune system can be reduced or avoided. In preferred embodiments, one or more HLA class I proteins, such as HLA-A, B and/or C, and/or B2M may be knocked-out or knocked-down. Preferably, B2M may be knocked-out or knocked-down. By means of an example, Ren et al., (2017) Clin Cancer Res 23 (9) 2255-2266 performed lentiviral delivery of CAR and electro-transfer of Cas mRNA and gRNAs targeting endogenous TCR, β-2 microglobulin (B2M) and PD1 simultaneously, to generate gene-disrupted allogeneic CAR T cells deficient of TCR, HLA class I molecule and PD1.

[0654] In other embodiments, at least two genes are edited. Pairs of genes may include, but are not limited to PD1 and TCRa, PD1 and TCRB, CTLA-4 and TCRa, CTLA-4 and TCRB, LAG3 and TCRα, LAG3 and TCRβ, Tim3 and TCRα, Tim3 and TCRβ, BTLA and TCRα, BTLA and TCRβ, BY55 and TCRα, BY55 and TCRβ, TIGIT and TCRα, TIGIT and TCRβ, B7H5 and TCRα, B7H5 and TCRβ, LAIR1 and TCRα, LAIR1 and TCRβ, SIGLEC10 and TCRα, SIGLEC10 and TCRβ, 2B4 and TCRα, 2B4 and TCRβ, B2M and TCRα, B2M and TCRβ.

[0655] In an embodiment, a cell may be multiplied edited (multiplex genome editing) as taught herein to (1) knock-out or knock-down expression of an endogenous TCR (for example, TRBC1, TRBC2 and/or TRAC), (2) knock-out or knock-down expression of an immune checkpoint protein or receptor (for example PD1, PD-L1 and/or CTLA4); and (3) knock-out or knock-down expression of one or more MHC constituent proteins (for example, HLA-A, B and/or C, and/or B2M, preferably B2M).

[0656] Whether prior to or after genetic modification of the T cells, the T cells can be activated and expanded generally using methods as described, for example, in U.S. Pat. Nos. 6,352,694; 6,534,055; 6,905,680; 5,858,358; 6,887,466; 6,905,681; 7,144,575; 7,232,566; 7,175,843; 5,883,223; 6,905,874; 6,797,514; 6,867,041; and 7,572,631. T cells can be expanded in vitro or in vivo.

[0657] Immune cells may be obtained using any method known in the art. In one embodiment, allogenic T cells may be obtained from healthy subjects. In one embodiment T cells that have infiltrated a tumor are isolated. T cells may be removed during surgery. T cells may be isolated after removal of tumor tissue by biopsy. T cells may be isolated by any means known in the art. In one embodiment, T cells are obtained by apheresis. In one embodiment, the method may comprise obtaining a bulk population of T cells from a tumor sample by any suitable method known in the art. For example, a bulk population of T cells can be obtained from a tumor sample by dissociating the tumor sample into a cell suspension from which specific cell populations can be selected. Suitable methods of obtaining a bulk population of T cells may include, but are not limited to, any one or more of mechanically dissociating (e.g., mincing) the tumor, enzymatically dissociating (e.g., digesting) the tumor, and aspiration (e.g., as with a needle).

[0658] The bulk population of T cells obtained from a tumor sample may comprise any suitable type of T cell. Preferably, the bulk population of T cells obtained from a tumor sample comprises tumor infiltrating lymphocytes (TILs).

[0659] The tumor sample may be obtained from any mammal. Unless stated otherwise, as used herein, the term “mammal” refers to any mammal including, but not limited to, mammals of the order Logomorpha, such as rabbits; the order Carnivora, including Felines (cats) and Canines (dogs); the order Artiodactyla, including Bovines (cows) and Swines (pigs); or of the order Perssodactyla, including Equines (horses). The mammals may be non-human primates, e.g., of the order Primates, Ceboids, or Simoids (monkeys) or of the order Anthropoids (humans and apes). In an embodiment, the mammal may be a mammal of the order Rodentia, such as mice and hamsters. Preferably, the mammal is a non-human primate or a human. An especially preferred mammal is the human.

[0660] T cells can be obtained from a number of sources, including peripheral blood mononuclear cells (PBMC), bone marrow, lymph node tissue, spleen tissue, and tumors. In an embodiment of the present invention, T cells can be obtained from a unit of blood collected from a subject using any number of techniques known to the skilled artisan, such as Ficoll separation. In one preferred embodiment, cells from the circulating blood of an individual are obtained by apheresis or leukapheresis. The apheresis product typically contains lymphocytes, including T cells, monocytes, granulocytes, B cells, other nucleated white blood cells, red blood cells, and platelets. In one embodiment, the cells collected by apheresis may be washed to remove the plasma fraction and to place the cells in an appropriate buffer or media for subsequent processing steps. In one embodiment of the invention, the cells are washed with phosphate buffered saline (PBS). In an alternative embodiment, the wash solution lacks calcium and may lack magnesium or may lack many if not all divalent cations. Initial activation steps in the absence of calcium lead to magnified activation. As those of ordinary skill in the art would readily appreciate a washing step may be accomplished by methods known to those in the art, such as by using a semi-automated “flow-through” centrifuge (for example, the Cobe 2991 cell processor) according to the manufacturer's instructions. After washing, the cells may be resuspended in a variety of biocompatible buffers, such as, for example, Ca-free, Mg-free PBS. Alternatively, the undesirable components of the apheresis sample may be removed, and the cells directly resuspended in culture media.

[0661] In another embodiment, T cells are isolated from peripheral blood lymphocytes by lysing the red blood cells and depleting the monocytes, for example, by centrifugation through a PERCOLL™ gradient. A specific subpopulation of T cells, such as CD28+, CD4+, CDC, CD45RA+, and CD45RO+ T cells, can be further isolated by positive or negative selection techniques. For example, in one preferred embodiment, T cells are isolated by incubation with anti-CD3/anti-CD28 (i.e., 3×28)-conjugated beads, such as DYNABEADS® M-450 CD3/CD28 T, or XCYTE DYNABEADS™ for a time period sufficient for positive selection of the desired T cells. In one embodiment, the time period is about 30 minutes. In a further embodiment, the time period ranges from 30 minutes to 36 hours or longer and all integer values there between. In a further embodiment, the time period is at least 1, 2, 3, 4, 5, or 6 hours. In yet another preferred embodiment, the time period is 10 to 24 hours. In one preferred embodiment, the incubation time period is 24 hours. For isolation of T cells from patients with leukemia, use of longer incubation times, such as 24 hours, can increase cell yield. Longer incubation times may be used to isolate T cells in any situation where there are few T cells as compared to other cell types, such in isolating tumor infiltrating lymphocytes (TIL) from tumor tissue or from immunocompromised individuals. Further, use of longer incubation times can increase the efficiency of capture of CD8+ T cells.

[0662] Enrichment of a T cell population by negative selection can be accomplished with a combination of antibodies directed to surface markers unique to the negatively selected cells. A preferred method is cell sorting and/or selection via negative magnetic immunoadherence or flow cytometry that uses a cocktail of monoclonal antibodies directed to cell surface markers present on the cells negatively selected. For example, to enrich for CD4+ cells by negative selection, a monoclonal antibody cocktail typically includes antibodies to CD14, CD20, CD11b, CD16, HLA-DR, and CD8.

[0663] Further, monocyte populations (e.g., CD14+ cells) may be depleted from blood preparations by a variety of methodologies, including anti-CD14 coated beads or columns, or utilization of the phagocytotic activity of these cells to facilitate removal. Accordingly, in one embodiment, the invention uses paramagnetic particles of a size sufficient to be engulfed by phagocytotic monocytes. In an embodiment, the paramagnetic particles are commercially available beads, for example, those produced by Life Technologies under the trade name Dynabeads™. In one embodiment, other non-specific cells are removed by coating the paramagnetic particles with “irrelevant” proteins (e.g., serum proteins or antibodies). Irrelevant proteins and antibodies include those proteins and antibodies or fragments thereof that do not specifically target the T cells to be isolated. In an embodiment, the irrelevant beads include beads coated with sheep anti-mouse antibodies, goat anti-mouse antibodies, and human serum albumin.

[0664] In brief, such depletion of monocytes is performed by preincubating T cells isolated from whole blood, apheresed peripheral blood, or tumors with one or more varieties of irrelevant or non-antibody coupled paramagnetic particles at any amount that allows for removal of monocytes (approximately a 20:1 bead: cell ratio) for about 30 minutes to 2 hours at 22 to 37 degrees C., followed by magnetic removal of cells which have attached to or engulfed the paramagnetic particles. Such separation can be performed using standard methods available in the art. For example, any magnetic separation methodology may be used including a variety of which are commercially available, (e.g., DYNAL® Magnetic Particle Concentrator (DYNAL MPC®)). Assurance of requisite depletion can be monitored by a variety of methodologies known to those of ordinary skill in the art, including flow cytometric analysis of CD14 positive cells, before and after depletion.

[0665] For isolation of a desired population of cells by positive or negative selection, the concentration of cells and surface (e.g., particles such as beads) can be varied. In an embodiment, it may be desirable to significantly decrease the volume in which beads and cells are mixed together (i.e., increase the concentration of cells), to ensure maximum contact of cells and beads. For example, in one embodiment, a concentration of 2 billion cells/ml is used. In one embodiment, a concentration of 1 billion cells/ml is used. In a further embodiment, greater than 100 million cells/ml is used. In a further embodiment, a concentration of cells of 10, 15, 20, 25, 30, 35, 40, 45, or 50 million cells/ml is used. In yet another embodiment, a concentration of cells from 75, 80, 85, 90, 95, or 100 million cells/ml is used. In further embodiments, concentrations of 125 or 150 million cells/ml can be used. Using high concentrations can result in increased cell yield, cell activation, and cell expansion. Further, use of high cell concentrations allows more efficient capture of cells that may weakly express target antigens of interest, such as CD28-negative T cells, or from samples where there are many tumor cells present (i.e., leukemic blood, tumor tissue, etc). Such populations of cells may have therapeutic value and would be desirable to obtain. For example, using high concentration of cells allows more efficient selection of CD8+ T cells that normally have weaker CD28 expression.

[0666] In a related embodiment, it may be desirable to use lower concentrations of cells. By significantly diluting the mixture of T cells and surface (e.g., particles such as beads), interactions between the particles and cells are minimized. This selects for cells that express high amounts of desired antigens to be bound to the particles. For example, CD4+ T cells express higher levels of CD28 and are more efficiently captured than CD8+ T cells in dilute concentrations. In one embodiment, the concentration of cells used is 5×106/ml. In other embodiments, the concentration used can be from about 1×105/ml to 1×106/ml, and any integer value in between.

[0667] T cells can also be frozen. Wishing not to be bound by theory, the freeze and subsequent thaw step provides a more uniform product by removing granulocytes and to some extent monocytes in the cell population. After a washing step to remove plasma and platelets, the cells may be suspended in a freezing solution. While many freezing solutions and parameters are known in the art and will be useful in this context, one method involves using PBS containing 20% DMSO and 8% human serum albumin, or other suitable cell freezing media, the cells then are frozen to −80° C. at a rate of 1° per minute and stored in the vapor phase of a liquid nitrogen storage tank. Other methods of controlled freezing may be used as well as uncontrolled freezing immediately at −20° C. or in liquid nitrogen.

[0668] T cells for use in the present invention may also be antigen-specific T cells. For example, tumor-specific T cells can be used. In an embodiment, antigen-specific T cells can be isolated from a patient of interest, such as a patient afflicted with a cancer or an infectious disease. In one embodiment, neoepitopes are determined for a subject and T cells specific to these antigens are isolated. Antigen-specific cells for use in expansion may also be generated in vitro using any number of methods known in the art, for example, as described in U.S. Patent Publication No. U.S. Pat. No. 20,040,224,402 entitled, Generation and Isolation of Antigen-Specific T Cells, or in U.S. Pat. No. 6,040,177. Antigen-specific cells for use in the present invention may also be generated using any number of methods known in the art, for example, as described in Current Protocols in Immunology, or Current Protocols in Cell Biology, both published by John Wiley & Sons, Inc., Boston, Mass.

[0669] In a related embodiment, it may be desirable to sort or otherwise positively select (e.g., via magnetic selection) the antigen specific cells prior to or following one or two rounds of expansion. Sorting or positively selecting antigen-specific cells can be carried out using peptide-MHC tetramers (Altman, et al., Science. 1996 Oct. 4; 274 (5284): 94-6). In another embodiment, the adaptable tetramer technology approach is used (Andersen et al., 2012 Nat Protoc. 7:891-902). Tetramers are limited by the need to utilize predicted binding peptides based on prior hypotheses, and the restriction to specific HLAs. Peptide-MHC tetramers can be generated using techniques known in the art and can be made with any MHC molecule of interest and any antigen of interest as described herein. Specific epitopes to be used in this context can be identified using numerous assays known in the art. For example, the ability of a polypeptide to bind to MHC class I may be evaluated indirectly by monitoring the ability to promote incorporation of 1251 labeled β2-microglobulin (β2m) into MHC class I/β2m/peptide heterotrimeric complexes (see Parker et al., J. Immunol. 152:163, 1994).

[0670] In one embodiment, cells are directly labeled with an epitope-specific reagent for isolation by flow cytometry followed by characterization of phenotype and TCRs. In one embodiment, T cells are isolated by contacting with T cell specific antibodies. Sorting of antigen-specific T cells, or generally any cells of the present invention, can be carried out using any of a variety of commercially available cell sorters, including, but not limited to, MoFlo sorter (DakoCytomation, Fort Collins, Colo.), FACSAria™, FACSArray™, FACSVantage™, BD™ LSR II, and FACSCalibur™ (BD Biosciences, San Jose, Calif.).

[0671] In a preferred embodiment, the method comprises selecting cells that also express CD3. The method may comprise specifically selecting the cells in any suitable manner. Preferably, the selecting is carried out using flow cytometry. The flow cytometry may be carried out using any suitable method known in the art. The flow cytometry may employ any suitable antibodies and stains. Preferably, the antibody is chosen such that it specifically recognizes and binds to the particular biomarker being selected. For example, the specific selection of CD3, CD8, TIM-3, LAG-3, 4-1BB, or PD-1 may be carried out using anti-CD3, anti-CD8, anti-TIM-3, anti-LAG-3, anti-4-1BB, or anti-PD-1 antibodies, respectively. The antibody or antibodies may be conjugated to a bead (e.g., a magnetic bead) or to a fluorochrome. Preferably, the flow cytometry is fluorescence-activated cell sorting (FACS). TCRs expressed on T cells can be selected based on reactivity to autologous tumors. Additionally, T cells that are reactive to tumors can be selected for based on markers using the methods described in patent publication Nos. WO2014133567 and WO2014133568, herein incorporated by reference in their entirety. Additionally, activated T cells can be selected for based on surface expression of CD107a.

[0672] In one embodiment of the invention, the method further comprises expanding the numbers of T cells in the enriched cell population. Such methods are described in U.S. Pat. No. 8,637,307 and is herein incorporated by reference in its entirety. The numbers of T cells may be increased at least about 3-fold (or 4-, 5-, 6-, 7-, 8-, or 9-fold), more preferably at least about 10-fold (or 20-, 30-, 40-, 50-, 60-, 70-, 80-, or 90-fold), more preferably at least about 100-fold, more preferably at least about 1,000-fold, or most preferably at least about 100,000-fold. The numbers of T cells may be expanded using any suitable method known in the art. Exemplary methods of expanding the numbers of cells are described in patent publication No. WO 2003/057171, U.S. Pat. No. 8,034,334, and U.S. Patent Publication No. 2012/0244133, each of which is incorporated herein by reference.

[0673] In one embodiment, ex vivo T cell expansion can be performed by isolation of T cells and subsequent stimulation or activation followed by further expansion. In one embodiment of the invention, the T cells may be stimulated or activated by a single agent. In another embodiment, T cells are stimulated or activated with two agents, one that induces a primary signal and a second that is a co-stimulatory signal. Ligands useful for stimulating a single signal or stimulating a primary signal and an accessory molecule that stimulates a second signal may be used in soluble form. Ligands may be attached to the surface of a cell, to an Engineered Multivalent Signaling Platform (EMSP), or immobilized on a surface. In a preferred embodiment both primary and secondary agents are co-immobilized on a surface, for example a bead or a cell. In one embodiment, the molecule providing the primary activation signal may be a CD3 ligand, and the co-stimulatory molecule may be a CD28 ligand or 4-1BB ligand.

[0674] In an embodiment, T cells comprising a CAR or an exogenous TCR, may be manufactured as described in International Patent Publication No. WO 2015/120096, by a method comprising enriching a population of lymphocytes obtained from a donor subject; stimulating the population of lymphocytes with one or more T-cell stimulating agents to produce a population of activated T cells, wherein the stimulation is performed in a closed system using serum-free culture medium; transducing the population of activated T cells with a viral vector comprising a nucleic acid molecule which encodes the CAR or TCR, using a single cycle transduction to produce a population of transduced T cells, wherein the transduction is performed in a closed system using serum-free culture medium; and expanding the population of transduced T cells for a predetermined time to produce a population of engineered T cells, wherein the expansion is performed in a closed system using serum-free culture medium. In an embodiment, T cells comprising a CAR or an exogenous TCR, may be manufactured as described in WO 2015/120096, by a method comprising: obtaining a population of lymphocytes; stimulating the population of lymphocytes with one or more stimulating agents to produce a population of activated T cells, wherein the stimulation is performed in a closed system using serum-free culture medium; transducing the population of activated T cells with a viral vector comprising a nucleic acid molecule which encodes the CAR or TCR, using at least one cycle transduction to produce a population of transduced T cells, wherein the transduction is performed in a closed system using serum-free culture medium; and expanding the population of transduced T cells to produce a population of engineered T cells, wherein the expansion is performed in a closed system using serum-free culture medium. The predetermined time for expanding the population of transduced T cells may be 3 days. The time from enriching the population of lymphocytes to producing the engineered T cells may be 6 days. The closed system may be a closed bag system. Further provided is population of T cells comprising a CAR or an exogenous TCR obtainable or obtained by said method, and a pharmaceutical composition comprising such cells.

[0675] In an embodiment, T cell maturation or differentiation in vitro may be delayed or inhibited by the method as described in International Patent Publication No. WO 2017/070395, comprising contacting one or more T cells from a subject in need of a T cell therapy with an AKT inhibitor (such as, e.g., one or a combination of two or more AKT inhibitors disclosed in claim 8 of WO2017070395) and at least one of exogenous Interleukin-7 (IL-7) and exogenous Interleukin-15 (IL-15), wherein the resulting T cells exhibit delayed maturation or differentiation, and/or wherein the resulting T cells exhibit improved T cell function (such as, e.g., increased T cell proliferation; increased cytokine production; and/or increased cytolytic activity) relative to a T cell function of a T cell cultured in the absence of an AKT inhibitor.

[0676] In an embodiment, a patient in need of a T cell therapy may be conditioned by a method as described in International Patent Publication No. WO 2016/191756 comprising administering to the patient a dose of cyclophosphamide between 200 mg/m2/day and 2000 mg/m2/day and a dose of fludarabine between 20 mg/m2/day and 900 mg/m2/day.

### Diseases

Genetic Diseases and Diseases with a Genetic and/or Epigenetic Aspect

[0677] The compositions, systems, or components thereof can be used to treat and/or prevent a genetic disease or a disease with a genetic and/or epigenetic aspect. The genes and conditions exemplified herein are not exhaustive. In an embodiment, a method of treating and/or preventing a genetic disease can include administering a composition, system, and/or one or more components thereof to a subject, where the composition, system, and/or one or more components thereof is capable of modifying one or more copies of one or more genes associated with the genetic disease or a disease with a genetic and/or epigenetic aspect in one or more cells of the subject. In an embodiment, modifying one or more copies of one or more genes associated with a genetic disease or a disease with a genetic and/or epigenetic aspect in the subject can eliminate a genetic disease or a symptom thereof in the subject. In an embodiment, modifying one or more copies of one or more genes associated with a genetic disease or a disease with a genetic and/or epigenetic aspect in the subject can decrease the severity of a genetic disease or a symptom thereof in the subject. In an embodiment, the compositions, systems, or components thereof can modify one or more genes or polynucleotides associated with one or more diseases, including genetic diseases and/or those having a genetic aspect and/or epigenetic aspect, including but not limited to, any one or more set forth in Table 8. It will be appreciated that those diseases and associated genes listed herein are non-exhaustive and non-limiting. Further some genes play roles in the development of multiple diseases.

TABLE 8
Exemplary Genetic and Other Diseases and Associated Genes

| | Primary | | |
|---|---|---|---|
| | Tissues or | Additional | |
| | System | Tissues/Systems | |
| Disease Name | Affected | Affected | Genes |
| Achondroplasia | Bone and | | fibroblast growth factor receptor 3 |
| | Muscle | | (FGFR3) |
| Achromatopsia | eye | | CNGA3, CNGB3, GNAT2, PDE6C, |
| | | | PDE6H, ACHM2, ACHM3, |
| Acute Renal Injury | kidney | | NFkappaB, AATF, p85alpha, FAS, |
| | | | Apoptosis cascade elements (e.g., |
| | | | FASR, Caspase 2, 3, 4, 6, 7, 8, 9, 10, |
| | | | AKT, TNF alpha, IGF1, IGF1R, |
| | | | RIPK1), p53 |
| Age Related Macular | eye | | Abcr; CCL2; CC2; CP |
| Degeneration | | | (ceruloplasmin); Timp3; cathepsinD; |
| | | | VLDLR, CCR2 |
| AIDS | Immune System | | KIR3DL1, NKAT3, NKB1, AMB11, |
| | | | KIR3DS1, IFNG, CXCL12, SDF1 |
| Albinism (including | Skin, hair, eyes, | | TYR, OCA2, TYRP1, and SLC45A2, |
| oculocutaneous albinism (types | | | SLC24A5 and C10orf11 |
| 1-7) and ocular albinism) | | | |
| Alkaptonuria | Metabolism of | Tissues/organs | HGD |
| | amino acids | where | |
| | | homogentisic | |
| | | acid | |
| | | accumulates, | |
| | | particularly | |
| | | cartilage (joints), | |
| | | heart valves, | |
| | | kidneys | |
| alpha-1 antitrypsin deficiency | Lung | Liver, skin, | SERPINA1, those set forth in |
| (AATD or A1AD) | | vascular system, | WO2017165862, PiZ allele |
| | | kidneys, GI | |
| ALS | CNS | | SOD1; ALS2; ALS3; ALS5; ALS7; |
| | | | STEX; FUS; TARDBP; VEGF |
| | | | (VEGF-a, |
| | | | VEGF-b, VEGF-c); DPP6; NEFH, |
| | | | PTGS1, SLC1A2, TNFRSF10B, |
| | | | PRPH, HSP90AA1, CRIA2, IFNG, |
| | | | AMPA2 S100B, FGF2, AOX1, CS, |
| | | | TXN, RAPHJ1, MAP3K5, NBEAL1, |
| | | | GPX1, ICA1L, RAC1, MAPT, ITPR2, |
| | | | ALS2CR4, GLS, ALS2CR8, CNTFR, |
| | | | ALS2CR11, FOLH1, FAM117B, |
| | | | P4HB, CNTF, SQSTM1, STRADB, |
| | | | NAIP, NLR, YWHAQ, SLC33A1, |
| | | | TRAK2, SCA1, NIF3L1, NIF3, |
| | | | PARD3B, COX8A, CDK15, HECW1, |
| | | | HECT, C2, WW 15, NOS1, MET, |
| | | | SOD2, HSPB1, NEFL, CTSB, ANG, |
| | | | HSPA8, RNase A, VAPB, VAMP, |
| | | | SNCA, alpha HGF, CAT, ACTB, |
| | | | NEFM, TH, BCL2, FAS, CASP3, |
| | | | CLU, SMN1, G6PD, BAX, HSF1, |
| | | | RNF19A, JUN, ALS2CR12, HSPA5, |
| | | | MAPK14, APEX1, TXNRD1, NOS2, |
| | | | TIMP1, CASP9, XIAP, GLG1, EPO, |
| | | | VEGFA, ELN, GDNF, NFE2L2, |
| | | | SLC6A3, HSPA4, APOE, PSMB8, |
| | | | DCTN2, TIMP3, KIFAP3, SLC1A1, |
| | | | SMN2, CCNC, STUB1, ALS2, |
| | | | PRDX6, SYP, CABIN1, CASP1, |
| | | | GART, CDK5, ATXN3, RTN4, |
| | | | C1QB, VEGFC, HTT, PARK7, XDH, |
| | | | GFAP, MAP2, CYCS, FCGR3B, CCS, |
| | | | UBL5, MMP9m SLC18A3, TRPM7, |
| | | | HSPB2, AKT1, DEERL1, CCL2, |
| | | | NGRN, GSR, TPPP3, APAF1, |
| | | | BTBD10, GLUD1, CXCR4, S:C1A3, |
| | | | FLT1, PON1, AR, LIF, ERBB3, |
| | | | :GA:S1, CD44, TP53, TLR3, GRIA1, |
| | | | GAPDH, AMPA, GRIK1, DES, |
| | | | CHAT, FLT4, CHMP2B, BAG1, |
| | | | CRNA COMPONENT4, GSS, BAK1, |
| | | | KDR, GSTP1, OGG1, IL6 |
| Alzheimer's Disease | Brain | | E1; CHIP; UCH; UBB; Tau; LRP; |
| | | | PICALM; CLU; PS1; SORL1; CR1; |
| | | | VLDLR; UBA1; UBA3; CHIP28; |
| | | | AQP1; UCHL1; UCHL3; APP, AAA, |
| | | | CVAP, AD1, APOE, AD2, DCP1, |
| | | | ACE1, MPO, PACIP1, PAXIP1L, |
| | | | PTIP, A2M, BLMH, BMH, PSEN1, |
| | | | AD3, ALAS2, ABCA1, BIN1, BDNF, |
| | | | BTNL8, C1ORF49, CDH4, CHRNB2, |
| | | | CKLFSF2, CLEC4E, CR1L, CSF3R, |
| | | | CST3, CYP2C, DAPK1, ESR1, |
| | | | FCAR, FCGR3B, FFA2, FGA, GAB2, |
| | | | GALP, GAPDHS, GMPB, HP, HTR7, |
| | | | IDE, IF127, IFI6, IFIT2, IL1RN, IL- |
| | | | IRA, IL8RA, IL8RB, JAG1, KCNJ15, |
| | | | LRP6, MAPT, MARK4, MPHOSPH1, |
| | | | MTHFR, NBN, NCSTN, NIACR2, |
| | | | NMNAT3, NTM, ORM1, P2RY13, |
| | | | PBEF1, PCK1, PICALM, PLAU, |
| | | | PLXNC1, PRNP, PSEN1, PSEN2, |
| | | | PTPRA, RALGPS2, RGSL2, |
| | | | SELENBP1, SLC25A37, SORL1, |
| | | | Mitoferrin-1, TF, TFAM, TNF, |
| | | | TNFRSF10C, UBE1C |
| Amyloidosis | | | APOA1, APP, AAA, CVAP, AD1, |
| | | | GSN, FGA, LYZ, TTR, PALB |
| Amyloid neuropathy | | | TTR, PALB |
| Anemia | Blood | | CDAN1, CDA1, RPS19, DBA, PKLR, |
| | | | PK1, NT5C3, UMPH1, PSN1, RHAG, |
| | | | RH50A, NRAMP2, SPTB, ALAS2, |
| | | | ANH1, ASB, ABCB7, ABC7, ASAT |
| Angelman Syndrome | Nervous system, | | UBE3A |
| | brain | | |
| Attention Deficit Hyperactivity | Brain | | PTCHD1 |
| Disorder (ADHD) | | | |
| Autoimmune lymphoproliferative | Immune system | | TNFRSF6, APT1, FAS, CD95, |
| syndrome | | | ALPS1A |
| Autism, Autism spectrum | Brain | | PTCHD1; Mecp2; BZRAP1; MDGA2; |
| disorders (ASDs), including | | | Sema5A; Neurexin 1; GLO1, RTT, |
| Asperger's and a general | | | PPMX, MRX16, RX79, NLGN3, |
| diagnostic category called | | | NLGN4, KIAA1260, AUTSX2, |
| | | | FMR1, FMR2; FXR1; FXR2; |
| Pervasive Developmental | | | MGLUR5, ATP10C, CDH10, GRM6, |
| Disorders (PDDs) | | | MGLUR6, CDH9, CNTN4, NLGN2, |
| | | | CNTNAP2, SEMA5A, DHCR7, |
| | | | NLGN4X, NLGN4Y, DPP6, NLGN5, |
| | | | EN2, NRCAM, MDGA2, NRXN1, |
| | | | FMR2, AFF2, FOXP2, OR4M2, |
| | | | OXTR, FXR1, FXR2, PAH, |
| | | | GABRA1, PTEN, GABRA5, PTPRZ1, |
| | | | GABRB3, GABRG1, HIRIP3, |
| | | | SEZ6L2, HOXA1, SHANK3, IL6, |
| | | | SHBZRAP1, LAMB1, SLC6A4, |
| | | | SERT, MAPK3, TAS2R1, MAZ, |
| | | | TSC1, MDGA2, TSC2, MECP2, |
| | | | UBE3A, WNT2, See also |
| | | | 20110023145 |
| autosomal dominant polycystic | kidney | liver | PKD1, PKD2 |
| kidney disease (ADPKD) - | | | |
| (includes diseases such as von | | | |
| Hippel-Lindau disease and | | | |
| tuberous sclerosis complex | | | |
| disease) | | | |
| Autosomal Recessive Polycystic | kidney | liver | PKDH1 |
| Kidney Disease (ARPKD) | | | |
| Ataxia-Telangiectasia (a/k/a | Nervous system, | various | ATM |
| Louis Bar syndrome) | immune system | | |
| B-Cell Non-Hodgkin Lymphoma | | | BCL7A, BCL7 |
| Bardet-Biedl syndrome | Eye, | Liver, ear, | ARL6, BBS1, BBS2, BBS4, BBS5, |
| | musculoskeletal | gastrointestinal | BBS7, BBS9, BBS10, BBS12, |
| | system, kidney, | system, brain | CEP290, INPP5E, LZTFL1, MKKS, |
| | reproductive | | MKS1, SDCCAG8, TRIM32, TTC8 |
| | organs | | |
| Bare Lymphocyte Syndrome | blood | | TAPBP, TPSN, TAP2, ABCB3, PSF2, |
| | | | RING11, MHC2TA, C2TA, RFX5, |
| | | | RFXAP, RFX5 |
| Bartter's Syndrome (types I, II, | kidney | | SLC12A1 (type I), KCNJ1 (type II), |
| III, IVA and B, and V) | | | CLCNKB (type III), BSND (type IV |
| | | | A), or both the CLCNKA CLCNKB |
| | | | genes (type IV B), CASR (type V). |
| Becker muscular dystrophy | Muscle | | DMD, BMD, MYF6 |
| Best Disease (Vitelliform | eye | | VMD2 |
| Macular Dystrophy type 2) | | | |
| Bleeding Disorders | blood | | TBXA2R, P2RX1, P2X1 |
| Blue Cone Monochromacy | eye | | OPN1LW, OPN1MW, and LCR |
| Breast Cancer | Breast tissue | | BRCA1, BRCA2, COX-2 |
| Bruton's Disease (aka X-linked | Immune system, | | BTK |
| Agammaglobulinemia) | specifically B | | |
| | cells | | |
| Cancers (e.g., lymphoma, chronic | Various | | FAS, BID, CTLA4, PDCD1, CBLB, |
| lymphocytic leukemia (CLL), B | | | PTPN6, TRAC, TRBC, those |
| cell acute lymphocytic leukemia | | | described in WO2015048577 |
| (B-ALL), acute lymphoblastic | | | |
| leukemia, acute myeloid | | | |
| leukemia, non-Hodgkin's | | | |
| lymphoma (NHL), diffuse large | | | |
| cell lymphoma (DLCL), multiple | | | |
| myeloma, renal cell carcinoma | | | |
| (RCC), neuroblastoma, colorectal | | | |
| cancer, breast cancer, ovarian | | | |
| cancer, melanoma, sarcoma, | | | |
| prostate cancer, lung cancer, | | | |
| esophageal cancer, hepatocellular | | | |
| carcinoma, pancreatic cancer, | | | |
| astrocytoma, mesothelioma, head | | | |
| and neck cancer, and | | | |
| medulloblastoma | | | |
| Cardiovascular Diseases | heart | Vascular system | IL1B, XDH, TP53, PTGS, MB, IL4, |
| | | | ANGPT1, ABCGu8, CTSK, PTGIR, |
| | | | KCNJ11, INS, CRP, PDGFRB, |
| | | | CCNA2, PDGFB, KCNJ5, KCNN3, |
| | | | CAPN10, ADRA2B, ABCG5, |
| | | | PRDX2, CPAN5, PARP14, MEX3C, |
| | | | ACE, RNF, IL6, TNF, STN, |
| | | | SERPINE1, ALB, ADIPOQ, APOB, |
| | | | APOE, LEP, MTHFR, APOA1, |
| | | | EDN1, NPPB, NOS3, PPARG, PLAT, |
| | | | PTGS2, CETP, AGTR1, HMGCR, |
| | | | IGF1, SELE, REN, PPARA, PON1, |
| | | | KNG1, CCL2, LPL, VWF, F2, |
| | | | ICAM1, TGFB, NPPA, IL10, EPO, |
| | | | SOD1, VCAMI, IFNG, LPA, MPO, |
| | | | ESR1, MAPK, HP, F3, CST3, COG2, |
| | | | MMP9, SERPINC1, F8, HMOX1, |
| | | | APOC3, IL8, PROL1, CBS, NOS2, |
| | | | TLR4, SELP, ABCA1, AGT, LDLR, |
| | | | GPT, VEGFA, NR3C2, IL18, NOS1, |
| | | | NR3C1, FGB, HGF, IL1A, AKT1, |
| | | | LIPC, HSPD1, MAPK14, SPP1, |
| | | | ITGB3, CAT, UTS2, THBD, F10, CP, |
| | | | TNFRSF11B, EGFR, MMP2, PLG, |
| | | | NPY, RHOD, MAPK8, MYC, FN1, |
| | | | CMA1, PLAU, GNB3, ADRB2, |
| | | | SOD2, F5, VDR, ALOX5, HLA- |
| | | | DRB1, PARP1, CD40LG, PON2, |
| | | | AGER, IRS1, PTGS1, ECE1, F7, |
| | | | IRMN, EPHX2, IGFBP1, MAPK10, |
| | | | FAS, ABCB1, JUN, IGFBP3, CD14, |
| | | | PDE5A, AGTR2, CD40, LCAT, |
| | | | CCR5, MMP1, TIMP1, ADM, |
| | | | DYT10, STAT3, MMP3, ELN, USF1, |
| | | | CFH, HSPA4, MMP12, MME, F2R, |
| | | | SELL, CTSB, ANXA5, ADRB1, |
| | | | CYBA, FGA, GGT1, LIPG, HIF1A, |
| | | | CXCR4, PROC, SCARB1, CD79A, |
| | | | PLTP, ADD1, FGG, SAA1, KCNH2, |
| | | | DPP4, NPR1, VTN, KIAA0101, FOS, |
| | | | TLR2, PPIG, IL1R1, AR, CYP1A1, |
| | | | SERPINA1, MTR, RBP4, APOA4, |
| | | | CDKN2A, FGF2, EDNRB, ITGA2, |
| | | | VLA-2, CABIN1, SHBG, HMGB1, |
| | | | HSP90B2P, CYP3A4, GJA1, CAV1, |
| | | | ESR2, LTA, GDF15, BDNF, |
| | | | CYP2D6, NGF, SP1, TGIF1, SRC, |
| | | | EGF, PIK3CG, HLA-A, KCNQ1, |
| | | | CNR1, FBN1, CHKA, BEST1, |
| | | | CTNNB1, IL2, CD36, PRKAB1, TPO, |
| | | | ALDH7A1, CX3CR1, TH, F9, CH1, |
| | | | TF, HFE, IL17A, PTEN, GSTM1, |
| | | | DMD, GATA4, F13A1, TTR, FABP4, |
| | | | PON3, APOC1, INSR, TNFRSF1B, |
| | | | HTR2A, CSF3, CYP2C9, TXN, |
| | | | CYP11B2, PTH, CSF2, KDR, |
| | | | PLA2G2A, THBS1, GCG, RHOA, |
| | | | ALDH2, TCF7L2, NFE2L2, |
| | | | NOTCH1, UGT1A1, IFNA1, PPARD, |
| | | | SIRT1, GNHR1, PAPPA, ARR3, |
| | | | NPPC, AHSP, PTK2, IL13, MTOR, |
| | | | ITGB2, GSTT1, IL6ST, CPB2, |
| | | | CYP1A2, HNF4A, SLC64A, |
| | | | PLA2G6, TNFSF11, SLC8A1, F2RL1, |
| | | | AKR1A1, ALDH9A1, BGLAP, |
| | | | MTTP, MTRR, SULT1A3, RAGE, |
| | | | C4B, P2RY12, RNLS, CREB1, |
| | | | POMC, RAC1, LMNA, CD59, |
| | | | SCM5A, CYP1B1, MIF, MMP13, |
| | | | TIMP2, CYP19A1, CUP21A2, |
| | | | PTPN22, MYH14, MBL2, SELPLG, |
| | | | AOC3, CTSL1, PCNA, IGF2, ITGB1, |
| | | | CAST, CXCL12, IGHE, KCNE1, |
| | | | TFRC, COL1A1, COL1A2, IL2RB, |
| | | | PLA2G10, ANGPT2, PROCR, NOX4, |
| | | | HAMP, PTPN11, SLCA1, IL2RA, |
| | | | CCL5, IRF1, CF:AR, CA:CA, EIF4E, |
| | | | GSTP1, JAK2, CYP3A5, HSPG2, |
| | | | CCL3, MYD88, VIP, SOAT1, |
| | | | ADRBK1, NR4A2, MMP8, NPR2, |
| | | | GCH1, EPRS, PPARGC1A, F12, |
| | | | PECAM1, CCL4, CERPINA34, |
| | | | CASR, FABP2, TTF2, PROS1, CTF1, |
| | | | SGCB, YME1L1, CAMP, ZC3H12A, |
| | | | AKR1B1, MMP7, AHR, CSF1, |
| | | | HDAC9, CTGF, KCNMA1, UGT1A, |
| | | | PRKCA, COMT, S100B, EGR1, PRL, |
| | | | IL15, DRD4, CAMK2G, SLC22A2, |
| | | | CCL11, PGF, THPO, GP6, TACR1, |
| | | | NTS, HNF1A, SST, KCDN1, |
| | | | LOC646627, TBXAS1, CUP2J2, |
| | | | TBXA2R, ADH1C, ALOX12, AHSG, |
| | | | BHMT, GJA4, SLC25A4, ACLY, |
| | | | ALOX5AP, NUMA1, CYP27B1, |
| | | | CYSLTR2, SOD3, LTC4S, UCN, |
| | | | GHRL, APOC2, CLEC4A, |
| | | | KBTBD10, TNC, TYMS, SHC1, |
| | | | LRP1, SOCS3, ADH1B, KLK3, |
| | | | HSD11B1, VKORC1, SERPINB2, |
| | | | TNS1, RNF19A, EPOR, ITGAM, |
| | | | PITX2, MAPK7, FCGR3A, LEEPR, |
| | | | ENG, GPX1, GOT2, HRH1, NR112, |
| | | | CRH, HTR1A, VDAC1, HPSE, |
| | | | SFTPD, TAP2, RMF123, PTK2Bm |
| | | | NTRK2, IL6R, ACHE, GLP1R, GHR, |
| | | | GSR, NQO1, NR5A1, GJB2, |
| | | | SLC9A1, MAOA, PCSK9, FCGR2A, |
| | | | SERPINF1, EDN3, UCP2, TFAP2A, |
| | | | C4BPA, SERPINF2, TYMP, ALPP, |
| | | | CXCR2, SLC3A3, ABCG2, ADA, |
| | | | JAK3, HSPA1A, FASN, FGF1, F11, |
| | | | ATP7A, CR1, GFPA, ROCK1, |
| | | | MECP2, MYLK, BCHE, LIPE, |
| | | | ADORA1, WRN, CXCR3, CD81, |
| | | | SMAD7, LAMC2, MAP3K5, CHGA, |
| | | | IAPP, RHO, ENPP1, PTHLH, NRG1, |
| | | | VEGFC, ENPEP, CEBPB, NAGLU,. |
| | | | F2RL3, CX3CL1, BDKRB1, |
| | | | ADAMTS13, ELANE, ENPP2, CISH, |
| | | | GAST, MYOC, ATP1A2, NF1, GJB1, |
| | | | MEF2A, VCL, BMPR2, TUBB, |
| | | | CDC42, KRT18, HSF1, MYB, |
| | | | PRKAA2, ROCK2, TFP1, PRKG1, |
| | | | BMP2, CTNND1, CTH, CTSS, |
| | | | VAV2, NPY2R, IGFBP2, CD28, |
| | | | GSTA1, PPIA, APOH, S100A8, IL11, |
| | | | ALOX15, FBLN1, NR1H3, SCD, GIP, |
| | | | CHGB, PRKCB, SRD5A1, HSD11B2, |
| | | | CALCRL, GALNT2, ANGPTL4, |
| | | | KCNN4, PIK3C2A, HBEGF, |
| | | | CYP7A1, HLA-DRB5, BNIP3, |
| | | | GCKR, S100A12, PADI4, HSPA14, |
| | | | CXCR1, H19, KRTAP19-3, IDDM2, |
| | | | RAC2, YRY1, CLOCK, NGFR, DBH, |
| | | | CRNA COMPONENT4, CACNA1C, |
| | | | PRKAG2, CHAT, PTGDS, NR1H2, |
| | | | TEK, VEGFB, MEF2C, MAPKAPK2, |
| | | | TNFRSF11A, HSPA9, CYSLTR1, |
| | | | MAT1A, OPRL1, IMPA1, CLCN2, |
| | | | DLD, PSMA6, PSMB8, CHI3L1, |
| | | | ALDH1B1, PARP2, STAR, LBP, |
| | | | ABCC6, RGS2, EFNB2, GJB6, |
| | | | APOA2, AMPD1, DYSF, |
| | | | FDFT1, EMD2, CCR6, GJB3, IL1RL1, |
| | | | ENTPD1, BBS4, CELSR2, F11R, |
| | | | RAPGEF3, HYAL1, ZNF259, |
| | | | ATOX1, ATF6, KHK, SAT1, GGH, |
| | | | TIMP4, SLC4A4, PDE2A, PDE3B, |
| | | | FADS1, FADS2, TMSB4X, TXNIP, |
| | | | LIMS1, RHOB, LY96, FOXO1, |
| | | | PNPLA2, TRH, GJC1, S:C17A5, FTO, |
| | | | GJD2, PRSC1, CASP12, GPBAR1, |
| | | | PXK, IL33, TRIB1, PBX4, NUPR1, |
| | | | 15-SEP, CILP2, TERC, GGT2, |
| | | | MTCO1, UOX, AVP |
| Cataract | eye | | CRYAA, CRYA1, CRYBB2, CRYB2, |
| | | | PITX3, BFSP2, CP49, CP47, CRYAA, |
| | | | CRYA1, PAX6, AN2, MGDA, |
| | | | CRYBA1, CRYB1, CRYGC, CRYG3, |
| | | | CCL, LIM2, MP19, CRYGD, CRYG4, |
| | | | BFSP2, CP49, CP47, HSF4, CTM, |
| | | | HSF4, CTM, MIP, AQP0, CRYAB, |
| | | | CRYA2, CTPP2, CRYBB1, CRYGD, |
| | | | CRYG4, CRYBB2, CRYB2, CRYGC, |
| | | | CRYG3, CCL, CRYAA, CRYA1, |
| | | | GJA8, CX50, CAE1, GJA3, CX46, |
| | | | CZP3, CAE3, CCM1, CAM, KRIT1 |
| CDKL-5 Deficiencies or | Brain, CNS | | CDKL5 |
| Mediated Diseases | | | |
| Charcot-Marie-Tooth (CMT) | Nervous system | Muscles | PMP22 (CMT1A and E), MPZ |
| disease (Types 1, 2, 3, 4,) | | (dystrophy) | (CMT1B), LITAF (CMT1C), EGR2 |
| | | | (CMT1D), NEFL (CMT1F), GJB1 |
| | | | (CMT1X), MFN2 (CMT2A), KIF1B |
| | | | (CMT2A2B), RAB7A (CMT2B), |
| | | | TRPV4 (CMT2C), GARS (CMT2D), |
| | | | NEFL (CMT2E), GAPD1 (CMT2K), |
| | | | HSPB8 (CMT2L), DYNC1H1, |
| | | | CMT2O), LRSAM1 (CMT2P), |
| | | | IGHMBP2 (CMT2S), MORC2 |
| | | | (CMT2Z), GDAP1 (CMT4A), |
| | | | MTMR2 or SBF2/MTMR13 |
| | | | (CMT4B), SH3TC2 (CMT4C), |
| | | | NDRG1 (CMT4D), PRX (CMT4F), |
| | | | FIG4 (CMT4J), NT-3 |
| Chediak-Higashi Syndrome | Immune system | Skin, hair, eyes, | LYST |
| | | neurons | |
| Choroideremia | | | CHM, REP1, |
| Chorioretinal atrophy | eye | | PRDM13, RGR, TEAD1 |
| Chronic Granulomatous Disease | Immune system | | CYBA, CYBB, NCF1, NCF2, NCF4 |
| Chronic Mucocutaneous | Immune system | | AIRE, CARD9, CLEC7A IL12B, |
| Candidiasis | | | IL12B1, IL1F, IL17RA, IL17RC, |
| | | | RORC, STAT1, STAT3, TRAF31P2 |
| Cirrhosis | liver | | KRT18, KRT8, CIRH1A, NAIC, |
| | | | TEX292, KIAA1988 |
| Colon cancer (Familial | Gastrointestinal | | FAP: APC HNPCC: MSH2, |
| adenomatous polyposis (FAP) | | | MLH1, PMS2, SH6, PMS1 |
| and hereditary nonpolyposis | | | |
| colon cancer (HNPCC)) | | | |
| Combined Immunodeficiency | Immune System | | IL2RG, SCIDX1, SCIDX, IMD4); |
| | | | HIV-1 (CCL5, SCYA5, D17S136E, |
| | | | TCP228 |
| Cone(-rod) dystrophy | eye | | AIPL1, CRX, GUA1A, GUCY2D, |
| | | | PITPM3, PROM1, PRPH2, RIMS1, |
| | | | SEMA4A, ABCA4, ADAM9, ATF6, |
| | | | C21ORF2, C8ORF37, CACNA2D4, |
| | | | CDHR1, CERKL, CNGA3, CNGB3, |
| | | | CNNM4, CNAT2, IFT81, KCNV2, |
| | | | PDE6C, PDE6H, POC1B, RAX2, |
| | | | RDH5, RPGRIP1, TTLL5, RetCG1, |
| | | | GUCY2E |
| Congenital Stationary Night | eye | | CABP4, CACNA1F, CACNA2D4, |
| Blindness | | | GNAT1, CPR179, GRK1, GRM6, |
| | | | LRIT3, NYX, PDE6B, RDH5, RHO, |
| | | | RLBP1, RPE65, SAG, SLC24A1, |
| | | | TRPM1, |
| Congenital Fructose Intolerance | Metabolism | | ALDOB |
| Cori's Disease (Glycogen Storage | Various- | | AGL |
| Disease Type III) | wherever | | |
| | glycogen | | |
| | accumulates, | | |
| | particularly | | |
| | liver, heart, | | |
| | skeletal muscle | | |
| Corneal clouding and dystrophy | eye | | APOA1, TGFBI, CSD2, CDGG1, |
| | | | CSD, BIGH3, CDG2, TACSTD2, |
| | | | TROP2, M1S1, VSX1, RINX, PPCD, |
| | | | PPD, KTCN, COL8A2, FECD, |
| | | | PPCD2, PIP5K3, CFD |
| Cornea plana congenital | | | KERA, CNA2 |
| Cri du chat Syndrome, also | | | Deletions involving only band 5p15.2 |
| known as 5p syndrome and cat | | | to the entire short arm of chromosome |
| cry syndrome | | | 5, e.g., CTNND2, TERT, |
| Cystic Fibrosis (CF) | Lungs and | Pancreas, liver, | CTFR, ABCC7, CF, MRP7, SCNN1A, |
| | respiratory | digestive | those described in WO2015157070 |
| | system | system, | |
| | | reproductive | |
| | | system, | |
| | | exocrine, glands, | |
| Diabetic nephropathy | kidney | | Gremlin, 12/15- lipoxygenase, TIM44, |
| Dent Disease (Types 1 and 2) | Kidney | | Type 1: CLCN5, Type 2: ORCL |
| Dentatorubral-Pallidoluysian | CNS, brain, | | Atrophin-1 and Atn1 |
| Atrophy (DRPLA) (aka Haw | muscle | | |
| River and Naito-Oyanagi | | | |
| Disease) | | | |
| Down Syndrome | various | | Chromosome 21 trisomy |
| Drug Addiction | Brain | | Prkce; Drd2; Drd4; ABAT; GRIA2; |
| | | | Grm5; Grin1; Htr1b; Grin2a; Drd3; |
| | | | Pdyn; Gria1 |
| Duane syndrome (Types 1, 2, and | eye | | CHN1, indels on chromosomes 4 and 8 |
| 3, including subgroups A, B and | | | |
| C). Other names for this | | | |
| condition include Duane's | | | |
| Retraction Syndrome (or DR | | | |
| syndrome), Eye Retraction | | | |
| Syndrome, Retraction Syndrome, | | | |
| Congenital retraction syndrome | | | |
| and Stilling-Turk-Duane | | | |
| Syndrome | | | |
| Duchenne muscular dystrophy | muscle | Cardiovascular, | DMD, BMD, dystrophin gene, intron |
| (DMD) | | respiratory | flanking exon 51 of DMD gene, exon |
| | | | 51 mutations in DMD gene, See also |
| | | | WO2013163628 and US Pat. Pub. |
| | | | 20130145487 |
| Edward's Syndrome | | | Complete or partial trisomy of |
| (Trisomy 18) | | | chromosome 18 |
| Ehlers-Danlos Syndrome (Types | Various | | COL5A1, COL5A2, COL1A1, |
| I-VI) | depending on | | COL3A1, TNXB, PLOD1, COL1A2, |
| | type: including | | FKBP14 and ADAMTS2 |
| | musculoskeletal, | | |
| | eye, vasculature, | | |
| | immune, and | | |
| | skin | | |
| Emery-Dreifuss muscular | muscle | | LMNA, LMN1, EMD2, FPLD, |
| dystrophy | | | CMD1A, HGPS, LGMD1B, LMNA, |
| | | | LMN1, EMD2, FPLD, CMD1A |
| Enhanced S-Cone Syndrome | eye | | NR2E3, NRL |
| Fabry's Disease | Various - | | GLA |
| | including skin, | | |
| | eyes, and | | |
| | gastrointestinal | | |
| | system, kidney, | | |
| | heart, brain, | | |
| | nervous system | | |
| Facioscapulohumeral muscular | muscles | | FSHMD1A, FSHD1A, FRG1, |
| dystrophy | | | |
| Factor H and Factor H-like 1 | blood | | HF1, CFH, HUS |
| Factor V Leiden thrombophilia | blood | | Factor V (F5) |
| and Factor V deficiency | | | |
| Factor V and Factor VII | blood | | MCFD2 |
| deficiency | | | |
| Factor VII deficiency | blood | | F7 |
| Factor X deficiency | blood | | F10 |
| Factor XI deficiency | blood | | F11 |
| Factor XII deficiency | blood | | F12, HAF |
| Factor XIIIA deficiency | blood | | F13A1, F13A |
| Factor XIIIB deficiency | blood | | F13B |
| Familial Hypercholesterolemia | Cardiovascular | | APOB, LDLR, PCSK9 |
| | system | | |
| Familial Mediterranean Fever | Various- | Heart, kidney, | MEFV |
| (FMF) also called recurrent | organs/tissues | brain/CNS, | |
| polyserositis or familial | with serous or | reproductive | |
| paroxysmal polyserositis | synovial | organs | |
| | membranes, | | |
| | skin, joints | | |
| Fanconi Anemia | Various - blood | | FANCA, FACA, FA1, FA, FAA, |
| | (anemia), | | FAAP95, FAAP90, FLJ34064, |
| | immune system, | | FANCC, FANCG, RAD51, BRCA1, |
| | cognitive, | | BRCA2, BRIP1, BACH1, FANCJ, |
| | kidneys, eyes, | | FANCB, FANCD1, FANCD2, |
| | musculoskeletal | | FANCD, FAD, FANCE, FACE, |
| | | | FANCF, FANCI, ERCC4, FANCL, |
| | | | FANCM, PALB2, RAD51C, SLX4, |
| | | | UBE2T, FANCB, XRCC9, PHF9, |
| | | | KIAA1596 |
| Fanconi Syndrome Types I | kidneys | | FRTS1, GATM |
| (Childhood onset) and II (Adult | | | |
| Onset) | | | |
| Fragile X syndrome and related | brain | | FMR1, FMR2; FXR1; FXR2; |
| disorders | | | mGLUR5 |
| Fragile XE Mental Retardation | Brain, nervous | | FMR1 |
| (aka Martin Bell syndrome) | system | | |
| Friedreich Ataxia (FRDA) | Brain, nervous | heart | FXN/X25 |
| | system | | |
| Fuchs endothelial corneal | Eye | | TCF4; COL8A2 |
| dystrophy | | | |
| Galactosemia | Carbohydrate | Various-where | GALT, GALK1, and GALE |
| | metabolism | galactose | |
| | disorder | accumulates - | |
| | | liver, brain, eyes | |
| Gastrointestinal Epithelial | | | CISH |
| Cancer, GI cancer | | | |
| Gaucher Disease (Types 1, 2, and | Fat metabolism | Various-liver, | GBA |
| 3, as well as other unusual forms | disorder | spleen, blood, | |
| that may not fit into these types) | | CNS, skeletal | |
| | | system | |
| Griscelli syndrome | | | |
| Glaucoma | eye | | MYOC, TIGR, GLC1A, JOAG, |
| | | | GPOA, OPTN, GLC1E, FIP2, HYPL, |
| | | | NRP, CYP1B1, GLC3A, OPA1, NTG, |
| | | | NPG, CYP1B1, GLC3A, those |
| | | | described in WO2015153780 |
| Glomerulo sclerosis | kidney | | CC chemokine ligand 2 |
| Glycogen Storage Disease Types | Metabolism | | SLC2A2, GLUT2, G6PC, G6PT, |
| I-VI -See also Cori's Disease, | Diseases | | G6PT1, GAA, LAMP2, LAMPB, |
| Pompe's Disease, McArdle's | | | AGL, GDE, GBE1, GYS2, PYGL, |
| disease, Hers Disease, and Von | | | PFKM, See also Cori's Disease, |
| Gierke's disease | | | Pompe's Disease, McArdle's disease, |
| | | | Hers Disease, and Von Gierke's |
| | | | disease |
| RBC Glycolytic enzyme | blood | | any mutations in a gene for an enzyme |
| deficiency | | | in the glycolysis pathway including |
| | | | mutations in genes for hexokinases I |
| | | | and II, glucokinase, phosphoglucose |
| | | | isomerase, phosphofructokinase, |
| | | | aldolase Bm triosephosphate |
| | | | isomerease, glyceraldehydee-3- |
| | | | phosphate dehydrogenase, |
| | | | phosphoglycerokinase, |
| | | | phosphoglycerate mutase, enolase I, |
| | | | pyruvate kinase |
| Hartnup disease | Malabsorption | Various- brain, | SLC6A19 |
| | disease | gastrointestinal, | |
| | | skin. | |
| Hearing Loss | ear | | NOX3, Hes5, BDNF, |
| Hemochromatosis (HH) | Iron absorption | Various- | HFE and H63D |
| | regulation | wherever iron | |
| | disease | accumulates, | |
| | | liver, heart, | |
| | | pancreas, joints, | |
| | | pituitary gland | |
| Hemophagocytic | blood | | PRF1, HPLH2, UNC13D, MUNC13- |
| lymphohistiocytosis disorders | | | 4, HPLH3, HLH3, FHL3 |
| Hemorrhagic disorders | blood | | PI, ATT, F5 |
| Hers disease (Glycogen storage | liver | muscle | PYGL |
| disease Type VI) | | | |
| Hereditary angioedema (HAE) | | | kalikrein B1 |
| Hereditary Hemorrhagic | Skin and | | ACVRL1, ENG and SMAD4 |
| Telangiectasia (Osler-Weber- | mucous | | |
| Rendu Syndrome) | membranes | | |
| Hereditary Spherocytosis | blood | | NK1, EPB42, SLC4A1, SPTA1, and |
| | | | SPTB |
| Hereditary Persistence of Fetal | blood | | HBG1, HBG2, BCL11A, promoter |
| Hemoglobin | | | region of HBG 1 and/or 2 (in the |
| | | | CCAAT box) |
| Hemophilia (hemophilia A | blood | | A: FVIII, F8C, HEMA |
| (Classic) a B (aka Christmas | | | B: FVIX, HEMB |
| disease) and C) | | | C: F9, F11 |
| Hepatic adenoma | liver | | TCF1, HNF1A, MODY3 |
| Hepatic failure, early onset, and | liver | | SCOD1, SCO1 |
| neurologic disorder | | | |
| Hepatic lipase deficiency | liver | | LIPC |
| Hepatoblastoma, cancer and | liver | | CTNNB1, PDGFRL, PDGRL, PRLTS, |
| carcinomas | | | AXIN1, AXIN, CTNNB1, TP53, P53, |
| | | | LFS1, IGF2R, MPRI, MET, CASP8, |
| | | | MCH5 |
| Hermansky-Pudlak syndrome | Skin, eyes, | | HPS1, HPS3, HPS4, HPS5, HPS6, |
| | blood, lung, | | HPS7, DTNBP1, BLOC1, BLOC1S2, |
| | kidneys, | | BLOC3 |
| | intestine | | |
| HIV susceptibility or infection | Immune system | | IL10, CSIF, CMKBR2, CCR2, |
| | | | CMKBR5, CCCKR5 (CCR5), those in |
| | | | WO2015148670A1 |
| Holoprosencephaly (HPE) | brain | | ACVRL1, ENG, SMAD4 |
| (Alobar, Semilobar, and Lobar) | | | |
| Homocystinuria | Metabolic | Various- | CBS, MTHFR, MTR, MTRR, and |
| | disease | connective | MMADHC |
| | | tissue, muscles, | |
| | | CNS, | |
| | | cardiovascular | |
| | | system | |
| HPV | | | HPV16 and HPV18 E6/E7 |
| HSV1, HSV2, and related | eye | | HSV1 genes (immediate early and late |
| keratitis | | | HSV-1 genes (UL1, 1.5, 5, 6, 8, 9, 12, |
| | | | 15, 16, 18, 19, 22, 23, 26, 26.5, 27, 28, |
| | | | 29, 30, 31, 32, 33, 34, 35, 36, 37, 38, |
| | | | 42, 48, 49.5, 50, 52, 54, S6, RL2, RS1, |
| | | | those described in WO2015153789, |
| | | | WO2015153791 |
| Hunter's Syndrome (aka | Lysosomal | Various- liver, | IDS |
| Mucopolysaccharidosis type II) | storage disease | spleen, eye, | |
| | | joint, heart, | |
| | | brain, skeletal | |
| Huntington's disease (HD) and | Brain, nervous | | HD, HTT, IT15, PRNP, PRIP, JPH3, |
| HD-like disorders | system | | JP3, HDL2, TBP, SCA17, PRKCE; |
| | | | IGF1; EP300; RCOR1; PRKCZ; |
| | | | HDAC4; and TGM2, and those |
| | | | described in WO2013130824, |
| | | | WO2015089354 |
| Hurler's Syndrome (aka | Lysosomal | Various- liver, | IDUA, α-L-iduronidase |
| mucopolysaccharidosis type I H, | storage disease | spleen, eye, | |
| MPS IH) | | joint, heart, | |
| | | brain, skeletal | |
| Hurler-Scheie syndrome (aka | Lysosomal | Various- liver, | IDUA, α-L-iduronidase |
| mucopolysaccharidosis type I H- | storage disease | spleen, eye, | |
| S, MPS I H-S) | | joint, heart, | |
| | | brain, skeletal | |
| hyaluronidase deficiency (aka | Soft and | | HYAL1 |
| MPS IX) | connective | | |
| | tissues | | |
| Hyper IgM syndrome | Immune system | | CD40L |
| Hyper- tension caused renal | kidney | | Mineral corticoid receptor |
| damage | | | |
| Immunodeficiencies | Immune System | | CD3E, CD3G, AICDA, AID, HIGM2, |
| | | | TNFRSF5, CD40, UNG, DGU, |
| | | | HIGM4, TNFSF5, CD40LG, HIGM1, |
| | | | IGM, FOXP3, IPEX, AIID, XPID, |
| | | | PIDX, TNFRSF14B, TACI |
| Inborn errors of metabolism: | Metabolism | Various organs | See also: Carbohydrate metabolism |
| including urea cycle disorders, | diseases, liver | and cells | disorders (e.g., galactosemia), Amino |
| organic acidemias), fatty acid | | | acid Metabolism disorders (e.g., |
| oxidation defects, | | | phenylketonuria), Fatty acid |
| aminoacidopathies, carbohydrate | | | metabolism (e.g., MCAD deficiency), |
| disorders, mitochondrial | | | Urea Cycle disorders (e.g., |
| disorders | | | Citrullinemia), Organic acidemias |
| | | | (e.g., Maple Syrup Urine disease), |
| | | | Mitochondrial disorders (e.g., |
| | | | MIELAS), peroxisomal disorders (e.g., |
| | | | Zellweger syndrome) |
| Inflammation | Various | | IL-10; IL-1 (IL-1a; IL-1b); IL-13; IL- |
| | | | 17 (IL-17a (CTLA8); IL- |
| | | | 17b; IL-17c; IL-17d; IL-17f); II-23; |
| | | | Cx3cr1; ptpn22; TNFa; |
| | | | NOD2/CARD15 for IBD; IL-6; IL-12 |
| | | | (IL-12a; IL-12b); CTLA4; Cx3cl1 |
| Inflammatory Bowel Diseases | Gastrointestinal | Joints, skin | NOD2, IRGM, LRRK2, ATG5, |
| (e.g. Ulcerative Colitis and | | | ATG16L1, IRGM, GATM, ECM1, |
| Chron's Disease) | | | CDH1, LAMB1, HNF4A, GNA12, |
| | | | IL10, CARD9/15. CCR6, IL2RA, |
| | | | MST1, TNFSF15, REL, STAT3, |
| | | | IL23R, IL12B, FUT2 |
| Interstitial renal fibrosis | kidney | | TGF-β type II receptor |
| Job's Syndrome (aka Hyper IgE | Immune System | | STAT3, DOCK8 |
| Syndrome) | | | |
| Juvenile Retinoschisis | eve | | RS1, XLRS1 |
| Kabuki Syndrome 1 | | | MLL4, KMT2D |
| Kennedy Disease (aka | Muscles, brain, | | SBMA/SMAX1/AR |
| Spinobulbar Muscular Atrophy) | nervous system | | |
| Klinefelter syndrome | Various- | | Extra X chromosome in males |
| | particularly | | |
| | those involved | | |
| | in development | | |
| | of male | | |
| | characteristics | | |
| Lafora Disease | Brain, CNS | | EMP2A and EMP2B |
| Leber Congenital Amaurosis | eye | | CRB1, RP12, CORD2, CRD, CRX, |
| | | | IMPDH1, OTX2, AIPL1, CABP4, |
| | | | CCT2, CEP290, CLUAP1, CRB1, |
| | | | CRX, DTHD1, GDF6, GUCY2D, |
| | | | IFT140, IQCB1, KCNJ13, LCA5, |
| | | | LRAT, NMNAT1, PRPH2, RD3, |
| | | | RDH12, RPE65, RP20, RPGRIP1, |
| | | | SPATA7, TULP1, LCA1, LCA4, |
| | | | GUC2D, CORD6, LCA3, |
| Lesch-Nyhan Syndrome | Metabolism | Various - joints, | HPRT1 |
| | disease | cognitive, brain, | |
| | | nervous system | |
| Leukocyte deficiencies and | blood | | ITGB2, CD18, LCAMB, LAD, |
| disorders | | | EIF2B1, EIF2BA, EIF2B2, EIF2B3, |
| | | | EIF2B5, LVWM, CACH, CLE, |
| | | | EIF2B4 |
| Leukemia | Blood | | TAL1, TCL5, SCL, TAL2, FLT3, |
| | | | NBS1, NBS, ZNFN1A1, IK1, LYF1, |
| | | | HOXD4, HOX4B, BCR, CML, PHL, |
| | | | ALL, ARNT, KRAS2, RASK2, |
| | | | GMPS, AF10, ARHGEF12, LARG, |
| | | | KIAA0382, CALM, CLTH, CEBPA, |
| | | | CEBP, CHIC2, BTL, FLT3, KIT, |
| | | | PBT, LPP, NPM1, NUP214, D9S46E, |
| | | | CAN, CAIN, RUNX1, CBFA2, |
| | | | AML1, WHSC1L1, NSD3, FLT3, |
| | | | AF1Q, NPM1, NUMA1, ZNF145, |
| | | | PLZF, PML, MYL, STAT5B, AF10, |
| | | | CALM, CLTH, ARL11, ARLTS1, |
| | | | P2RX7, P2X7, BCR, CML, PHL, |
| | | | ALL, GRAF, NF1, VRNF, WSS, |
| | | | NFNS, PTPN11, PTP2C, SHP2, NS1, |
| | | | BCL2, CCND1, PRAD1, BCL1, |
| | | | TCRA, GATA1, GF1, ERYF1, NFE1, |
| | | | ABL1, NQO1, DIA4, NMOR1, |
| | | | NUP214, D9S46E, CAN, CAIN |
| Limb-girdle muscular dystrophy | muscle | | LGMD |
| diseases | | | |
| Lowe syndrome | brain, eyes, | | OCRL |
| | kidneys | | |
| Lupus glomerulonephritis | kidney | | MAPK1 |
| Machado- | Brain, CNS, | | ATX3 |
| Joseph's Disease (also known as | muscle | | |
| Spinocerebellar ataxia Type 3) | | | |
| Macular degeneration | eye | | ABC4, CBC1, CHM1, APOE, |
| | | | C1QTNF5, C2, C3, CCL2, CCR2, |
| | | | CD36, CFB, CFH, CFHR1, CFHR3, |
| | | | CNGB3, CP, CRP, CST3, CTSD, |
| | | | CX3CR1, ELOVL4, ERCC6, FBLN5, |
| | | | FBLN6, FSCN2, HMCN1, HTRA1, |
| | | | IL6, IL8, PLEKHA1, PROM1, |
| | | | PRPH2, RPGR, SERPING1, TCOF1, |
| | | | TIMP3, TLR3 |
| Macular Dystrophy | eye | | BEST1, C1QTNF5, CTNNA1, |
| | | | EFEMP1, ELOVL4, FSCN2, |
| | | | GUCAIB, HMCN1, IMPG1, OTX2, |
| | | | PRDM13, PROM1, PRPH2, RP1L1, |
| | | | TIMP3, ABCA4, CFH, DRAM2, |
| | | | IMG1, MFSD8, ADMD, STGD2, |
| | | | STGD3, RDS, RP7, PRPH, AVMD, |
| | | | AOFMD, VMD2 |
| Malattia Leventinese | eye | | EFEMP1, FBLN3 |
| Maple Syrup Urine Disease | Metabolism | | BCKDHA, BCKDHB, and DBT |
| | disease | | |
| Marfan syndrome | Connective | Musculoskeletal | FBN1 |
| | tissue | | |
| Maroteaux-Lamy Syndrome (aka | Musculoskeletal | Liver, spleen | ARSB |
| MPS VI) | system, nervous | | |
| | system | | |
| McArdle's Disease (Glycogen | Glycogen | muscle | PYGM |
| Storage Disease Type V) | storage disease | | |
| Medullary cystic kidney disease | kidney | | UMOD, HNFJ, FJHN, MCKD2, |
| | | | ADMCKD2 |
| Metachromatic leukodystrophy | Lysosomal | Nervous system | ARSA |
| | storage disease | | |
| Methylmalonic acidemia (MMA) | Metabolism | | MMAA, MMAB, MUT, MMACHC, |
| | disease | | MMADHC, LMBRD1 |
| Morquio Syndrome (aka MPS IV | Connective | heart | GALNS |
| A and B) | tissue, skin, | | |
| | bone, eyes | | |
| Mucopolysaccharidosis diseases | Lysosomal | | See also Hurler/Scheie syndrome, |
| (Types I H/S, I H, II, III A B and | storage disease - | | Hurler disease, Sanfillipo syndrome, |
| C, I S, IVA and B, IX, VII, and | affects various | | Scheie syndrome, Morquio syndrome, |
| VI) | organs/tissues | | hyaluronidase deficiency, Sly |
| | | | syndrome, and Maroteaux-Lamy |
| | | | syndrome |
| Muscular Atrophy | muscle | | VAPB, VAPC, ALS8, SMN1, SMA1, |
| | | | SMA2, SMA3, SMA4, BSCL2, |
| | | | SPG17, GARS, SMAD1, CMT2D, |
| | | | HEXB, IGHMBP2, SMUBP2, |
| | | | CATF1, SMARD1 |
| Muscular dystrophy | muscle | | FKRP, MDCIC, LGMD2I, LAMA2, |
| | | | LAMM, LARGE, KIAA0609, |
| | | | MDC1D, FCMD, TTID, MYOT, |
| | | | CAPN3, CANP3, DYSF, LGMD2B, |
| | | | SGCG, LGMD2C, DMDA1, SCG3, |
| | | | SGCA, ADL, DAG2, LGMD2D, |
| | | | DMDA2, SGCB, LGMD2E, SGCD, |
| | | | SGD, LGMD2F, CMD1L, TCAP, |
| | | | LGMD2G, CMD1N, TRIM32, HT2A, |
| | | | LGMD2H, FKRP, MDC1C, LGMD2I, |
| | | | TTN, CMD1G, TMD, LGMD2J, |
| | | | POMT1, CAV3, LGMD1C, SEPN1, |
| | | | SELN, RSMD1, PLEC1, PLTN, EBS1 |
| Myotonic dystrophy (Type 1 and | Muscles | Eyes, heart, | CNBP (Type 2) and DMPK (Type 1) |
| Type 2) | | endocrine | |
| Neoplasia | | | PTEN; ATM; ATR; EGFR; ERBB2; |
| | | | ERBB3; ERBB4; Notch1; Notch2; |
| | | | Notch3; Notch4; AKT; AKT2; AKT3; |
| | | | HIF; HIF1a; HIF3a; Met; HRG; Bcl2; |
| | | | PPAR alpha; PPAR gamma; WT1 |
| | | | (Wilms Tumor); FGF Receptor Family |
| | | | members (5 members: 1, 2, 3, 4, 5); |
| | | | CDKN2a; APC; RB (retinoblastoma); |
| | | | MEN1; VHL; BRCA1; BRCA2; AR |
| | | | (Androgen Receptor); TSG101; IGF; |
| | | | IGF Receptor; Igf1 (4 variants); Igf2 (3 |
| | | | variants); Igf 1 Receptor; Igf 2 |
| | | | Receptor; Bax; Bc12; caspases family |
| | | | (9 members: 1, 2, 3, 4, 6, 7, 8, 9, 12); |
| | | | Kras; Apc |
| Neurofibromatosis (NF) (NF1, | brain, spinal | | NF1, NF2 |
| formerly Recklinghausen's NF, | cord, nerves, | | |
| and NF2) | and skin | | |
| Niemann-Pick Lipidosis (Types | Lysosomal | Various- where | Types A and B: SMPD1; Type C: |
| A, B, and C) | Storage Disease | sphingomyelin | NPC1 or NPC2 |
| | | accumulates, | |
| | | particularly | |
| | | spleen, liver, | |
| | | blood, CNS | |
| Noonan Syndrome | Various - | | PTPN11, SOS1, RAF1 and KRAS |
| | musculoskeletal, | | |
| | heart, eyes, | | |
| | reproductive | | |
| | organs, blood | | |
| Norrie Disease or X-linked | eye | | NDP |
| Familial Exudative | | | |
| Vitreoretinopathy | | | |
| North Carolina Macular | eye | | MCDR1 |
| Dystrophy | | | |
| Osteogenesis imperfecta (OI) | bones, | | COL1A1, COL1A2, CRTAP, P3H |
| (Types I, II, III, IV, V, VI, VII) | musculoskeletal | | |
| Osteopetrosis | bones | | LRP5, BMND1, LRP7, LR3, OPPG, |
| | | | VBCH2, CLCN7, CLC7, OPTA2, |
| | | | OSTM1, GL, TCIRG1, TIRC7, |
| | | | OC116, OPTB1 |
| Patau's Syndrome | Brain, heart, | | Additional copy of chromosome 13 |
| (Trisomy 13) | skeletal system | | |
| Parkinson's disease (PD) | Brain, nervous | | SNCA (PARK1), UCHL1 (PARK 5), |
| | system | | and LRRK2 (PARK8), (PARK3), |
| | | | PARK2, PARK4, PARK7 (PARK7), |
| | | | PINK1 (PARK6); x-Synuclein, DJ-1, |
| | | | Parkin, NR4A2, NURR1, NOT, |
| | | | TINUR, SNCAIP, TBP, SCA17, |
| | | | NCAP, PRKN, PDJ, DBH, NDUFV2 |
| Pattern Dystrophy of the RPE | eye | | RDS/peripherin |
| Phenylketonuria (PKU) | Metabolism | Various due to | PAH, PKU1, QDPR, DHPR, PTS |
| | disorder | build-up of | |
| | | phenylalanine, | |
| | | phenyl ketones | |
| | | in tissues and | |
| | | CNS | |
| Polycystic kidney and hepatic | Kidney, liver | | FCYT, PKHD1, ARPKD, PKD1, |
| disease | | | PKD2, PKD4, PKDTS, PRKCSH, |
| | | | G19P1, PCLD, SEC63 |
| Pompe Disease | Glycogen | Various - heart, | GAA |
| | storage disease | liver, spleen | |
| Porphyria (actually refers to a | Various- | | ALAD, ALAS2, CPOX, FECH, |
| group of different diseases all | wherever heme | | HMBS, PPOX, UROD, or UROS |
| having a specific heme | precursors | | |
| production process abnormality) | accumulate | | |
| posterior polymorphous corneal | eyes | | TCF4; COL8A2 |
| dystrophy | | | |
| Primary Hyperoxaluria (e.g. type | Various - eyes, | | LDHA (lactate dehydrogenase A) and |
| 1) | heart, kidneys, | | hydroxyacid oxidase 1 (HAO1) |
| | skeletal system | | |
| Primary Open Angle Glaucoma | eyes | | MYOC |
| (POAG) | | | |
| Primary sclerosing cholangitis | Liver, | | TCF4; COL8A2 |
| | gallbladder | | |
| Progeria (also called Hutchinson- | All | | LMNA |
| Gilford progeria syndrome) | | | |
| Prader-Willi Syndrome | Musculoskeletal | | Deletion of region of short arm of |
| | system, brain, | | chromosome 15, including UBE3A |
| | reproductive | | |
| | and endocrine | | |
| | system | | |
| Prostate Cancer | prostate | | HOXB13, MSMB, GPRC6A, TP53 |
| Pyruvate Dehydrogenase | Brain, nervous | | PDHA1 |
| Deficiency | system | | |
| Kidney/Renal carcinoma | kidney | | RLIP76, VEGF |
| Rett Syndrome | Brain | | MECP2, RTT, PPMX, MRX16, |
| | | | MRX79, CDKL5, STK9, MECP2, |
| | | | RTT, PPMX, MRX16, MRX79, x- |
| | | | Synuclein, DJ-1 |
| Retinitis pigmentosa (RP) | eye | | ADIPOR1, ABCA4, AGBL5, |
| | | | ARHGEF18, ARL2BP, ARL3, ARL6, |
| | | | BEST1, BBS1, BBS2, C2ORF71, |
| | | | C8ORF37, CA4, CERKL, CLRN1, |
| | | | CNGA1, CMGB1, CRB1, CRX, |
| | | | CYP4V2, DHDDS, DHX38, EMC1, |
| | | | EYS, FAM161A, FSCN2, GPR125, |
| | | | GUCAIB, HK1, HPRPF3, HGSNAT, |
| | | | IDH3B, IMPDH1, IMPG2, IFT140, |
| | | | IFT172, KLHL7, KIAA1549, KIZ, |
| | | | LRAT, MAK, MERTK, MVK, NEK2, |
| | | | NUROD1, NR2E3, NRL, OFD1, |
| | | | PDE6A, PDE6B, PDE6G, POMGNT1, |
| | | | PRCD, PROMI, PRPF3, PRPF4, |
| | | | PRPF6, PRPF8, PRPF31, PRPH2, |
| | | | RPB3, RDH12, REEP6, RP39, RGR, |
| | | | RHO, RLBP1, ROM1, RP1, RP1L1, |
| | | | RPY, RP2, RP9, RPE65, RPGR, |
| | | | SAMD11, SAG, SEMA4A, SLC7A14, |
| | | | SNRNP200, SPP2, SPATA7, TRNT1, |
| | | | TOPORS, TTC8, TULP1, USH2A, |
| | | | ZFN408, ZNF513, See also |
| | | | 20120204282 |
| Scheie syndrome (also known as | Various- liver, | | IDUA, α-L-iduronidase |
| mucopolysaccharidosis type I | spleen, eye, | | |
| S(MPS I-S)) | joint, heart, | | |
| | brain, skeletal | | |
| Schizophrenia | Brain | | Neuregulin1 (Nrg1); Erb4 (receptor for |
| | | | Neuregulin); Complexin1 (Cplx1); |
| | | | Tph1 Tryptophan hydroxylase; Tph2 |
| | | | Tryptophan hydroxylase 2; Neurexin |
| | | | 1; GSK3; GSK3a; GSK3b; 5-HTT |
| | | | (Slc6a4); COMT; DRD (Drd1a); |
| | | | SLC6A3; DAOA; DTNBP1; Dao |
| | | | (Dao1); TCF4; COL8A2 |
| Secretase Related Disorders | Various | | APH-1 (alpha and beta); PSEN1; |
| | | | NCSTN; PEN-2; Nos1, Parp1, Nat1, |
| | | | Nat2, CTSB, APP, APHIB, PSEN2, |
| | | | PSENEN, BACE1, ITM2B, CTSD, |
| | | | NOTCH1, TNF, INS, DYT10, |
| | | | ADAM17, APOE, ACE, STN, TP53, |
| | | | IL6, NGFR, IL1B, ACHE, CTNNB1, |
| | | | IGF1, IFNG, NRG1, CASP3, MAPK1, |
| | | | CDH1, APBB1, HMGCR, CREB1, |
| | | | PTGS2, HES1, CAT, TGFB1, ENO2, |
| | | | ERBB4, TRAPPC10, MAOB, NGF, |
| | | | MMP12, JAG1, CD40LG, PPARG, |
| | | | FGF2, LRP1, NOTCH4, MAPK8, |
| | | | PREP, NOTCH3, PRNP, CTSG, EGF, |
| | | | REN, CD44, SELP, GHR, ADCYAP1, |
| | | | INSR, GFAP, MMP3, MAPK10, SP1, |
| | | | MYC, CTSE, PPARA, JUN, TIMP1, |
| | | | IL5, IL1A, MMP9, HTR4, HSPG2, |
| | | | KRAS, CYCS, SMG1, IL1R1, |
| | | | PROK1, MAPK3, NTRK1, IL13, |
| | | | MME, TKT, CXCR2, CHRM1, |
| | | | ATXN1, PAWR, NOTCJ2, M6PR, |
| | | | CYP46A1, CSNK1D, MAPK14, |
| | | | PRG2, PRKCA, L1 CAM, CD40, |
| | | | NR1I2, JAG2, CTNND1, CMA1, |
| | | | SORT1, DLK1, THEM4, JUP, CD46, |
| | | | CCL11, CAV3, RNASE3, HSPA8, |
| | | | CASP9, CYP3A4, CCR3, TFAP2A, |
| | | | SCP2, CDK4, JOF1A, TCF7L2, |
| | | | B3GALTL, MDM2, RELA, CASP7, |
| | | | IDE, FANP4, CASK, ADCYAP1R1, |
| | | | ATF4, PDGFA, C21ORF33, SCG5, |
| | | | RMF123, NKFB1, ERBB2, CAV1, |
| | | | MMP7, TGFA, RXRA, STX1A, |
| | | | PSMC4, P2RY2, TNFRSF21, DLG1, |
| | | | NUMBL, SPN, PLSCR1, UBQLN2, |
| | | | UBQLN1, PCSK7, SPON1, SILV, |
| | | | QPCT, HESS, GCC1 |
| Selective IgA Deficiency | Immune system | | Type 1: MSH5; Type 2: TNFRSF13B |
| Severe Combined | Immune system | | JAK3, JAKL, DCLRE1C, ARTEMIS, |
| Immunodeficiency (SCID) and | | | SCIDA, RAG1, RAG2, ADA, PTPRC, |
| SCID-X1, and ADA-SCID | | | CD45, LCA, IL7R, CD3D, T3D, |
| | | | IL2RG, SCIDX1, SCIDX, IMD4, |
| | | | those identified in US Pat. App. Pub. |
| | | | 20110225664, 20110091441, |
| | | | 20100229252, 20090271881 and |
| | | | 20090222937; |
| Sickle cell disease | blood | | HBB, BCL11A, BCL11Ae, cis- |
| | | | regulatory elements of the B-globin |
| | | | locus, HBG 1/2 promoter, HBG distal |
| | | | CCAAT box region between −92 |
| | | | and −130 of the HBG Transcription |
| | | | Start Site, those described in |
| | | | WO2015148863, WO 2013/126794, |
| | | | US Pat. Pub. 20110182867 |
| Sly Syndrome (aka MPS VII) | | | GUSB |
| Spinocerebellar Ataxias (SCA | | | ATXN1, ATXN2, ATX3 |
| types 1, 2, 3, 6, 7, 8, 12 and 17) | | | |
| Sorsby Fundus Dystrophy | eye | | TIMP3 |
| Stargardt disease | eye | | ABCR, ELOVL4, ABCA4, PROM1 |
| Tay-Sachs Disease | Lysosomal | Various - CNS, | HEX-A |
| | Storage disease | brain, eye | |
| Thalassemia (Alpha, Beta, Delta) | blood | | HBA1, HBA2 (Alpha), HBB (Beta), |
| | | | HBB and HBD (delta), LCRB, |
| | | | BCL11A, BCL11Ae, cis-regulatory |
| | | | elements of the B-globin locus, HBG |
| | | | 1/2 promoter, those described in |
| | | | WO2015148860, US Pat. Pub. |
| | | | 20110182867, 2015/148860 |
| Thymic Aplasia (DiGeorge | Immune system, | | deletion of 30 to 40 genes in the |
| Syndrome; 22q11.2 deletion | thymus | | middle of chromosome 22 at |
| syndrome) | | | a location known as 22q11.2, including |
| | | | TBX1, DGCR8 |
| Transthyretin amyloidosis | liver | | TTR (transthyretin) |
| (ATTR) | | | |
| Trimethylaminuria | Metabolism | | FMO3 |
| | disease | | |
| Trinucleotide Repeat Disorders | Various | | HTT; SBMA/SMAX1/AR; FXN/X25 |
| (generally) | | | ATX3; ATXN1; ATXN2; DMPK; |
| | | | Atrophin-1 and Atn1 (DRPLA Dx); |
| | | | CBP (Creb-BP - global instability); |
| | | | VLDLR; Atxn7; Atxn10; FEN1, |
| | | | TNRC6A, PABPN1, JPH3, MED15, |
| | | | ATXN1, ATXN3, TBP, CACNA1A, |
| | | | ATXN80S, PPP2R2B, ATXN7, |
| | | | TNRC6B, TNRC6C, CELF3, |
| | | | MAB21L1, MSH2, TMEM185A, |
| | | | SIX5, CNPY3, RAXE, GNB2, RPL14, |
| | | | ATXN8, ISR, TTR, EP400, GIGYF2, |
| | | | OGG1, STC1, CNDP1, C10ORF2, |
| | | | MAML3, DKC1, PAXIP1, CASK, |
| | | | MAPT, SP1, POLG, AFF2, THBS1, |
| | | | TP53, ESR1, CGGBP1, ABT1, KLK3, |
| | | | PRNP, JUN, KCNN3, BAX, FRAXA, |
| | | | KBTBD10, MBNL1, RAD51, |
| | | | NCOA3, ERDA1, TSC1, COMP, |
| | | | GGLC, RRAD, MSH3, DRD2, CD44, |
| | | | CTCF, CCND1, CLSPN, MEF2A, |
| | | | PTPRU, GAPDH, TRIM22, WT1, |
| | | | AHR, GPX1, TPMT, NDP, ARX, |
| | | | TYR, EGR1, UNG, NUMBL, FABP2, |
| | | | EN2, CRYGC, SRP14, CRYGB, |
| | | | PDCD1, HOXA1, ATXN2L, PMS2, |
| | | | GLA, CBL, FTH1, IL12RB2, OTX2, |
| | | | HOXA5, POLG2, DLX2, AHRR, |
| | | | MANF, RMEM158, See also |
| | | | 20110016540 |
| Turner's Syndrome (XO) | Various - | | Monosomy X |
| | reproductive | | |
| | organs, and sex | | |
| | characteristics, | | |
| | vasculature | | |
| Tuberous Sclerosis | CNS, heart, | | TSC1, TSC2 |
| | kidneys | | |
| Usher syndrome (Types I, II, and | Ears, eyes | | ABHD12, CDH23, CIB2, CLRN1, |
| III) | | | DFNB31, GPR98, HARS, MYO7A, |
| | | | PCDH15, USH1C, USH1G, USH2A, |
| | | | USH11A, those described in |
| | | | WO2015134812A1 |
| Velocardiofacial syndrome (aka | Various - | | Many genes are deleted, COM, TBX1, |
| 22q11.2 deletion syndrome, | skeletal, heart, | | and other are associated with |
| DiGeorge syndrome, conotruncal | kidney, immune | | symptoms |
| anomaly face syndrome (CTAF), | system, brain | | |
| autosomal dominant Opitz G/BB | | | |
| syndrome or Cayler Cardiofacial | | | |
| Syndrome) | | | |
| Von Gierke's Disease (Glycogen | Glycogen | Various - liver, | G6PC and SLC37A4 |
| Storage Disease type I) | Storage disease | kidney | |
| Von Hippel-Lindau Syndrome | Various - cell | CNS, Kidney, | VHL |
| | growth | Eye, visceral | |
| | regulation | organs | |
| | disorder | | |
| Von Willebrand Disease (Types | blood | | VWF |
| I, II and III) | | | |
| Wilson Disease | Various - | Liver, brains, | ATP7B |
| | Copper Storage | eyes, other | |
| | Disease | tissues where | |
| | | copper builds up | |
| Wiskott-Aldrich Syndrome | Immune System | | WAS |
| Xeroderma Pigmentosum | Skin | Nervous system | POLH |
| XXX Syndrome | Endocrine, brain | | X chromosome trisomy |

[0678] In an embodiment, the compositions, systems, or components thereof can be used treat or prevent a disease in a subject by modifying one or more genes associated with one or more cellular functions, such as any one or more of those in Table 9. In an embodiment, the disease is a genetic disease or disorder. In some of embodiments, the composition, system, or component thereof can modify one or more genes or polynucleotides associated with one or more genetic diseases such as any set forth in Table 9.

TABLE 9
Exemplary Genes controlling Cellular Functions

| CELLULAR FUNCTION | GENES |
|---|---|
| PI3K/AKT Signaling | PRKCE; ITGAM; ITGA5; IRAK1; PRKAA2; EIF2AK2; PTEN; EIF4E; |
| | PRKCZ; GRK6; MAPK1; TSC1; PLK1; AKT2; IKBKB; PIK3CA; CDK8; |
| | CDKN1B; NFKB2; BCL2; PIK3CB; PPP2R1A; MAPK8; BCL2L1; MAPK3; |
| | TSC2; ITGA1; KRAS; EIF4EBP1; RELA; PRKCD; NOS3; PRKAA1; |
| | MAPK9; CDK2; PPP2CA; PIM1; ITGB7; YWHAZ; ILK; TP53; RAF1; |
| | IKBKG; RELB; DYRK1A; CDKN1A; ITGB1; MAP2K2; JAK1; AKT1; JAK2; |
| | PIK3R1; CHUK; PDPK1; PPP2R5C; CTNNB1; MAP2K1; NFKB1; PAK3; |
| | ITGB3; CCND1; GSK3A; FRAP1; SFN; ITGA2; TTK; CSNK1A1; BRAF; |
| | GSK3B; AKT3; FOXO1; SGK; HSP90AA1; RPS6KB1 |
| ERK/MAPK Signaling | PRKCE; ITGAM; ITGA5; HSPB1; IRAK1; PRKAA2; |
| | EIF2AK2; RAC1; RAP1A; TLN1; EIF4E; ELK1; GRK6; |
| | MAPK1; RAC2; PLK1; AKT2; PIK3CA; CDK8; CREB1; |
| | PRKCI; PTK2; FOS; RPS6KA4; PIK3CB; PPP2R1A; |
| | PIK3C3; MAPK8; MAPK3; ITGA1; ETS1; KRAS; MYCN; |
| | EIF4EBP1; PPARG; PRKCD; PRKAA1; MAPK9; SRC; |
| | CDK2; PPP2CA; PIM1; PIK3C2A; ITGB7; YWHAZ; |
| | PPP1CC; KSR1; PXN; RAF1; FYN; DYRK1A; ITGB1; |
| | MAP2K2; PAK4; PIK3R1; STAT3; PPP2R5C; MAP2K1; |
| | PAK3; ITGB3; ESR1; ITGA2; MYC; TTK; CSNK1A1; |
| | CRKL; BRAF; ATF4; PRKCA; SRF; STAT1; SGK |
| Glucocorticoid Receptor | RAC1; TAF4B; EP300; SMAD2; TRAF6; PCAF; ELK1; |
| Signaling | MAPK1; SMAD3; AKT2; IKBKB; NCOR2; UBE2I; |
| | PIK3CA; CREB1; FOS; HSPA5; NFKB2; BCL2; |
| | MAP3K14; STAT5B; PIK3CB; PIK3C3; MAPK8; BCL2L1; |
| | MAPK3; TSC22D3; MAPK10; NRIP1; KRAS; MAPK13; |
| | RELA; STAT5A; MAPK9; NOS2A; PBX1; NR3C1; |
| | PIK3C2A; CDKN1C; TRAF2; SERPINE1; NCOA3; |
| | MAPK14; TNF; RAF1; IKBKG; MAP3K7; CREBBP; |
| | CDKN1A; MAP2K2; JAK1; IL8; NCOA2; AKT1; JAK2; |
| | PIK3R1; CHUK; STAT3; MAP2K1; NFKB1; TGFBR1; |
| | ESR1; SMAD4; CEBPB; JUN; AR; AKT3; CCL2; MMP1; |
| | STAT1; IL6; HSP90AA1 |
| Axonal Guidance Signaling | PRKCE; ITGAM; ROCK1; ITGA5; CXCR4; ADAM12; |
| | IGF1; RAC1; RAP1A; EIF4E; PRKCZ; NRP1; NTRK2; |
| | ARHGEF7; SMO; ROCK2; MAPK1; PGF; RAC2; |
| | PTPN11; GNAS; AKT2; PIK3CA; ERBB2; PRKCI; PTK2; |
| | CFL1; GNAQ; PIK3CB; CXCL12; PIK3C3; WNT11; |
| | PRKD1; GNB2L1; ABL1; MAPK3; ITGA1; KRAS; RHOA; |
| | PRKCD; PIK3C2A; ITGB7; GLI2; PXN; VASP; RAF1; |
| | FYN; ITGB1; MAP2K2; PAK4; ADAM17; AKT1; PIK3R1; |
| | GLI1; WNT5A; ADAM10; MAP2K1; PAK3; ITGB3; |
| | CDC42; VEGFA; ITGA2; EPHA8; CRKL; RND1; GSK3B; |
| | AKT3; PRKCA |
| Ephrin Receptor Signaling | PRKCE; ITGAM; ROCK1; ITGA5; CXCR4; IRAK1; |
| Actin Cytoskeleton | PRKAA2; EIF2AK2; RAC1; RAP1A; GRK6; ROCK2; |
| Signaling | MAPK1; PGF; RAC2; PTPN11; GNAS; PLK1; AKT2; |
| | DOK1; CDK8; CREB1; PTK2; CFL1; GNAQ; MAP3K14; |
| | CXCL12; MAPK8; GNB2L1; ABL1; MAPK3; ITGA1; |
| | KRAS; RHOA; PRKCD; PRKAA1; MAPK9; SRC; CDK2; |
| | PIM1; ITGB7; PXN; RAF1; FYN; DYRK1A; ITGB1; |
| | MAP2K2; PAK4; AKT1; JAK2; STAT3; ADAM10; |
| | MAP2K1; PAK3; ITGB3; CDC42; VEGFA; ITGA2; |
| | EPHA8; TTK; CSNK1A1; CRKL; BRAF; PTPN13; ATF4; |
| | AKT3; SGK |
| | ACTN4; PRKCE; ITGAM; ROCK1; ITGA5; IRAK1; |
| | PRKAA2; EIF2AK2; RAC1; INS; ARHGEF7; GRK6; |
| | ROCK2; MAPK1; RAC2; PLK1; AKT2; PIK3CA; CDK8; |
| | PTK2; CFL1; PIK3CB; MYH9; DIAPH1; PIK3C3; MAPK8; |
| | F2R; MAPK3; SLC9A1; ITGA1; KRAS; RHOA; PRKCD; |
| | PRKAA1; MAPK9; CDK2; PIM1; PIK3C2A; ITGB7; |
| | PPP1CC; PXN; VIL2; RAF1; GSN; DYRK1A; ITGB1; |
| | MAP2K2; PAK4; PIP5K1A; PIK3R1; MAP2K1; PAK3; |
| | ITGB3; CDC42; APC; ITGA2; TTK; CSNK1A1; CRKL; |
| | BRAF; VAV3; SGK |
| Huntington's Disease | PRKCE; IGF1; EP300; RCOR1; PRKCZ; HDAC4; TGM2; |
| Signaling | MAPK1; CAPNS1; AKT2; EGFR; NCOR2; SP1; CAPN2; |
| | PIK3CA; HDAC5; CREB1; PRKCI; HSPA5; REST; |
| | GNAQ; PIK3CB; PIK3C3; MAPK8; IGF1R; PRKD1; |
| | GNB2L1; BCL2L1; CAPN1; MAPK3; CASP8; HDAC2; |
| | HDAC7A; PRKCD; HDAC11; MAPK9; HDAC9; PIK3C2A; |
| | HDAC3; TP53; CASP9; CREBBP; AKT1; PIK3R1; |
| | PDPK1; CASP1; APAF1; FRAP1; CASP2; JUN; BAX; |
| | ATF4; AKT3; PRKCA; CLTC; SGK; HDAC6; CASP3 |
| Apoptosis Signaling | PRKCE; ROCK1; BID; IRAK1; PRKAA2; EIF2AK2; BAK1; |
| | BIRC4; GRK6; MAPK1; CAPNS1; PLK1; AKT2; IKBKB; |
| | CAPN2; CDK8; FAS; NFKB2; BCL2; MAP3K14; MAPK8; |
| | BCL2L1; CAPN1; MAPK3; CASP8; KRAS; RELA; |
| | PRKCD; PRKAA1; MAPK9; CDK2; PIM1; TP53; TNF; |
| | RAF1; IKBKG; RELB; CASP9; DYRK1A; MAP2K2; |
| | CHUK; APAF1; MAP2K1; NFKB1; PAK3; LMNA; CASP2; |
| | BIRC2; TTK; CSNK1A1; BRAF; BAX; PRKCA; SGK; |
| | CASP3; BIRC3; PARP1 |
| B Cell Receptor Signaling | RAC1; PTEN; LYN; ELK1; MAPK1; RAC2; PTPN11; |
| | AKT2; IKBKB; PIK3CA; CREB1; SYK; NFKB2; CAMK2A; |
| | MAP3K14; PIK3CB; PIK3C3; MAPK8; BCL2L1; ABL1; |
| | MAPK3; ETS1; KRAS; MAPK13; RELA; PTPN6; MAPK9; |
| | EGR1; PIK3C2A; BTK; MAPK14; RAF1; IKBKG; RELB; |
| | MAP3K7; MAP2K2; AKT1; PIK3R1; CHUK; MAP2K1; |
| | NFKB1; CDC42; GSK3A; FRAP1; BCL6; BCL10; JUN; |
| | GSK3B; ATF4; AKT3; VAV3; RPS6KB1 |
| Leukocyte Extravasation | ACTN4; CD44; PRKCE; ITGAM; ROCK1; CXCR4; CYBA; |
| Signaling | RAC1; RAP1A; PRKCZ; ROCK2; RAC2; PTPN11; |
| | MMP14; PIK3CA; PRKCI; PTK2; PIK3CB; CXCL12; |
| | PIK3C3; MAPK8; PRKD1; ABL1; MAPK10; CYBB; |
| | MAPK13; RHOA; PRKCD; MAPK9; SRC; PIK3C2A; BTK; |
| | MAPK14; NOX1; PXN; VIL2; VASP; ITGB1; MAP2K2; |
| | CTNND1; PIK3R1; CTNNB1; CLDN1; CDC42; F11R; ITK; |
| | CRKL; VAV3; CTTN; PRKCA; MMP1; MMP9 |
| Integrin Signaling | ACTN4; ITGAM; ROCK1; ITGA5; RAC1; PTEN; RAP1A; |
| | TLN1; ARHGEF7; MAPK1; RAC2; CAPNS1; AKT2; |
| | CAPN2; PIK3CA; PTK2; PIK3CB; PIK3C3; MAPK8; |
| | CAV1; CAPN1; ABL1; MAPK3; ITGA1; KRAS; RHOA; |
| | SRC; PIK3C2A; ITGB7; PPP1CC; ILK; PXN; VASP; |
| | RAF1; FYN; ITGB1; MAP2K2; PAK4; AKT1; PIK3R1; |
| | TNK2; MAP2K1; PAK3; ITGB3; CDC42; RND3; ITGA2; |
| | CRKL; BRAF; GSK3B; AKT3 |
| Acute Phase Response | IRAK1; SOD2; MYD88; TRAF6; ELK1; MAPK1; PTPN11; |
| Signaling | AKT2; IKBKB; PIK3CA; FOS; NFKB2; MAP3K14; |
| | PIK3CB; MAPK8; RIPK1; MAPK3; IL6ST; KRAS; |
| | MAPK13; IL6R; RELA; SOCS1; MAPK9; FTL; NR3C1; |
| | TRAF2; SERPINE1; MAPK14; TNF; RAF1; PDK1; |
| | IKBKG; RELB; MAP3K7; MAP2K2; AKT1; JAK2; PIK3R1; |
| | CHUK; STAT3; MAP2K1; NFKB1; FRAP1; CEBPB; JUN; |
| | AKT3; IL1R1; IL6 |
| PTEN Signaling | ITGAM; ITGA5; RAC1; PTEN; PRKCZ; BCL2L11; |
| | MAPK1; RAC2; AKT2; EGFR; IKBKB; CBL; PIK3CA; |
| | CDKN1B; PTK2; NFKB2; BCL2; PIK3CB; BCL2L1; |
| | MAPK3; ITGA1; KRAS; ITGB7; ILK; PDGFRB; INSR; |
| | RAF1; IKBKG; CASP9; CDKN1A; ITGB1; MAP2K2; |
| | AKT1; PIK3R1; CHUK; PDGFRA; PDPK1; MAP2K1; |
| | NFKB1; ITGB3; CDC42; CCND1; GSK3A; ITGA2; |
| | GSK3B; AKT3; FOXO1; CASP3; RPS6KB1 |
| p53 Signaling | PTEN; EP300; BBC3; PCAF; FASN; BRCA1; GADD45A; |
| Aryl Hydrocarbon Receptor | BIRC5; AKT2; PIK3CA; CHEK1; TP53INP1; BCL2; |
| | PIK3CB; PIK3C3; MAPK8; THBS1; ATR; BCL2L1; E2F1; |
| | PMAIP1; CHEK2; TNFRSF10B; TP73; RB1; HDAC9; |
| | CDK2; PIK3C2A; MAPK14; TP53; LRDD; CDKN1A; |
| | HIPK2; AKT1; PIK3R1; RRM2B; APAF1; CTNNB1; |
| | SIRT1; CCND1; PRKDC; ATM; SFN; CDKN2A; JUN; |
| | SNAI2; GSK3B; BAX; AKT3 |
| Signaling | HSPB1; EP300; FASN; TGM2; RXRA; MAPK1; NQO1; |
| | NCOR2; SP1; ARNT; CDKN1B; FOS; CHEK1; |
| | SMARCA4; NFKB2; MAPK8; ALDH1A1; ATR; E2F1; |
| | MAPK3; NRIP1; CHEK2; RELA; TP73; GSTP1; RB1; |
| | SRC; CDK2; AHR; NFE2L2; NCOA3; TP53; TNF; |
| | CDKN1A; NCOA2; APAF1; NFKB1; CCND1; ATM; ESR1; |
| | CDKN2A; MYC; JUN; ESR2; BAX; IL6; CYP1B1; |
| | HSP90AA1 |
| Xenobiotic Metabolism | PRKCE; EP300; PRKCZ; RXRA; MAPK1; NQO1; |
| Signaling | NCOR2; PIK3CA; ARNT; PRKCI; NFKB2; CAMK2A; |
| | PIK3CB; PPP2R1A; PIK3C3; MAPK8; PRKD1; |
| | ALDH1A1; MAPK3; NRIP1; KRAS; MAPK13; PRKCD; |
| | GSTP1; MAPK9; NOS2A; ABCB1; AHR; PPP2CA; FTL; |
| | NFE2L2; PIK3C2A; PPARGC1A; MAPK14; TNF; RAF1; |
| | CREBBP; MAP2K2; PIK3R1; PPP2R5C; MAP2K1; |
| | NFKB1; KEAP1; PRKCA; EIF2AK3; IL6; CYP1B1; |
| | HSP90AA1 |
| SAPK/JNK Signaling | PRKCE; IRAK1; PRKAA2; EIF2AK2; RAC1; ELK1; |
| | GRK6; MAPK1; GADD45A; RAC2; PLK1; AKT2; PIK3CA; |
| | FADD; CDK8; PIK3CB; PIK3C3; MAPK8; RIPK1; |
| | GNB2L1; IRS1; MAPK3; MAPK10; DAXX; KRAS; |
| | PRKCD; PRKAA1; MAPK9; CDK2; PIM1; PIK3C2A; |
| | TRAF2; TP53; LCK; MAP3K7; DYRK1A; MAP2K2; |
| | PIK3R1; MAP2K1; PAK3; CDC42; JUN; TTK; CSNK1A1; |
| | CRKL; BRAF; SGK |
| PPAr/RXR Signaling | PRKAA2; EP300; INS; SMAD2; TRAF6; PPARA; FASN; |
| | RXRA; MAPK1; SMAD3; GNAS; IKBKB; NCOR2; |
| | ABCA1; GNAQ; NFKB2; MAP3K14; STAT5B; MAPK8; |
| | IRS1; MAPK3; KRAS; RELA; PRKAA1; PPARGC1A; |
| | NCOA3; MAPK14; INSR; RAF1; IKBKG; RELB; MAP3K7; |
| | CREBBP; MAP2K2; JAK2; CHUK; MAP2K1; NFKB1; |
| | TGFBR1; SMAD4; JUN; IL1R1; PRKCA; IL6; HSP90AA1; |
| | ADIPOQ |
| NF-KB Signaling | IRAK1; EIF2AK2; EP300; INS; MYD88; PRKCZ; TRAF6; |
| | TBK1; AKT2; EGFR; IKBKB; PIK3CA; BTRC; NFKB2; |
| | MAP3K14; PIK3CB; PIK3C3; MAPK8; RIPK1; HDAC2; |
| | KRAS; RELA; PIK3C2A; TRAF2; TLR4; PDGFRB; TNF; |
| | INSR; LCK; IKBKG; RELB; MAP3K7; CREBBP; AKT1; |
| | PIK3R1; CHUK; PDGFRA; NFKB1; TLR2; BCL10; |
| | GSK3B; AKT3; TNFAIP3; IL1R1 |
| Neuregulin Signaling | ERBB4; PRKCE; ITGAM; ITGA5; PTEN; PRKCZ; ELK1; |
| Wnt & Beta catenin | MAPK1; PTPN11; AKT2; EGFR; ERBB2; PRKCI; |
| | CDKN1B; STAT5B; PRKD1; MAPK3; ITGA1; KRAS; |
| | PRKCD; STAT5A; SRC; ITGB7; RAF1; ITGB1; MAP2K2; |
| | ADAM17; AKT1; PIK3R1; PDPK1; MAP2K1; ITGB3; |
| | EREG; FRAP1; PSEN1; ITGA2; MYC; NRG1; CRKL; |
| | AKT3; PRKCA; HSP90AA1; RPS6KB1 |
| Signaling | CD44; EP300; LRP6; DVL3; CSNK1E; GJA1; SMO; |
| | AKT2; PIN1; CDH1; BTRC; GNAQ; MARK2; PPP2R1A; |
| | WNT11; SRC; DKK1; PPP2CA; SOX6; SFRP2; ILK; |
| | LEF1; SOX9; TP53; MAP3K7; CREBBP; TCF7L2; AKT1; |
| | PPP2R5C; WNT5A; LRP5; CTNNB1; TGFBR1; CCND1; |
| | GSK3A; DVL1; APC; CDKN2A; MYC; CSNK1A1; GSK3B; |
| | AKT3; SOX2 |
| Insulin Receptor Signaling | PTEN; INS; EIF4E; PTPN1; PRKCZ; MAPK1; TSC1; |
| | PTPN11; AKT2; CBL; PIK3CA; PRKCI; PIK3CB; PIK3C3; |
| | MAPK8; IRS1; MAPK3; TSC2; KRAS; EIF4EBP1; |
| | SLC2A4; PIK3C2A; PPP1CC; INSR; RAF1; FYN; |
| | MAP2K2; JAK1; AKT1; JAK2; PIK3R1; PDPK1; MAP2K1; |
| | GSK3A; FRAP1; CRKL; GSK3B; AKT3; FOXO1; SGK; |
| | RPS6KB1 |
| IL-6 Signaling | HSPB1; TRAF6; MAPKAPK2; ELK1; MAPK1; PTPN11; |
| | IKBKB; FOS; NFKB2; MAP3K14; MAPK8; MAPK3; |
| | MAPK10; IL6ST; KRAS; MAPK13; IL6R; RELA; SOCS1; |
| | MAPK9; ABCB1; TRAF2; MAPK14; TNF; RAF1; IKBKG; |
| | RELB; MAP3K7; MAP2K2; IL8; JAK2; CHUK; STAT3; |
| | MAP2K1; NFKB1; CEBPB; JUN; IL1R1; SRF; IL6 |
| Hepatic Cholestasis | PRKCE; IRAK1; INS; MYD88; PRKCZ; TRAF6; PPARA; |
| | RXRA; IKBKB; PRKCI; NFKB2; MAP3K14; MAPK8; |
| | PRKD1; MAPK10; RELA; PRKCD; MAPK9; ABCB1; |
| | TRAF2; TLR4; TNF; INSR; IKBKG; RELB; MAP3K7; IL8; |
| | CHUK; NR1H2; TJP2; NFKB1; ESR1; SREBF1; FGFR4; |
| | JUN; IL1R1; PRKCA; IL6 |
| IGF-1 Signaling | IGF1; PRKCZ; ELK1; MAPK1; PTPN11; NEDD4; AKT2; |
| | PIK3CA; PRKCI; PTK2; FOS; PIK3CB; PIK3C3; MAPK8; |
| | IGF1R; IRS1; MAPK3; IGFBP7; KRAS; PIK3C2A; |
| | YWHAZ; PXN; RAF1; CASP9; MAP2K2; AKT1; PIK3R1; |
| | PDPK1; MAP2K1; IGFBP2; SFN; JUN; CYR61; AKT3; |
| | FOXO1; SRF; CTGF; RPS6KB1 |
| NRF2-mediated Oxidative | PRKCE; EP300; SOD2; PRKCZ; MAPK1; SQSTM1; |
| Stress Response | NQO1; PIK3CA; PRKCI; FOS; PIK3CB; PIK3C3; MAPK8; |
| | PRKD1; MAPK3; KRAS; PRKCD; GSTP1; MAPK9; FTL; |
| | NFE2L2; PIK3C2A; MAPK14; RAF1; MAP3K7; CREBBP; |
| | MAP2K2; AKT1; PIK3R1; MAP2K1; PPIB; JUN; KEAP1; |
| | GSK3B; ATF4; PRKCA; EIF2AK3; HSP90AA1 |
| Hepatic Fibrosis/Hepatic | EDN1; IGF1; KDR; FLT1; SMAD2; FGFR1; MET; PGF; |
| Stellate Cell Activation | SMAD3; EGFR; FAS; CSF1; NFKB2; BCL2; MYH9; |
| | IGF1R; IL6R; RELA; TLR4; PDGFRB; TNF; RELB; IL8; |
| | PDGFRA; NFKB1; TGFBR1; SMAD4; VEGFA; BAX; |
| | IL1R1; CCL2; HGF; MMP1; STAT1; IL6; CTGF; MMP9 |
| PPAR Signaling | EP300; INS; TRAF6; PPARA; RXRA; MAPK1; IKBKB; |
| | NCOR2; FOS; NFKB2; MAP3K14; STAT5B; MAPK3; |
| | NRIP1; KRAS; PPARG; RELA; STAT5A; TRAF2; |
| | PPARGC1A; PDGFRB; TNF; INSR; RAF1; IKBKG; |
| | RELB; MAP3K7; CREBBP; MAP2K2; CHUK; PDGFRA; |
| | MAP2K1; NFKB1; JUN; IL1R1; HSP90AA1 |
| Fc Epsilon RI Signaling | PRKCE; RAC1; PRKCZ; LYN; MAPK1; RAC2; PTPN11; |
| | AKT2; PIK3CA; SYK; PRKCI; PIK3CB; PIK3C3; MAPK8; |
| | PRKD1; MAPK3; MAPK10; KRAS; MAPK13; PRKCD; |
| | MAPK9; PIK3C2A; BTK; MAPK14; TNF; RAF1; FYN; |
| | MAP2K2; AKT1; PIK3R1; PDPK1; MAP2K1; AKT3; |
| | VAV3; PRKCA |
| G-Protein Coupled | PRKCE; RAP1A; RGS16; MAPK1; GNAS; AKT2; IKBKB; |
| Receptor Signaling | PIK3CA; CREB1; GNAQ; NFKB2; CAMK2A; PIK3CB; |
| | PIK3C3; MAPK3; KRAS; RELA; SRC; PIK3C2A; RAF1; |
| | IKBKG; RELB; FYN; MAP2K2; AKT1; PIK3R1; CHUK; |
| | PDPK1; STAT3; MAP2K1; NFKB1; BRAF; ATF4; AKT3; |
| | PRKCA |
| Inositol Phosphate | PRKCE; IRAK1; PRKAA2; EIF2AK2; PTEN; GRK6; |
| Metabolism | MAPK1; PLK1; AKT2; PIK3CA; CDK8; PIK3CB; PIK3C3; |
| | MAPK8; MAPK3; PRKCD; PRKAA1; MAPK9; CDK2; |
| | PIM1; PIK3C2A; DYRK1A; MAP2K2; PIP5K1A; PIK3R1; |
| | MAP2K1; PAK3; ATM; TTK; CSNK1A1; BRAF; SGK |
| PDGF Signaling | EIF2AK2; ELK1; ABL2; MAPK1; PIK3CA; FOS; PIK3CB; |
| | PIK3C3; MAPK8; CAV1; ABL1; MAPK3; KRAS; SRC; |
| | PIK3C2A; PDGFRB; RAF1; MAP2K2; JAK1; JAK2; |
| | PIK3R1; PDGFRA; STAT3; SPHK1; MAP2K1; MYC; |
| | JUN; CRKL; PRKCA; SRF; STAT1; SPHK2 |
| VEGF Signaling | ACTN4; ROCK1; KDR; FLT1; ROCK2; MAPK1; PGF; |
| | AKT2; PIK3CA; ARNT; PTK2; BCL2; PIK3CB; PIK3C3; |
| | BCL2L1; MAPK3; KRAS; HIF1A; NOS3; PIK3C2A; PXN; |
| | RAF1; MAP2K2; ELAVL1; AKT1; PIK3R1; MAP2K1; SFN; |
| | VEGFA; AKT3; FOXO1; PRKCA |
| Natural Killer Cell Signaling | PRKCE; RAC1; PRKCZ; MAPK1; RAC2; PTPN11; |
| | KIR2DL3; AKT2; PIK3CA; SYK; PRKCI; PIK3CB; |
| | PIK3C3; PRKD1; MAPK3; KRAS; PRKCD; PTPN6; |
| | PIK3C2A; LCK; RAF1; FYN; MAP2K2; PAK4; AKT1; |
| | PIK3R1; MAP2K1; PAK3; AKT3; VAV3; PRKCA |
| Cell Cycle: G1/S | HDAC4; SMAD3; SUV39H1; HDAC5; CDKN1B; BTRC; |
| Checkpoint Regulation | ATR; ABL1; E2F1; HDAC2; HDAC7A; RB1; HDAC11; |
| | HDAC9; CDK2; E2F2; HDAC3; TP53; CDKN1A; CCND1; |
| | E2F4; ATM; RBL2; SMAD4; CDKN2A; MYC; NRG1; |
| | GSK3B; RBL1; HDAC6 |
| T Cell Receptor Signaling | RAC1; ELK1; MAPK1; IKBKB; CBL; PIK3CA; FOS; |
| | NFKB2; PIK3CB; PIK3C3; MAPK8; MAPK3; KRAS; |
| | RELA; PIK3C2A; BTK; LCK; RAF1; IKBKG; RELB; FYN; |
| | MAP2K2; PIK3R1; CHUK; MAP2K1; NFKB1; ITK; BCL10; |
| | JUN; VAV3 |
| Death Receptor Signaling | CRADD; HSPB1; BID; BIRC4; TBK1; IKBKB; FADD; |
| | FAS; NFKB2; BCL2; MAP3K14; MAPK8; RIPK1; CASP8; |
| | DAXX; TNFRSF10B; RELA; TRAF2; TNF; IKBKG; RELB; |
| | CASP9; CHUK; APAF1; NFKB1; CASP2; BIRC2; CASP3; |
| | BIRC3 |
| FGF Signaling | RAC1; FGFR1; MET; MAPKAPK2; MAPK1; PTPN11; |
| | AKT2; PIK3CA; CREB1; PIK3CB; PIK3C3; MAPK8; |
| | MAPK3; MAPK13; PTPN6; PIK3C2A; MAPK14; RAF1; |
| | AKT1; PIK3R1; STAT3; MAP2K1; FGFR4; CRKL; ATF4; |
| | AKT3; PRKCA; HGF |
| GM-CSF Signaling | LYN; ELK1; MAPK1; PTPN11; AKT2; PIK3CA; CAMK2A; |
| | STAT5B; PIK3CB; PIK3C3; GNB2L1; BCL2L1; MAPK3; |
| | ETS1; KRAS; RUNX1; PIM1; PIK3C2A; RAF1; MAP2K2; |
| | AKT1; JAK2; PIK3R1; STAT3; MAP2K1; CCND1; AKT3; |
| | STAT1 |
| Amyotrophic Lateral | BID; IGF1; RAC1; BIRC4; PGF; CAPNS1; CAPN2; |
| Sclerosis Signaling | PIK3CA; BCL2; PIK3CB; PIK3C3; BCL2L1; CAPN1; |
| | PIK3C2A; TP53; CASP9; PIK3R1; RAB5A; CASP1; |
| | APAF1; VEGFA; BIRC2; BAX; AKT3; CASP3; BIRC3 |
| JAK/Stat Signaling | PTPN1; MAPK1; PTPN11; AKT2; PIK3CA; STAT5B; |
| | PIK3CB; PIK3C3; MAPK3; KRAS; SOCS1; STAT5A; |
| | PTPN6; PIK3C2A; RAF1; CDKN1A; MAP2K2; JAK1; |
| | AKT1; JAK2; PIK3R1; STAT3; MAP2K1; FRAP1; AKT3; |
| | STAT1 |
| Nicotinate and Nicotinamide | PRKCE; IRAK1; PRKAA2; EIF2AK2; GRK6; MAPK1; |
| Metabolism | PLK1; AKT2; CDK8; MAPK8; MAPK3; PRKCD; PRKAA1; |
| | PBEF1; MAPK9; CDK2; PIM1; DYRK1A; MAP2K2; |
| | MAP2K1; PAK3; NT5E; TTK; CSNK1A1; BRAF; SGK |
| Chemokine Signaling | CXCR4; ROCK2; MAPK1; PTK2; FOS; CFL1; GNAQ; |
| | CAMK2A; CXCL12; MAPK8; MAPK3; KRAS; MAPK13; |
| | RHOA; CCR3; SRC; PPP1CC; MAPK14; NOX1; RAF1; |
| | MAP2K2; MAP2K1; JUN; CCL2; PRKCA |
| IL-2 Signaling | ELK1; MAPK1; PTPN11; AKT2; PIK3CA; SYK; FOS; |
| | STAT5B; PIK3CB; PIK3C3; MAPK8; MAPK3; KRAS; |
| | SOCS1; STAT5A; PIK3C2A; LCK; RAF1; MAP2K2; |
| | JAK1; AKT1; PIK3R1; MAP2K1; JUN; AKT3 |
| Synaptic Long Term | PRKCE; IGF1; PRKCZ; PRDX6; LYN; MAPK1; GNAS; |
| Depression | PRKCI; GNAQ; PPP2R1A; IGF1R; PRKD1; MAPK3; |
| | KRAS; GRN; PRKCD; NOS3; NOS2A; PPP2CA; |
| | YWHAZ; RAF1; MAP2K2; PPP2R5C; MAP2K1; PRKCA |
| Estrogen Receptor | TAF4B; EP300; CARM1; PCAF; MAPK1; NCOR2; |
| Signaling | SMARCA4; MAPK3; NRIP1; KRAS; SRC; NR3C1; |
| | HDAC3; PPARGC1A; RBM9; NCOA3; RAF1; CREBBP; |
| | MAP2K2; NCOA2; MAP2K1; PRKDC; ESR1; ESR2 |
| Protein Ubiquitination | TRAF6; SMURF1; BIRC4; BRCA1; UCHL1; NEDD4; |
| Pathway | CBL; UBE2I; BTRC; HSPA5; USP7; USP10; FBXW7; |
| | USP9X; STUB1; USP22; B2M; BIRC2; PARK2; USP8; |
| | USP1; VHL; HSP90AA1; BIRC3 |
| IL-10 Signaling | TRAF6; CCR1; ELK1; IKBKB; SP1; FOS; NFKB2; |
| | MAP3K14; MAPK8; MAPK13; RELA; MAPK14; TNF; |
| | IKBKG; RELB; MAP3K7; JAK1; CHUK; STAT3; NFKB1; |
| | JUN; IL1R1; IL6 |
| VDR/RXR Activation | PRKCE; EP300; PRKCZ; RXRA; GADD45A; HES1; |
| | NCOR2; SP1; PRKCI; CDKN1B; PRKD1; PRKCD; |
| | RUNX2; KLF4; YY1; NCOA3; CDKN1A; NCOA2; SPP1; |
| | LRP5; CEBPB; FOXO1; PRKCA |
| TGF-beta Signaling | EP300; SMAD2; SMURF1; MAPK1; SMAD3; SMAD1; |
| | FOS; MAPK8; MAPK3; KRAS; MAPK9; RUNX2; |
| | SERPINE1; RAF1; MAP3K7; CREBBP; MAP2K2; |
| | MAP2K1; TGFBR1; SMAD4; JUN; SMAD5 |
| Toll-like Receptor Signaling | IRAK1; EIF2AK2; MYD88; TRAF6; PPARA; ELK1; |
| | IKBKB; FOS; NFKB2; MAP3K14; MAPK8; MAPK13; |
| | RELA; TLR4; MAPK14; IKBKG; RELB; MAP3K7; CHUK; |
| | NFKB1; TLR2; JUN |
| p38 MAPK Signaling | HSPB1; IRAK1; TRAF6; MAPKAPK2; ELK1; FADD; FAS; |
| | CREB1; DDIT3; RPS6KA4; DAXX; MAPK13; TRAF2; |
| | MAPK14; TNF; MAP3K7; TGFBR1; MYC; ATF4; IL1R1; |
| | SRF; STAT1 |
| Neurotrophin/TRK Signaling | NTRK2; MAPK1; PTPN11; PIK3CA; CREB1; FOS; |
| | PIK3CB; PIK3C3; MAPK8; MAPK3; KRAS; PIK3C2A; |
| | RAF1; MAP2K2; AKT1; PIK3R1; PDPK1; MAP2K1; |
| | CDC42; JUN; ATF4 |
| FXR/RXR Activation | INS; PPARA; FASN; RXRA; AKT2; SDC1; MAPK8; |
| | APOB; MAPK10; PPARG; MTTP; MAPK9; PPARGC1A; |
| | TNF; CREBBP; AKT1; SREBF1; FGFR4; AKT3; FOXO1 |
| Synaptic Long Term | PRKCE; RAP1A; EP300; PRKCZ; MAPK1; CREB1; |
| Potentiation | PRKCI; GNAQ; CAMK2A; PRKD1; MAPK3; KRAS; |
| | PRKCD; PPP1CC; RAF1; CREBBP; MAP2K2; MAP2K1; |
| | ATF4; PRKCA |
| Calcium Signaling | RAP1A; EP300; HDAC4; MAPK1; HDAC5; CREB1; |
| | CAMK2A; MYH9; MAPK3; HDAC2; HDAC7A; HDAC11; |
| | HDAC9; HDAC3; CREBBP; CALR; CAMKK2; ATF4; |
| | HDAC6 |
| EGF Signaling | ELK1; MAPK1; EGFR; PIK3CA; FOS; PIK3CB; PIK3C3; |
| | MAPK8; MAPK3; PIK3C2A; RAF1; JAK1; PIK3R1; |
| | STAT3; MAP2K1; JUN; PRKCA; SRF; STAT1 |
| Hypoxia Signaling in the | EDN1; PTEN; EP300; NQO1; UBE2I; CREB1; ARNT; |
| Cardiovascular System | HIF1A; SLC2A4; NOS3; TP53; LDHA; AKT1; ATM; |
| | VEGFA; JUN; ATF4; VHL; HSP90AA1 |
| LPS/IL-1 Mediated Inhibition | IRAK1; MYD88; TRAF6; PPARA; RXRA; ABCA1; |
| of RXR Function | MAPK8; ALDH1A1; GSTP1; MAPK9; ABCB1; TRAF2; |
| | TLR4; TNF; MAP3K7; NR1H2; SREBF1; JUN; IL1R1 |
| LXR/RXR Activation | FASN; RXRA; NCOR2; ABCA1; NFKB2; IRF3; RELA; |
| | NOS2A; TLR4; TNF; RELB; LDLR; NR1H2; NFKB1; |
| | SREBF1; IL1R1; CCL2; IL6; MMP9 |
| Amyloid Processing | PRKCE; CSNK1E; MAPK1; CAPNS1; AKT2; CAPN2; |
| | CAPN1; MAPK3; MAPK13; MAPT; MAPK14; AKT1; |
| | PSEN1; CSNK1A1; GSK3B; AKT3; APP |
| IL-4 Signaling | AKT2; PIK3CA; PIK3CB; PIK3C3; IRS1; KRAS; SOCS1; |
| | PTPN6; NR3C1; PIK3C2A; JAK1; AKT1; JAK2; PIK3R1; |
| | FRAP1; AKT3; RPS6KB1 |
| Cell Cycle: G2/M DNA | EP300; PCAF; BRCA1; GADD45A; PLK1; BTRC; |
| Damage Checkpoint | CHEK1; ATR; CHEK2; YWHAZ; TP53; CDKN1A; |
| Regulation | PRKDC; ATM; SFN; CDKN2A |
| Nitric Oxide Signaling in the | KDR; FLT1; PGF; AKT2; PIK3CA; PIK3CB; PIK3C3; |
| Cardiovascular System | CAV1; PRKCD; NOS3; PIK3C2A; AKT1; PIK3R1; |
| | VEGFA; AKT3; HSP90AA1 |
| Purine Metabolism | NME2; SMARCA4; MYH9; RRM2; ADAR; EIF2AK4; |
| | PKM2; ENTPD1; RAD51; RRM2B; TJP2; RAD51C; |
| | NT5E; POLD1; NME1 |
| CAMP-mediated Signaling | RAP1A; MAPK1; GNAS; CREB1; CAMK2A; MAPK3; |
| | SRC; RAF1; MAP2K2; STAT3; MAP2K1; BRAF; ATF4 |
| Mitochondrial Dysfunction | SOD2; MAPK8; CASP8; MAPK10; MAPK9; CASP9; |
| Notch Signaling | PARK7; PSEN1; PARK2; APP; CASP3 |
| | HES1; JAG1; NUMB; NOTCH4; ADAM17; NOTCH2; |
| | PSEN1; NOTCH3; NOTCH1; DLL4 |
| Endoplasmic Reticulum | HSPA5; MAPK8; XBP1; TRAF2; ATF6; CASP9; ATF4; |
| Stress Pathway | EIF2AK3; CASP3 |
| Pyrimidine Metabolism | NME2; AICDA; RRM2; EIF2AK4; ENTPD1; RRM2B; |
| | NT5E; POLD1; NME1 |
| Parkinson's Signaling | UCHL1; MAPK8; MAPK13; MAPK14; CASP9; PARK7; |
| | PARK2; CASP3 |
| Cardiac & Beta Adrenergic | GNAS; GNAQ; PPP2R1A; GNB2L1; PPP2CA; PPP1CC; |
| Signaling | PPP2R5C |
| Glycolysis/Gluconeogenesis | HK2; GCK; GPI; ALDH1A1; PKM2; LDHA; HK1 |
| Interferon Signaling | IRF1; SOCS1; JAK1; JAK2; IFITM1; STAT1; IFIT3 |
| Sonic Hedgehog Signaling | ARRB2; SMO; GLI2; DYRK1A; GLI1; GSK3B; DYRK1B |
| Glycerophospholipid | PLD1; GRN; GPAM; YWHAZ; SPHK1; SPHK2 |
| Metabolism | |
| Phospholipid Degradation | PRDX6; PLD1; GRN; YWHAZ; SPHK1; SPHK2 |
| Tryptophan Metabolism | SIAH2; PRMT5; NEDD4; ALDH1A1; CYP1B1; SIAH1 |
| Lysine Degradation | SUV39H1; EHMT2; NSD1; SETD7; PPP2R5C |
| Nucleotide Excision Repair | ERCC5; ERCC4; XPA; XPC; ERCC1 |
| Pathway | |
| Starch and Sucrose | UCHL1; HK2; GCK; GPI; HK1 |
| Metabolism | |
| Aminosugars Metabolism | NQO1; HK2; GCK; HK1 |
| Arachidonic Acid | PRDX6; GRN; YWHAZ; CYP1B1 |
| Metabolism | |
| Circadian Rhythm Signaling | CSNK1E; CREB1; ATF4; NR1D1 |
| Coagulation System | BDKRB1; F2R; SERPINE1; F3 |
| Dopamine Receptor | PPP2R1A; PPP2CA; PPP1CC; PPP2R5C |
| Signaling | |
| Glutathione Metabolism | IDH2; GSTP1; ANPEP; IDH1 |
| Glycerolipid Metabolism | ALDH1A1; GPAM; SPHK1; SPHK2 |
| Linoleic Acid Metabolism | PRDX6; GRN; YWHAZ; CYP1B1 |
| Methionine Metabolism | DNMT1; DNMT3B; AHCY; DNMT3A |
| Pyruvate Metabolism | GLO1; ALDH1A1; PKM2; LDHA |
| Arginine and Proline | ALDH1A1; NOS3; NOS2A |
| Metabolism | |
| Eicosanoid Signaling | PRDX6; GRN; YWHAZ |
| Fructose and Mannose | HK2; GCK; HK1 |
| Metabolism | |
| Galactose Metabolism | HK2; GCK; HK1 |
| Stilbene, Coumarine and | PRDX6; PRDX1; TYR |
| Lignin Biosynthesis | |
| Antigen Presentation | CALR; B2M |
| Pathway | |
| Biosynthesis of Steroids | NQO1; DHCR7 |
| Butanoate Metabolism | ALDH1A1; NLGN1 |
| Citrate Cycle | IDH2; IDH1 |
| Fatty Acid Metabolism | ALDH1A1; CYP1B1 |
| Glycerophospholipid | PRDX6; CHKA |
| Metabolism | |
| Histidine Metabolism | PRMT5; ALDH1A1 |
| Inositol Metabolism | ERO1L; APEX1 |
| Metabolism of Xenobiotics | GSTP1; CYP1B1 |
| by Cytochrome p450 | |
| Methane Metabolism | PRDX6; PRDX1 |
| Phenylalanine Metabolism | PRDX6; PRDX1 |
| Propanoate Metabolism | ALDH1A1; LDHA |
| Selenoamino Acid | PRMT5; AHCY |
| Metabolism | |
| Sphingolipid Metabolism | SPHK1; SPHK2 |
| Aminophosphonate | PRMT5 |
| Metabolism | |
| Androgen and Estrogen | PRMT5 |
| Metabolism | |
| Ascorbate and Aldarate | ALDH1A1 |
| Metabolism | |
| Bile Acid Biosynthesis | ALDH1A1 |
| Cysteine Metabolism | LDHA |
| Fatty Acid Biosynthesis | FASN |
| Glutamate Receptor | GNB2L1 |
| Signaling | |
| NRF2-mediated Oxidative | PRDX1 |
| Stress Response | |
| Pentose Phosphate | GPI |
| Pathway | |
| Pentose and Glucuronate | UCHL1 |
| Interconversions | |
| Retinol Metabolism | ALDH1A1 |
| Riboflavin Metabolism | TYR |
| Tyrosine Metabolism | PRMT5, TYR |
| Ubiquinone Biosynthesis | PRMT5 |
| Valine, Leucine and | ALDH1A1 |
| Isoleucine Degradation | |
| Glycine, Serine and | CHKA |
| Threonine Metabolism | |
| Lysine Degradation | ALDH1A1 |
| Pain/Taste | TRPM5; TRPA1 |
| Pain | TRPM7; TRPC5; TRPC6; TRPC1; Cnr1; cnr2; Grk2; |
| | Trpa1; Pomc; Cgrp; Crf; Pka; Era; Nr2b; TRPM5; Prkaca; |
| | Prkacb; Prkarla; Prkar2a |
| Mitochondrial Function | AIF; CytC; SMAC (Diablo); Aifm-1; Aifm-2 |
| Developmental Neurology | BMP-4; Chordin (Chrd); Noggin (Nog); WNT (Wnt2; |
| | Wnt2b; Wnt3a; Wnt4; Wnt5a; Wnt6; Wnt7b; Wnt8b; |
| | Wnt9a; Wnt9b; Wnt10a; Wnt10b; Wnt16); beta-catenin; |
| | Dkk-1; Frizzled related proteins; Otx-2; Gbx2; FGF-8; |
| | Reelin; Dab1; unc-86 (Pou4f1 or Brn3a); Numb; Reln |

[0679] In an embodiment, the invention provides a method of individualized or personalized treatment of a genetic disease in a subject in need of such treatment comprising: (a) introducing one or more mutations ex vivo in a tissue, organ or a cell line, or in vivo in a transgenic non-human mammal, comprising delivering to cell(s) of the tissue, organ, cell or mammal a composition comprising the particle delivery system or the delivery system or the virus particle of any one of the above embodiments or the cell of any one of the above embodiments, wherein the specific mutations or precise sequence substitutions are or have been correlated to the genetic disease; (b) testing treatment(s) for the genetic disease on the cells to which the vector has been delivered that have the specific mutations or precise sequence substitutions correlated to the genetic disease; and (c) treating the subject based on results from the testing of treatment(s) of step (b).

### Infectious Diseases

[0680] In an embodiment, the composition, system(s) or component(s) thereof can be used to diagnose, prognose, treat, and/or prevent an infectious disease caused by a microorganism, such as bacteria, virus, fungi, parasites, or combinations thereof.

[0681] In an embodiment, the system(s) or component(s) thereof can be capable of targeting specific microorganism within a mixed population. Exemplary methods of such techniques are described, e.g., in Gomaa A A, Klumpe H E, Luo M L, Selle K, Barrangou R, Beisel C L. 2014. Programmable removal of bacterial strains by use of genome-targeting composition, systems, mBio 5: e00928-13; Citorik R J, Mimee M, Lu T K. 2014. Sequence-specific antimicrobials using efficiently delivered RNA-guided nucleases. Nat Biotechnol 32:1141-1145, the teachings of which can be adapted for use with the compositions, systems, and components thereof described herein.

[0682] In an embodiment, the composition, system(s), and/or components thereof can be capable of targeting pathogenic and/or drug-resistant microorganisms, such as bacteria, virus, parasites, and fungi. In an embodiment, the composition, system(s), and/or components thereof can be capable of targeting and modifying one or more polynucleotides in a pathogenic microorganism such that the microorganism is less virulent, killed, inhibited, or is otherwise rendered incapable of causing disease and/or infecting and/or replicating in a host cell.

[0683] In an embodiment, the pathogenic bacteria that can be targeted and/or modified by the composition, system, (s) and/or component(s) thereof disclosed herein include, but are not limited to, those of the genus Actinomyces (e.g., A. israelii), Bacillus (e.g., B. anthracis, B. cereus), Bactereoides (e.g., B. fragilis), Bartonella (B. henselae, B. quintana), Bordetella (B. pertussis), Borrelia (e.g., B. burgdorferi, B. garinii, B. afzelii, and B. recurreentis), Brucella (e.g., B. abortus, B. canis, B. melitensis, and B. suis), Campylobacter (e.g., C. jejuni), Chlamydia (e.g., C. pneumoniae and C. trachomatis), Chlamydophila (e.g., C. psittaci), Clostridium (e.g., C. botulinum, C. difficile, C. perfringens. C. tetani), Corynebacterium (e.g., C. diptheriae), Enterococcus (e.g., E. Faecalis, E. faecium), Ehrlichia (E. canis and E. chaffeensis) Escherichia (e.g., E. coli), Francisella (e.g., F. tularensis), Haemophilus (e.g., H. influenzae), Helicobacter (H. pylori), Klebsiella (e.g., K. pneumoniae), Legionella (e.g., L. pneumophila), Leptospira (e.g., L. interrogans, L. santarosai, L. weilii, L. noguchii), Listeria (e.g., L. monocytogeenes), Mycobacterium (e.g., M. leprae, M. tuberculosis, M. ulcerans), Mycoplasma (M. pneumoniae), Neisseria (N. gonorrhoeae and N. meningitidis), Nocardia (e.g., N. asteroides), Pseudomonas (P. aeruginosa), Rickettsia (R. rickettsia), Salmonella (S. typhi and S. typhimurium), Shigella (S. sonnei and S. dysenteriae), Staphylococcus (S. aureus, S. epidermidis, and S. saprophyticus), Streptococcus (S. agalactiaee, S. pneumoniae, S. pyogenes), Treponema (T. pallidum), Ureaplasma (e.g., U. urealyticum), Vibrio (e.g., V. cholerae), Yersinia (e.g., Y. pestis, Y. enterocolitica, and Y. pseudotuberculosis).

[0684] In one embodiment, the pathogenic virus that can be targeted and/or modified by the composition, system(s) and/or component(s) thereof disclosed herein include, but are not limited to, a double-stranded DNA virus, a partly double-stranded DNA virus, a single-stranded DNA virus, a positive single-stranded RNA virus, a negative single-stranded RNA virus, or a double stranded RNA virus. In one embodiment, the pathogenic virus can be from the family Adenoviridae (e.g., Adenovirus), Herpesviridae (e.g., Herpes simplex, type 1, Herpes simplex, type 2, Varicella-zoster virus, Epstein-Barr virus, Human cytomegalovirus, Human herpesvirus, type 8), Papillomaviridae (e.g., Human papillomavirus), Polyomaviridae (e.g., BK virus, JC virus), Poxviridae (e.g., smallpox), Hepadnaviridae (e.g., Hepatitis B), Parvoviridae (e.g., Parvovirus B19), Astroviridae (e.g., Human astrovirus), Caliciviridae (e.g., Norwalk virus), Picornaviridae (e.g., coxsackievirus, hepatitis A virus, poliovirus, rhinovirus), Coronaviridae (e.g., Severe acute respiratory syndrome-related coronavirus, strains: Severe acute respiratory syndrome virus, Severe acute respiratory syndrome coronavirus 2 (COVID-19 and variants)), Flaviviridae (e.g., Hepatitis C virus, yellow fever virus, dengue virus, West Nile virus, TBE virus), Togaviridae (e.g., Rubella virus), Hepeviridae (e.g., Hepatitis E virus), Retroviridae (Human immunodeficiency virus (HIV)), Orthomyxoviridae (e.g., Influenza virus), Arenaviridae (e.g., Lassa virus), Bunyaviridae (e.g., Crimean-Congo hemorrhagic fever virus, Hantaan virus), Filoviridae (e.g., Ebola virus and Marburg virus), Paramyxoviridae (e.g., Measles virus, Mumps virus, Parainfluenza virus, Respiratory syncytial virus), Rhabdoviridae (Rabies virus), Hepatitis D virus, Reoviridae (e.g., Rotavirus, Orbivirus, Coltivirus, Banna virus). In one embodiment, the pathogenic fungi that can be targeted and/or modified by the composition, system(s), and/or component(s) thereof disclosed herein include, but are not limited to, those of the genus Candida (e.g, C. albicans), Aspergillus (e.g., A. fumigatus, A. flavus, A. clavatus), Cryptococcus (e.g., C. neoformans, C. gattii), Histoplasma (H. capsulatum), Pneumocystis (e.g., P. jiroveecii), Stachybotrys (e.g., S. chartarum).

[0685] In one embodiment, the pathogenic parasites that can be targeted and/or modified by the composition, system(s) and/or component(s) thereof disclosed herein include, but are not limited to, protozoa, helminths, and ectoparasites. In one embodiment, the pathogenic protozoa that can be targeted and/or modified by the composition, system(s) and/or component(s) thereof disclosed herein include, but are not limited to, those from the groups Sarcodina (e.g., amoeba such as Entamoeba), Mastigophora (e.g., flagellates such as Giardia and Leishmania), Cilophora (e.g., ciliates such as Balantidum), and sporozoa (e.g., plasmodium and cryptosporidium). In one embodiment, the pathogenic helminths that can be targeted and/or modified by the composition, system(s) and/or component(s) thereof disclosed herein include, but are not limited to, flatworms (platyhelminths), thorny-headed worms (acanthocephalans), and roundworms (nematodes). In one embodiment, the pathogenic ectoparasites that can be targeted and/or modified by the composition, system(s) and/or component(s) thereof disclosed herein include, but are not limited to, ticks, fleas, lice, and mites. In one embodiment, the pathogenic parasite that can be targeted and/or modified by the composition, system(s), and/or component(s) thereof disclosed herein include, but are not limited to, Acanthamoeba spp., Balamuthia mandrillaris, Babesiosis spp. (e.g., Babesia B. divergens, B. bigemina, B. equi, B. microfti, B. duncani), Balantidiasis spp. (e.g., Balantidium coli), Blastocystis spp., Cryptosporidium spp., Cyclosporiasis spp. (e.g., Cyclospora cayetanensis), Dientamoebiasis spp. (e.g., Dientamoeba fragilis), Amoebiasis spp. (e.g., Entamoeba histolytica), Giardiasis spp. (e.g., Giardia lamblia), Isosporiasis spp. (e.g., Isospora belli), Leishmania spp., Naegleria spp. (e.g., Naegleria fowleri), Plasmodium spp. (e.g., Plasmodium falciparum, Plasmodium vivax, Plasmodium ovale curtisi, Plasmodium ovale wallikeri, Plasmodium malariae, Plasmodium knowlesi), Rhinosporidiosis spp. (e.g., Rhinosporidium Seeberi), Sarcocystosis spp. (e.g., Sarcocystis bovihominis, Sarcocystis suihominis), Toxoplasma spp. (e.g., Toxoplasma gondii), Trichomonas spp. (e.g., Trichomonas vaginalis), Trypanosoma spp. (e.g., Trypanosoma brucei), Trypanosoma spp. (e.g., Trypanosoma cruzi), Tapeworm (e.g., Cestoda, Taenia multiceps, Taenia saginata, Taenia solium), Diphyllobothrium latum spp., Echinococcus spp. (e.g., Echinococcus granulosus, Echinococcus multilocularis, E. vogeli, E. oligarthrus), Hymenolepis spp. (e.g., Hymenolepis nana, Hymenolepis diminuta), Bertiella spp. (e.g., Bertiella mucronata, Bertiella studeri), Spirometra (e.g., Spirometra erinaceieuropaei), Clonorchis spp. (e.g., Clonorchis sinensis; Clonorchis viverrini), Dicrocoelium spp. (e.g., Dicrocoelium dendriticum), Fasciola spp. (e.g., Fasciola hepatica, Fasciola gigantica), Fasciolopsis spp. (e.g., Fasciolopsis buski), Metagonimus spp. (e.g., Metagonimus yokogawai), Metorchis spp. (e.g., Metorchis conjunctus), Opisthorchis spp. (e.g., Opisthorchis viverrini, Opisthorchis felineus), Clonorchis spp. (e.g., Clonorchis sinensis), Paragonimus spp. (e.g., Paragonimus westermani; Paragonimus africanus; Paragonimus caliensis; Paragonimus kellicotti; Paragonimus skrjabini; Paragonimus uterobilateralis), Schistosoma sp., Schistosoma spp. (e.g., Schistosoma mansoni, Schistosoma haematobium, Schistosoma japonicum, Schistosoma mekongi, and Schistosoma intercalatum), Echinostoma spp. (e.g., E. echinatum), Trichobilharzia spp. (e.g., Trichobilharzia regent), Ancylostoma spp. (e.g., Ancylostoma duodenale), Necator spp. (e.g., Necator americanus), Angiostrongylus spp., Anisakis spp., Ascaris spp. (e.g., Ascaris lumbricoides), Baylisascaris spp. (e.g., Baylisascaris procyonis), Brugia spp. (e.g., Brugia malayi, Brugia timori), Dioctophyme spp. (e.g., Dioctophyme renale), Dracunculus spp. (e.g., Dracunculus medinensis), Enterobius spp. (e.g., Enterobius vermicularis, Enterobius gregorii), Gnathostoma spp. (e.g., Gnathostoma spinigerum, Gnathostoma hispidum), Halicephalobus spp. (e.g., Halicephalobus gingivalis), Loa loa spp. (e.g., Loa loa filaria), Mansonella spp. (e.g., Mansonella streptocerca), Onchocerca spp. (e.g., Onchocerca volvulus), Strongyloides spp. (e.g., Strongyloides stercoralis), Thelazia spp. (e.g., Thelazia californiensis, Thelazia callipaeda), Toxocara spp. (e.g., Toxocara canis, Toxocara cati, Toxascaris leonine), Trichinella spp. (e.g., Trichinella spiralis, Trichinella britovi, Trichinella nelsoni, Trichinella nativa), Trichuris spp. (e.g., Trichuris trichiura, Trichuris vulpis), Wuchereria spp. (e.g., Wuchereria bancrofti), Dermatobia spp. (e.g., Dermatobia hominis), Tunga spp. (e.g., Tunga penetrans), Cochliomyia spp. (e.g., Cochliomyia hominivorax), Linguatula spp. (e.g., Linguatula serrata), Archiacanthocephala sp., Moniliformis sp. (e.g., Moniliformis moniliformis), Pediculus spp. (e.g., Pediculus humanus capitis, Pediculus humanus humanus), Pthirus spp. (e.g., Pthirus pubis), Arachnida spp. (e.g., Trombiculidae, Ixodidae, Argaside), Siphonaptera spp (e.g., Siphonaptera: Pulicinae), Cimicidae spp. (e.g., Cimex lectularius and Cimex hemipterus), Diptera spp., Demodex spp. (e.g. Demodex folliculorum/brevis/canis), Sarcoptes spp. (e.g., Sarcoptes scabiei), Dermanyssus spp. (e.g., Dermanyssus gallinae), Ornithonyssus spp. (e.g., Ornithonyssus sylviarum, Ornithonyssus bursa, Ornithonyssus bacoti), Laelaps spp. (e.g., Laelaps echidnina), Liponyssoides spp. (e.g., Liponyssoides sanguineus). In an embodiment the gene targets can be any of those as set forth in Table 1 of Strich and Chertow. 2019. J. Clin. Microbio. 57:4 e01307-18, which is incorporated herein as if expressed in its entirety herein.

[0686] In an embodiment, the method can include delivering a composition, system, and/or component thereof to a pathogenic organism described herein, allowing the composition, system, and/or component thereof to specifically bind and modify one or more targets in the pathogenic organism, whereby the modification kills, inhibits, reduces the pathogenicity of the pathogenic organism, or otherwise renders the pathogenic organism non-pathogenic. In an embodiment, delivery of the composition, system, occurs in vivo (i.e., in the subject being treated). In an embodiment occurs by an intermediary, such as microorganism or phage that is non-pathogenic to the subject but is capable of transferring polynucleotides and/or infecting the pathogenic microorganism. In an embodiment, the intermediary microorganism can be an engineered bacteria, virus, or phage that contains the composition, system(s) and/or component(s) thereof and/or CRISPR-Cas vectors and/or vector systems. The method can include administering an intermediary microorganism containing the composition, system(s) and/or component(s) thereof and/or CRISPR-Cas vectors and/or vector systems to the subject to be treated. The intermediary microorganism can then produce the CRISPR-system and/or component thereof or transfer a composition, system, polynucleotide to the pathogenic organism. In embodiments, where the CRISPR-system and/or component thereof, vector, or vector system is transferred to the pathogenic microorganism, the composition, system, or component thereof is then produced in the pathogenic microorganism and modifies the pathogenic microorganism such that it is less virulent, killed, inhibited, or is otherwise rendered incapable of causing disease and/or infecting and/or replicating in a host or cell thereof.

[0687] In an embodiment, where the pathogenic microorganism inserts its genetic material into the host cell's genome (e.g., a virus), the composition, system, can be designed such that it modifies the host cell's genome such that the viral DNA or cDNA cannot be replicated by the host cell's machinery into a functional virus. In an embodiment, where the pathogenic microorganism inserts its genetic material into the host cell's genome (e.g., a virus), the composition, system can be designed such that it modifies the host cell's genome such that the viral DNA or cDNA is deleted from the host cell's genome. It will be appreciated that inhibiting or killing the pathogenic microorganism, the disease and/or condition that its infection causes in the subject can be treated or prevented. Thus, also provided herein are methods of treating and/or preventing one or more diseases or symptoms thereof caused by any one or more pathogenic microorganisms, such as any of those described herein.

### Mitochondrial Diseases

[0688] Some of the most challenging mitochondrial disorders arise from mutations in mitochondrial DNA (mtDNA), a high copy number genome that is maternally inherited. In an embodiment, mtDNA mutations can be modified using a composition, system, described herein. In an embodiment, the mitochondrial disease that can be diagnosed, prognosed, treated, and/or prevented can be MELAS (mitochondrial myopathy encephalopathy, and lactic acidosis and stroke-like episodes), CPEO/PEO (chronic progressive external ophthalmoplegia syndrome/progressive external ophthalmoplegia), KSS (Kearns-Sayre syndrome), MIDD (maternally inherited diabetes and deafness), MERRF (myoclonic epilepsy associated with ragged red fibers), NIDDM (noninsulin-dependent diabetes mellitus), LHON (Leber hereditary optic neuropathy), LS (Leigh Syndrome) an aminoglycoside induced hearing disorder, NARP (neuropathy, ataxia, and pigmentary retinopathy), Extrapyramidal disorder with akinesia-rigidity, psychosis and SNHL, Nonsyndromic hearing loss a cardiomyopathy, an encephalomyopathy, Pearson's syndrome, or a combination thereof.

[0689] In an embodiment, the mtDNA of a subject can be modified in vivo or ex vivo. In an embodiment, where the mtDNA is modified ex vivo, after modification the cells containing the modified mitochondria can be administered back to the subject. In an embodiment, the composition, system, or component thereof can be capable of correcting an mtDNA mutation, or a combination thereof.

[0690] In an embodiment, at least one of the one or more mtDNA mutations is selected from the group consisting of: A3243G, C3256T, T3271C, G1019A, A1304T, A15533G, C1494T, C4467A, T1658C, G12315A, A3421G, A8344G, T8356C, G8363A, A13042T, T3200C, G3242A, A3252G, T3264C, G3316A, T3394C, T14577C, A4833G, G3460A, G9804A, G11778A, G14459A, A14484G, G15257A, T8993C, T8993G, G10197A, G13513A, T1095C, C1494T, A1555G, G1541A, C1634T, A3260G, A4269G, T7587C, A8296G, A8348G, G8363A, T9957C, T9997C, G12192A, C12297T, A14484G, G15059A, duplication of CCCCCTCCCC-(SEQ ID NO: 84) tandem repeats at positions 305-314 and/or 956-965, deletion at positions from 8,469-13,447, 4,308-14,874, and/or 4,398-14,822, 96lins/delC, the mitochondrial common deletion (e.g., mtDNA 4,977 bp deletion), and combinations thereof.

[0691] In an embodiment, the mitochondrial mutation can be any mutation as set forth in or as identified by use of one or more bioinformatic tools available at Mitomap available at mitomap.org. Such tools include, but are not limited to, “Variant Search, aka Market Finder”, Find Sequences for Any Haplogroup, aka “Sequence Finder”, “Variant Info”, “POLG Pathogenicity Prediction Server”, “MITOMASTER”, “Allele Search”, “Sequence and Variant Downloads”, “Data Downloads”. MitoMap contains reports of mutations in mtDNA that can be associated with disease and maintains a database of reported mitochondrial DNA Base Substitution Diseases: rRNA/tRNA mutations.

[0692] In an embodiment, the method includes delivering a composition, system, and/or a component thereof to a cell, and more specifically one or more mitochondria in a cell, allowing the composition, system, and/or component thereof to modify one or more target polynucleotides in the cell, and more specifically one or more mitochondria in the cell. The target polynucleotides can correspond to a mutation in the mtDNA, such as any one or more of those described herein. In an embodiment, the modification can alter a function of the mitochondria such that the mitochondria functions normally or at least is/are less dysfunctional as compared to unmodified mitochondria. Modification can occur in vivo or ex vivo. Where modification is performed ex vivo, cells containing modified mitochondria can be administered to a subject in need thereof in an autologous or allogenic manner.

### Microbiome Modification

[0693] Microbiomes play important roles in health and disease. For example, the gut microbiome can play a role in health by controlling digestion, preventing growth of pathogenic microorganisms and have been suggested to influence mood and emotion. Imbalanced microbiomes can promote disease and are suggested to contribute to weight gain, unregulated blood sugar, high cholesterol, cancer, and other disorders. A healthy microbiome has a series of joint characteristics that can be distinguished from non-healthy individuals; thus, detection and identification of the disease-associated microbiome can be used to diagnose and detect disease in an individual. The compositions, systems, and components thereof can be used to screen the microbiome cell population and be used to identify a disease associated microbiome. Cell screening methods utilizing compositions, systems, and components thereof are described elsewhere herein and can be applied to screening a microbiome, such as a gut, skin, vagina, and/or oral microbiome, of a subject.

[0694] In an embodiment, the microbe population of a microbiome in a subject can be modified using a composition, system, and/or component thereof described herein. In an embodiment, the composition, system, and/or component thereof can be used to identify and select one or more cell types in the microbiome and remove them from the microbiome population. Exemplary methods of selecting cells using a composition, system, and/or component thereof are described elsewhere herein. In this way, the make-up or microorganism profile of the microbiome can be altered. In an embodiment, the alteration causes a change from a diseased microbiome composition to a healthy microbiome composition. In this way, the ratio of one type or species of microorganism to another can be modified, such as going from a diseased ratio to a healthy ratio. In an embodiment, the cells selected are pathogenic microorganisms.

[0695] In an embodiment, the compositions and systems described herein can be used to modify a polynucleotide in a microorganism of a microbiome in a subject. In an embodiment, the microorganism is a pathogenic microorganism. In an embodiment, the microorganism is a commensal and non-pathogenic microorganism. Methods of modifying polynucleotides in a cell in the subject are described elsewhere herein and can be applied to these embodiments.

### Models of Diseases and Conditions

[0696] In an embodiment, the invention provides a method of modeling a disease associated with a genomic locus in a eukaryotic organism or a non-human organism comprising manipulation of a target sequence within a coding, non-coding or regulatory element of said genomic locus comprising delivering a non-naturally occurring or engineered composition comprising a viral vector system comprising one or more viral vectors operably encoding a composition for expression thereof, wherein the composition comprises particle delivery system or the delivery system or the virus particle of any one of the above embodiments or the cell of any one of the above embodiments.

[0697] In one aspect, the invention provides a method of generating a model eukaryotic cell that can include one or more a mutated disease genes and/or infectious microorganisms. In an embodiment, a disease gene is any gene associated an increase in the risk of having or developing a disease. In an embodiment, the method includes (a) introducing one or more vectors into a eukaryotic cell, wherein the one or more vectors comprise a composition, system, and/or component thereof and/or a vector or vector system that is capable of driving expression of a composition, system, and/or component thereof including, but not limited to: a guide sequence optionally linked to a tracr mate sequence, a tracr sequence, one or more Cas effectors, and combinations thereof and (b) allowing a composition, system, or complex to bind to one or more target polynucleotides, e.g., to effect cleavage, nicking, or other modification of the target polynucleotide within said disease gene, wherein the composition, system, or complex is composed of one or more CRISPR-Cas effectors complexed with (1) one or more guide sequences that is/are hybridized to the target sequence(s) within the target polynucleotide(s), and optionally (2) the tracr mate sequence(s) that is/are hybridized to the tracr sequence(s), thereby generating a model eukaryotic cell comprising one or more mutated disease gene(s). Thus, in an embodiment the composition and system, contains nucleic acid molecules for and drives expression of one or more of: a Cas effector, a guide sequence linked to a tracr mate sequence, and a tracr sequence and/or a Homologous Recombination template and/or a stabilizing ligand if the Cas effector has a destabilization domain. In an embodiment, said cleavage comprises cleaving one or two strands at the location of the target sequence by the Cas effector(s). In an embodiment, nicking comprises nicking one or two strands at the location of the target sequence by the Cas effector(s). In an embodiment, said cleavage or nicking results in modified transcription of a target polynucleotide. In an embodiment, modification results in decreased transcription of the target polynucleotide. In an embodiment, the method further comprises repairing said cleaved or nicked target polynucleotide by homologous recombination with a recombination template polynucleotide, wherein said repair results in a mutation comprising an insertion, deletion, or substitution of one or more nucleotides of said target polynucleotide. In an embodiment, said mutation results in one or more amino acid changes in a protein expression from a gene comprising the target sequence.

[0698] The disease modeled can be any disease with a genetic or epigenetic component. In an embodiment, the disease modeled can be any as discussed elsewhere herein, including but not limited to any as set forth in Tables 8 and 9 herein.

### In Situ Disease Detection

[0699] The compositions, systems, and/or components thereof can be used for diagnostic methods of detection such as in CASFISH (see Deng et al. 2015. PNAS USA 112 (38): 11870-11875), CRISPR-Live FISH (see e.g., Wang et al. 2020. Science; 365 (6459): 1301-1305), sm-FISH (Lee and Jefcoate. 2017. Front. Endocrinol. doi.org/10.3389/fendo.2017.00289), sequential FISH CRISPRainbow (Ma et al. Nat Biotechnol, 34 (2016), pp. 528-530), CRISPR-Sirius (Nat Methods, 15 (2018), pp. 928-931), Casilio (Cheng et al. Cell Res, 26 (2016), pp. 254-257), Halo-Tag based genomic loci visualization techniques (e.g., Deng et al. 2015. PNAS USA 112 (38): 11870-11875; Knight et al., Science, 350 (2015), pp. 823-826), RNA-aptamer based methods (e.g. Ma et al., ll Biol, 214 (2016), pp. 529-537), molecular beacon-based methods (e.g. Zhao et al. Bioials, 100 (2016), pp. 172-183; Wu et al. Nucleic Acids Res (2018)), Quantum Dot-based systems (e.g. Ma et al. Anal Chem, 2017), pp. 12896-12901), multiplexed methods (e.g. Ma et al., Proc Natl AcadU S A, 112 (2015), pp. 3002-3007; Fu et al. Nat Commun, 7 (2016), p. 11707; Ma et al. Nat Biotechnol, 34 (2016), pp. 528-530; Shao et al. Nucleic Acids Res, 44 (2016), Article e86); Wang et al. Sci Rep, 6 (2016), p. 26857), ç, and other in situ CRISPR-hybridization based methods (e.g. Chen et al. Cell, 155 (2013), 479-1491; Gu et al. Science, 359 (2018), pp. 1050-1055; Tanebaum et al. Cell, 159 (2014), pp. 635-646; Ye et al. Protein Cell, 8 (2017), pp. 853-855; Chen et al. Nat Commun, 9 (2018), p. 5065; Shao et al. ACS Synth Biol (2017); Fu et al. Nat Commun, 7 (2016), p. 11707; Shao et al. Nucleic Acids Res, 44 (2016), Article e86; Wang et al., Sci Rep, 6 (2016), p. 26857), all of which are incorporated by reference herein as if expressed in their entirety and whose teachings can be adapted to the compositions, systems, and components thereof described herein in view of the description herein.

[0700] In an embodiment, the composition, system, or component thereof can be used in a detection method, such as an in situ detection method described herein. In an embodiment, the composition, system, or component thereof can include a catalytically inactivate Cas effector described herein and use this system in detection methods such as fluorescence in situ hybridization (FISH) or any other described herein. In an embodiment, the inactivated Cas effector, which lacks the ability to produce DNA double-strand breaks may be fused with a marker, such as fluorescent protein, such as the enhanced green fluorescent protein (eEGFP) and co-expressed with small guide molecules, e.g., guide RNAs, to target pericentric, centric and telomeric repeats in vivo. The dCas effector or system thereof can be used to visualize both repetitive sequences and individual genes in the human genome. Such new applications of labelled dCas effector and compositions, systems, thereof can be important in imaging cells and studying the functional nuclear architecture, especially in cases with a small nucleus volume or complex 3-D structures.

### Cell Selection

[0701] In an embodiment, the compositions, systems, and/or components thereof described herein can be used in a method to screen and/or select cells. In an embodiment, composition, system-based screening/selection method can be used to identify diseased cells in a cell population. In an embodiment, selection of the cells results in a modification in the cells such that the selected cells die. In this way, diseased cells can be identified, and removed from the healthy cell population. In an embodiment, the diseased cells can be a cancer cell, pre-cancerous cell, a virus or other pathogenic organism infected cells, or otherwise abnormal cell. In an embodiment, the modification can impart another detectable change in the cells to be selected (e.g., a functional change and/or genomic barcode) that facilitates selection of the desired cells. In an embodiment a negative selection scheme can be used to obtain a desired cell population. In these embodiments, the cells to be selected against are modified, thus can be removed from the cell population based on their death or identification or sorting based the detectable change imparted on the cells. Thus, in these embodiments, the remaining cells after selection are the desired cell population.

[0702] In an embodiment, a method of selecting one or more cell(s) containing a polynucleotide modification can include: introducing one or more composition, system(s), and/or components thereof, and/or vectors or vector systems into the cell(s), wherein the composition, system(s), and/or components thereof, and/or vectors or vector systems contains and/or is capable of expressing one or more of: a Cas effector, a guide sequence optionally linked to a tracr mate sequence, a tracr sequence, and an recombination template; wherein, for example that which is being expressed is within and expressed in vivo by the composition, system, vector or vector system and/or the recombination template comprises the one or more mutations that abolish Cas effector cleavage; allowing homologous recombination of the recombination template with the target polynucleotide in the cell(s) to be selected; allowing a composition, system, or complex to bind to a target polynucleotide to effect cleavage of the target polynucleotide within said gene, wherein the AAV-complex comprises the Cas effector complexed with (1) the guide sequence that is hybridized to the target sequence within the target polynucleotide, and (2) the tracr mate sequence that is hybridized to the tracr sequence, wherein binding of the complex to the target polynucleotide induces cell death or imparts some other detectable change to the cell, thereby allowing one or more cell(s) in which one or more mutations have been introduced to be selected. In an embodiment, the cell to be selected may be a eukaryotic cell. In an embodiment, the cell to be selected may be a prokaryotic cell. Selection of specific cells via the methods herein can be performed without requiring a selection marker or a two-step process that may include a counter-selection system.

### Therapeutic Agent Development

[0703] The compositions, systems, and components thereof described herein can be used to develop CRISPR-Cas-based and non-CRISPR-Cas-based biologically active agents, such as small molecule therapeutics. Thus, described herein are methods for developing a biologically active agent that modulates a cell function and/or signaling event associated with a disease and/or disease gene. In an embodiment, the method comprises (a) contacting a test compound with a diseased cell and/or a cell containing a disease gene cell; and (b) detecting a change in a readout that is indicative of a reduction or an augmentation of a cell signaling event or other cell functionality associated with said disease or disease gene, thereby developing said biologically active agent that modulates said cell signaling event or other functionality associated with said disease gene. In an embodiment, the diseased cell is a model cell described elsewhere herein. In an embodiment, the diseased cell is a diseased cell isolated from a subject in need of treatment. In an embodiment, the test compound is a small molecule agent. In an embodiment, test compound is a small molecule agent. In an embodiment, the test compound is a biologic molecule agent.

[0704] In an embodiment, the method involves developing a therapeutic based on the composition, system, described herein. In an embodiment, the therapeutic comprises a Cas effector and/or a guide molecule, e.g., guide RNA, capable of hybridizing to a target sequence of interest. In an embodiment, the therapeutic is a vector or vector system that can contain a) a first regulatory element operably linked to a nucleotide sequence encoding the Cas effector protein(s); and b) a second regulatory element operably linked to one or more nucleotide sequences encoding one or more nucleic acid molecules comprising a guide molecule, e.g., guide RNA, comprising a guide sequence, a direct repeat sequence; wherein components (a) and (b) are located on same or different vectors. In an embodiment, the biologically active agent is a composition comprising a delivery system operably configured to deliver composition, system, or components thereof, and/or or one or more polynucleotide sequences, vectors, or vector systems containing or encoding said components into a cell and capable of forming a complex with the components of the composition and system herein, and wherein said complex is operable in the cell. In an embodiment, the complex can include the Cas effector protein(s) as described herein, guide molecule, e.g., guide RNA, comprising the guide sequence, and a direct repeat sequence. In any such compositions, the delivery system can be a yeast system, a lipofection system, a microinjection system, a biolistic system, virosomes, liposomes, immunoliposomes, polycations, lipid: nucleic acid conjugates or artificial virions, or any other system as described herein. In an embodiment, the delivery is via a particle, a nanoparticle, a lipid or a cell penetrating peptide (CPP).

[0705] Also described herein are methods for developing or designing a composition, system, optionally a composition, system, based therapy or therapeutic, comprising (a) selecting for a (therapeutic) locus of interest gRNA target sites, wherein said target sites have minimal sequence variation across a population, and from said selected target sites subselecting target sites, wherein a gRNA directed against said target sites recognizes a minimal number of off-target sites across said population, or (b) selecting for a (therapeutic) locus of interest gRNA target sites, wherein said target sites have minimal sequence variation across a population, or selecting for a (therapeutic) locus of interest gRNA target sites, wherein a gRNA directed against said target sites recognizes a minimal number of off-target sites across said population, and optionally estimating the number of (sub) selected target sites needed to treat or otherwise modulate or manipulate a population, and optionally validating one or more of the (sub) selected target sites for an individual subject, optionally designing one or more gRNA recognizing one or more of said (sub) selected target sites.

[0706] In an embodiment, the method for developing or designing a gRNA for use in a composition, system, optionally a composition, system, based therapy or therapeutic, can include (a) selecting for a (therapeutic) locus of interest gRNA target sites, wherein said target sites have minimal sequence variation across a population, and from said selected target sites subselecting target sites, wherein a gRNA directed against said target sites recognizes a minimal number of off-target sites across said population, or (b) selecting for a (therapeutic) locus of interest gRNA target sites, wherein said target sites have minimal sequence variation across a population, or selecting for a (therapeutic) locus of interest gRNA target sites, wherein a gRNA directed against said target sites recognizes a minimal number of off-target sites across said population, and optionally estimating the number of (sub) selected target sites needed to treat or otherwise modulate or manipulate a population, optionally validating one or more of the (sub) selected target sites for an individual subject, optionally designing one or more gRNA recognizing one or more of said (sub) selected target sites.

[0707] In an embodiment, the method for developing or designing a composition, system, optionally a composition, system, based therapy or therapeutic in a population, can include (a) selecting for a (therapeutic) locus of interest gRNA target sites, wherein said target sites have minimal sequence variation across a population, and from said selected target sites subselecting target sites, wherein a gRNA directed against said target sites recognizes a minimal number of off-target sites across said population, or (b) selecting for a (therapeutic) locus of interest gRNA target sites, wherein said target sites have minimal sequence variation across a population, or selecting for a (therapeutic) locus of interest gRNA target sites, wherein a gRNA directed against said target sites recognizes a minimal number of off-target sites across said population, and optionally estimating the number of (sub) selected target sites needed to treat or otherwise modulate or manipulate a population, optionally validating one or more of the (sub) selected target sites for an individual subject, optionally designing one or more gRNA recognizing one or more of said (sub) selected target sites.

[0708] In an embodiment the method for developing or designing a gRNA for use in a composition, system, optionally a composition, system, based therapy or therapeutic in a population, can include (a) selecting for a (therapeutic) locus of interest gRNA target sites, wherein said target sites have minimal sequence variation across a population, and from said selected target sites subselecting target sites, wherein a gRNA directed against said target sites recognizes a minimal number of off-target sites across said population, or (b) selecting for a (therapeutic) locus of interest gRNA target sites, wherein said target sites have minimal sequence variation across a population, or selecting for a (therapeutic) locus of interest gRNA target sites, wherein a gRNA directed against said target sites recognizes a minimal number of off-target sites across said population, and optionally estimating the number of (sub) selected target sites needed to treat or otherwise modulate or manipulate a population, optionally validating one or more of the (sub) selected target sites for an individual subject, optionally designing one or more gRNA recognizing one or more of said (sub) selected target sites.

[0709] In an embodiment, the method for developing or designing a composition, system, such as a composition, system, based therapy or therapeutic, optionally in a population; or for developing or designing a gRNA for use in a composition, system, optionally a composition, system, based therapy or therapeutic, optionally in a population, can include selecting a set of target sequences for one or more loci in a target population, wherein the target sequences do not contain variants occurring above a threshold allele frequency in the target population (i.e., platinum target sequences); removing from said selected (platinum) target sequences any target sequences having high frequency off-target candidates (relative to other (platinum) targets in the set) to define a final target sequence set; preparing one or more, such as a set of compositions, systems, based on the final target sequence set, optionally wherein a number of CRISP-Cas systems prepared is based (at least in part) on the size of a target population.

[0710] In an embodiment, off-target candidates/off-targets, PFS, PAM restrictiveness, target cleavage efficiency, or effector protein specificity is identified or determined using a sequencing-based double-strand break (DSB) detection assay, such as described herein elsewhere. In an embodiment, off-target candidates/off-targets are identified or determined using a sequencing-based double-strand break (DSB) detection assay, such as described herein elsewhere. In an embodiment, off-targets, or off target candidates have at least 1, preferably 1-3, mismatches or (distal) PFS or PAM mismatches, such as 1 or more, such as 1, 2, 3, or more (distal) PFS or PAM mismatches. In an embodiment, sequencing-based DSB detection assay comprises labeling a site of a DSB with an adapter comprising a primer binding site, labeling a site of a DSB with a barcode or unique molecular identifier, or combination thereof, as described herein elsewhere.

[0711] It will be understood that the guide sequence of the gRNA is 100% complementary to the target site, i.e., does not comprise any mismatch with the target site. It will be further understood that “recognition” of an (off-) target site by a gRNA presupposes composition, system, functionality, means the (off-) target site is only recognized by a gRNA if binding of the gRNA to the (off-) target site leads to composition, system, activity (such as induction of single or double strand DNA cleavage, transcriptional modulation, etc.).

[0712] In an embodiment, the target sites having minimal sequence variation across a population are characterized by absence of sequence variation in at least 99%, preferably at least 99.9%, more preferably at least 99.99% of the population. In an embodiment, optimizing target location comprises selecting target sequences or loci having an absence of sequence variation in at least 99%, %, preferably at least 99.9%, more preferably at least 99.99% of a population. These targets are referred to herein elsewhere also as “platinum targets”. In an embodiment, said population comprises at least 1000 individuals, such as at least 5000 individuals, such as at least 10000 individuals, such as at least 50000 individuals.

[0713] In an embodiment, the off-target sites are characterized by at least one mismatch between the off-target site and the gRNA. In an embodiment, the off-target sites are characterized by at most five, preferably at most four, more preferably at most three mismatches between the off-target site and the gRNA. In an embodiment, the off-target sites are characterized by at least one mismatch between the off-target site and the gRNA and by at most five, preferably at most four, more preferably at most three mismatches between the off-target site and the gRNA.

[0714] In an embodiment, said minimal number of off-target sites across said population is determined for high-frequency haplotypes in said population. In an embodiment, said minimal number of off-target sites across said population is determined for high-frequency haplotypes of the off-target site locus in said population. In an embodiment, said minimal number of off-target sites across said population is determined for high-frequency haplotypes of the target site locus in said population. In an embodiment, the high-frequency haplotypes are characterized by occurrence in at least 0.1% of the population.

[0715] In an embodiment, the number of (sub) selected target sites needed to treat a population is estimated based on based low frequency sequence variation, such as low frequency sequence variation captured in large scale sequencing datasets. In an embodiment, the number of (sub) selected target sites needed to treat a population of a given size is estimated.

[0716] In an embodiment, the method further comprises obtaining genome sequencing data of a subject to be treated; and treating the subject with a composition, system, selected from the set of compositions, systems, wherein the composition, system, selected is based (at least in part) on the genome sequencing data of the individual. In an embodiment, the ((sub) selected) target is validated by genome sequencing, preferably whole genome sequencing.

[0717] In an embodiment, target sequences or loci as described herein are (further) selected based on optimization of one or more parameters, such as PFS or PAM type (natural or modified), PFS or PAM nucleotide content, PFS or PAM length, target sequence length, PFS or PAM restrictiveness, target cleavage efficiency, and target sequence position within a gene, a locus or other genomic region. Methods of optimization are discussed in greater detail elsewhere herein.

[0718] In an embodiment, target sequences or loci as described herein are (further) selected based on optimization of one or more of target loci location, target length, target specificity, and PFS or PAM characteristics. As used herein, PFS or PAM characteristics may comprise for instance PFS or PAM sequence, PFS or PAM length, and/or PFS or PAM GC contents. In an embodiment, optimizing PFS or PAM characteristics comprises optimizing nucleotide content of a PFS or PAM. In an embodiment, optimizing nucleotide content of PFS or PAM is selecting a PFS or PAM with a motif that maximizes abundance in the one or more target loci, minimizes mutation frequency, or both. Minimizing mutation frequency can for instance be achieved by selecting PFS or PAM sequences devoid of or having low or minimal CpG.

[0719] In an embodiment, the effector protein for each composition and system, in the set of compositions, systems, is selected based on optimization of one or more parameters selected from the group consisting of; effector protein size, ability of effector protein to access regions of high chromatin accessibility, degree of uniform enzyme activity across genomic targets, epigenetic tolerance, mismatch/budge tolerance, effector protein specificity, effector protein stability or half-life, effector protein immunogenicity or toxicity. Methods of optimization are discussed in greater detail elsewhere herein.

### Optimization of the Systems

[0720] The methods of the present invention can involve optimization of selected parameters or variables associated with the composition, system, and/or its functionality, as described herein further elsewhere. Optimization of the composition, system, in the methods as described herein may depend on the target(s), such as the therapeutic target or therapeutic targets, the mode or type of composition, system, modulation, such as composition, system, based therapeutic target(s) modulation, modification, or manipulation, as well as the delivery of the composition, system, components. One or more targets may be selected, depending on the genotypic and/or phenotypic outcome. For instance, one or more therapeutic targets may be selected, depending on (genetic) disease etiology or the desired therapeutic outcome. The (therapeutic) target(s) may be a single gene, locus, or other genomic site, or may be multiple genes, loci or other genomic sites. As is known in the art, a single gene, locus, or other genomic site may be targeted more than once, such as by use of multiple gRNAs.

[0721] The activity of the composition and/or system, such as CRISPR-Cas system-based therapy or therapeutics may involve target disruption, such as target mutation, such as leading to gene knockout. The activity of the composition and/or system, such as CRISPR-Cas system-based therapy or therapeutics may involve replacement of particular target sites, such as leading to target correction. CRISPR-Cas system-based therapy or therapeutics may involve removal of particular target sites, such as leading to target deletion. The activity of the composition and/or system, such as CRISPR-Cas system-based therapy or therapeutics may involve modulation of target site functionality, such as target site activity or accessibility, leading for instance to (transcriptional and/or epigenetic) gene or genomic region activation or gene or genomic region silencing. The skilled person will understand that modulation of target site functionality may involve CRISPR effector mutation (such as for instance generation of a catalytically inactive CRISPR effector) and/or functionalization (such as for instance fusion of the CRISPR effector with a heterologous functional domain, such as a transcriptional activator or repressor), as described herein elsewhere.

[0722] Accordingly, in an embodiment, the invention relates to a method as described herein, comprising selection of one or more (therapeutic) target, selecting one or more functionality of the composition and/or system, and optimization of selected parameters or variables associated with the CRISPR-Cas system and/or its functionality. In a related aspect, the invention relates to a method as described herein, comprising (a) selecting one or more (therapeutic) target loci, (b) selecting one or more CRISPR-Cas system functionalities, (c) optionally selecting one or more modes of delivery, and preparing, developing, or designing a CRISPR-Cas system selected based on steps (a)-(c).

[0723] In an embodiment, the functionality of the composition and/or system comprises genomic mutation. In an embodiment, the functionality of the composition and/or system comprises single genomic mutation. In an embodiment, the functionality of the composition and/or system functionality comprises multiple genomic mutation. In an embodiment, the functionality of the composition and/or system comprises gene knockout. In an embodiment, the functionality of the composition and/or system comprises single gene knockout. In an embodiment, the functionality of the composition and/or system comprises multiple gene knockout. In an embodiment, the functionality of the composition and/or system comprises gene correction. In an embodiment, the functionality of the composition and/or system comprises single gene correction. In an embodiment, the functionality of the composition and/or system comprises multiple gene correction. In an embodiment, the functionality of the composition and/or system comprises genomic region correction. In an embodiment, the functionality of the composition and/or system comprises single genomic region correction. In an embodiment, the functionality of the composition and/or system comprises multiple genomic region correction. In an embodiment, the functionality of the composition and/or system comprises gene deletion. In an embodiment, the functionality of the composition and/or system comprises single gene deletion. In an embodiment, the functionality of the composition and/or system comprises multiple gene deletion. In an embodiment, the functionality of the composition and/or system comprises genomic region deletion. In an embodiment, the functionality of the composition and/or system comprises single genomic region deletion. In an embodiment, the functionality of the composition and/or system comprises multiple genomic region deletion. In an embodiment, the functionality of the composition and/or system comprises modulation of gene or genomic region functionality. In an embodiment, the functionality of the composition and/or system comprises modulation of single gene or genomic region functionality. In an embodiment, the functionality of the composition and/or system comprises modulation of multiple gene or genomic region functionality. In an embodiment, the functionality of the composition and/or system comprises gene or genomic region functionality, such as gene or genomic region activity. In an embodiment, the functionality of the composition and/or system comprises single gene or genomic region functionality, such as gene or genomic region activity. In an embodiment, the functionality of the composition and/or system comprises multiple gene or genomic region functionality, such as gene or genomic region activity. In an embodiment, the functionality of the composition and/or system comprises modulation gene activity or accessibility optionally leading to transcriptional and/or epigenetic gene or genomic region activation or gene or genomic region silencing. In an embodiment, the functionality of the composition and/or system comprises modulation single gene activity or accessibility optionally leading to transcriptional and/or epigenetic gene or genomic region activation or gene or genomic region silencing. In an embodiment, the functionality of the composition and/or system comprises modulation multiple gene activity or accessibility optionally leading to transcriptional and/or epigenetic gene or genomic region activation or gene or genomic region silencing.

[0724] Optimization of selected parameters or variables in the methods as described herein may result in optimized or improved the system, such as CRISPR-Cas system-based therapy or therapeutic, specificity, efficacy, and/or safety. In an embodiment, one or more of the following parameters or variables are taken into account, are selected, or are optimized in the methods of the invention as described herein: Cas protein allosteric interactions, Cas protein functional domains and functional domain interactions, CRISPR effector specificity, gRNA specificity, CRISPR-Cas complex specificity, PFS or PAM restrictiveness, PFS or PAM type (natural or modified), PFS or PAM nucleotide content, PFS or PAM length, CRISPR effector activity, gRNA activity, CRISPR-Cas complex activity, target cleavage efficiency, target site selection, target sequence length, ability of effector protein to access regions of high chromatin accessibility, degree of uniform enzyme activity across genomic targets, epigenetic tolerance, mismatch/budge tolerance, CRISPR effector stability, CRISPR effector mRNA stability, gRNA stability, CRISPR-Cas complex stability, CRISPR effector protein or mRNA immunogenicity or toxicity, gRNA immunogenicity or toxicity, CRISPR-Cas complex immunogenicity or toxicity, CRISPR effector protein or mRNA dose or titer, gRNA dose or titer, CRISPR-Cas complex dose or titer, CRISPR effector protein size, CRISPR effector expression level, gRNA expression level, CRISPR-Cas complex expression level, CRISPR effector spatiotemporal expression, gRNA spatiotemporal expression, CRISPR-Cas comples spatiotemporal expression.

[0725] By means of example, and without limitation, parameter or variable optimization may be achieved as follows. CRISPR effector specificity may be optimized by selecting the most specific CRISPR effector. This may be achieved for instance by selecting the most specific CRISPR effector ortholog or by specific CRISPR effector mutations which increase specificity. gRNA specificity may be optimized by selecting the most specific gRNA. This can be achieved for instance by selecting gRNA having low homology, i.e., at least one or preferably more, such as at least 2, or preferably at least 3, mismatches to off-target sites. CRISPR-Cas complex specificity may be optimized by increasing CRISPR effector specificity and/or gRNA specificity as above. PFS or PAM restrictiveness may be optimized by selecting a CRISPR effector having to most restrictive PFS or PAM recognition. This can be achieved for instance by selecting a CRISPR effector ortholog having more restrictive PFS or PAM recognition or by specific CRISPR effector mutations which increase or alter PFS or PAM restrictiveness. PFS or PAM type may be optimized for instance by selecting the appropriate CRISPR effector, such as the appropriate CRISPR effector recognizing a desired PFS or PAM type. The CRISPR effector or PFS or PAM type may be naturally occurring or may for instance be optimized based on CRISPR effector mutants having an altered PFS or PAM recognition, or PFS or PAM recognition repertoire. PFS or PAM nucleotide content may for instance be optimized by selecting the appropriate CRISPR effector, such as the appropriate CRISPR effector recognizing a desired PFS or PAM nucleotide content. The CRISPR effector or PFS or PAM type may be naturally occurring or may for instance be optimized based on CRISPR effector mutants having an altered PFS or PAM recognition, or PAM recognition repertoire. PFS or PAM length may for instance be optimized by selecting the appropriate CRISPR effector, such as the appropriate CRISPR effector recognizing a desired PFS or PAM nucleotide length. The CRISPR effector or PFS or PAM type may be naturally occurring or may for instance be optimized based on CRISPR effector mutants having an altered PFS or PAM recognition, or PFS or PAM recognition repertoire.

[0726] Target length or target sequence length may be optimized, for instance, by selecting the appropriate CRISPR effector, such as the appropriate CRISPR effector recognizing a desired target or target sequence nucleotide length. Alternatively, or in addition, the target (sequence) length may be optimized by providing a target having a length deviating from the target (sequence) length typically associated with the CRISPR effector, such as the naturally occurring CRISPR effector. The CRISPR effector or target (sequence) length may be naturally occurring or may for instance be optimized based on CRISPR effector mutants having an altered target (sequence) length recognition, or target (sequence) length recognition repertoire. For instance, increasing or decreasing target (sequence) length may influence target recognition and/or off-target recognition. CRISPR effector activity may be optimized by selecting the most active CRISPR effector. This may be achieved for instance by selecting the most active CRISPR effector ortholog or by specific CRISPR effector mutations which increase activity. The ability of the CRISPR effector protein to access regions of high chromatin accessibility, may be optimized by selecting the appropriate CRISPR effector or mutant thereof, and can consider the size of the CRISPR effector, charge, or other dimensional variables etc. The degree of uniform CRISPR effector activity may be optimized by selecting the appropriate CRISPR effector or mutant thereof, and can consider CRISPR effector specificity and/or activity, PFS or PAM specificity, target length, mismatch tolerance, epigenetic tolerance, CRISPR effector and/or gRNA stability and/or half-life, CRISPR effector and/or gRNA immunogenicity and/or toxicity, etc. gRNA activity may be optimized by selecting the most active gRNA. In an embodiment, this can be achieved by increasing gRNA stability through RNA modification. CRISPR-Cas complex activity may be optimized by increasing CRISPR effector activity and/or gRNA activity as above.

[0727] The target site selection may be optimized by selecting the optimal position of the target site within a gene, locus or other genomic region. The target site selection may be optimized by optimizing target location comprises selecting a target sequence with a gene, locus, or other genomic region having low variability. This may be achieved for instance by selecting a target site in an early and/or conserved exon or domain (i.e., having low variability, such as polymorphisms, within a population).

[0728] In an embodiment, optimizing target (sequence) length comprises selecting a target sequence within one or more target loci between 5 and 25 nucleotides. In an embodiment, a target sequence is 20 nucleotides.

[0729] In an embodiment, optimizing target specificity comprises selecting targets loci that minimize off-target candidates.

[0730] In an embodiment, the target site may be selected by minimization of off-target effects (e.g., off-targets qualified as having 1-5, 1-4, or preferably 1-3 mismatches compared to target and/or having one or more PFS or PAM mismatches, such as distal PFS or PAM mismatches), preferably also considering variability within a population. CRISPR effector stability may be optimized by selecting CRISPR effector having appropriate half-life, such as preferably a short half-life while still capable of maintaining sufficient activity. In an embodiment, this can be achieved by selecting an appropriate CRISPR effector ortholog having a specific half-life or by specific CRISPR effector mutations or modifications which affect half-life or stability, such as inclusion (e.g. fusion) of stabilizing or destabilizing domains or sequences. CRISPR effector mRNA stability may be optimized by increasing or decreasing CRISPR effector mRNA stability. In an embodiment, this can be achieved by increasing or decreasing CRISPR effector mRNA stability through mRNA modification. gRNA stability may be optimized by increasing or decreasing gRNA stability. In an embodiment, this can be achieved by increasing or decreasing gRNA stability through RNA modification. CRISPR-Cas complex stability may be optimized by increasing or decreasing CRISPR effector stability and/or gRNA stability as above. CRISPR effector protein or mRNA immunogenicity or toxicity may be optimized by decreasing CRISPR effector protein or mRNA immunogenicity or toxicity. In an embodiment, this can be achieved by mRNA or protein modifications. Similarly, in case of DNA based expression systems, DNA immunogenicity or toxicity may be decreased. gRNA immunogenicity or toxicity may be optimized by decreasing gRNA immunogenicity or toxicity. In an embodiment, this can be achieved by gRNA modifications. Similarly, in case of DNA based expression systems, DNA immunogenicity or toxicity may be decreased. CRISPR-Cas complex immunogenicity or toxicity may be optimized by decreasing CRISPR effector immunogenicity or toxicity and/or gRNA immunogenicity or toxicity as above, or by selecting the least immunogenic or toxic CRISPR effector/gRNA combination. Similarly, in the case of DNA based expression systems, DNA immunogenicity or toxicity may be decreased. CRISPR effector protein or mRNA dose or titer may be optimized by selecting dosage or titer to minimize toxicity and/or maximize specificity and/or efficacy. gRNA dose or titer may be optimized by selecting dosage or titer to minimize toxicity and/or maximize specificity and/or efficacy. CRISPR-Cas complex dose or titer may be optimized by selecting dosage or titer to minimize toxicity and/or maximize specificity and/or efficacy. CRISPR effector protein size may be optimized by selecting minimal protein size to increase efficiency of delivery, in particular for virus mediated delivery. CRISPR effector, gRNA, or CRISPR-Cas complex expression level may be optimized by limiting (or extending) the duration of expression and/or limiting (or increasing) expression level. This may be achieved for instance by using self-inactivating compositions, systems, such as including a self-targeting (e.g. CRISPR effector targeting) gRNA, by using viral vectors having limited expression duration, by using appropriate promoters for low (or high) expression levels, by combining different delivery methods for individual CRISP-Cas system components, such as virus mediated delivery of CRISPR-effector encoding nucleic acid combined with non-virus mediated delivery of gRNA, or virus mediated delivery of gRNA combined with non-virus mediated delivery of CRISPR effector protein or mRNA. CRISPR effector, gRNA, or CRISPR-Cas complex spatiotemporal expression may be optimized by appropriate choice of conditional and/or inducible expression systems, including controllable CRISPR effector activity optionally a destabilized CRISPR effector and/or a split CRISPR effector, and/or cell- or tissue-specific expression systems.

[0731] In an embodiment, the invention relates to a method as described herein, comprising selection of one or more (therapeutic) target, selecting the functionality of the composition and/or system, selecting CRISPR-Cas system mode of delivery, selecting CRISPR-Cas system delivery vehicle or expression system, and optimization of selected parameters or variables associated with the CRISPR-Cas system and/or its functionality, optionally wherein the parameters or variables are one or more selected from CRISPR effector specificity, gRNA specificity, CRISPR-Cas complex specificity, PFS or PAM restrictiveness, PFS or PAM type (natural or modified), PFS or PAM nucleotide content, PFS or PAM length, CRISPR effector activity, gRNA activity, CRISPR-Cas complex activity, target cleavage efficiency, target site selection, target sequence length, ability of effector protein to access regions of high chromatin accessibility, degree of uniform enzyme activity across genomic targets, epigenetic tolerance, mismatch/budge tolerance, CRISPR effector stability, CRISPR effector mRNA stability, gRNA stability, CRISPR-Cas complex stability, CRISPR effector protein or mRNA immunogenicity or toxicity, gRNA immunogenicity or toxicity, CRISPR-Cas complex immunogenicity or toxicity, CRISPR effector protein or mRNA dose or titer, gRNA dose or titer, CRISPR-Cas complex dose or titer, CRISPR effector protein size, CRISPR effector expression level, gRNA expression level, CRISPR-Cas complex expression level, CRISPR effector spatiotemporal expression, gRNA spatiotemporal expression, CRISPR-Cas complex spatiotemporal expression.

[0732] In an embodiment, the invention relates to a method as described herein, comprising selecting one or more (therapeutic) target, selecting one or more the functionality of the composition and/or system, selecting one or more CRISPR-Cas system mode of delivery, selecting one or more delivery vehicle or expression system, and optimization of selected parameters or variables associated with the CRISPR-Cas system and/or its functionality, wherein specificity, efficacy, and/or safety are optimized, and optionally wherein optimization of specificity comprises optimizing one or more parameters or variables selected from CRISPR effector specificity, gRNA specificity, CRISPR-Cas complex specificity, PFS or PAM restrictiveness, PFS or PAM type (natural or modified), PFS or PAM nucleotide content, PFS or PAM length, wherein optimization of efficacy comprises optimizing one or more parameters or variables selected from CRISPR effector activity, gRNA activity, CRISPR-Cas complex activity, target cleavage efficiency, target site selection, target sequence length, CRISPR effector protein size, ability of effector protein to access regions of high chromatin accessibility, degree of uniform enzyme activity across genomic targets, epigenetic tolerance, mismatch/budge tolerance, and wherein optimization of safety comprises optimizing one or more parameters or variables selected from CRISPR effector stability, CRISPR effector mRNA stability, gRNA stability, CRISPR-Cas complex stability, CRISPR effector protein or mRNA immunogenicity or toxicity, gRNA immunogenicity or toxicity, CRISPR-Cas complex immunogenicity or toxicity, CRISPR effector protein or mRNA dose or titer, gRNA dose or titer, CRISPR-Cas complex dose or titer, CRISPR effector expression level, gRNA expression level, CRISPR-Cas complex expression level, CRISPR effector spatiotemporal expression, gRNA spatiotemporal expression, CRISPR-Cas complex spatiotemporal expression.

[0733] In an embodiment, the invention relates to a method as described herein, comprising optionally selecting one or more (therapeutic) target, optionally selecting one or more the functionality of the composition and/or system, optionally selecting one or more mode of delivery, optionally selecting one or more delivery vehicle or expression system, and optimization of selected parameters or variables associated with the system and/or its functionality, wherein specificity, efficacy, and/or safety are optimized, and optionally wherein optimization of specificity comprises optimizing one or more parameters or variables selected from CRISPR effector specificity, gRNA specificity, CRISPR-Cas complex specificity, PFS or PAM restrictiveness, PFS or PAM type (natural or modified), PFS or PAM nucleotide content, PFS or PAM length, wherein optimization of efficacy comprises optimizing one or more parameters or variables selected from CRISPR effector activity, gRNA activity, CRISPR-Cas complex activity, target cleavage efficiency, target site selection, target sequence length, CRISPR effector protein size, ability of effector protein to access regions of high chromatin accessibility, degree of uniform enzyme activity across genomic targets, epigenetic tolerance, mismatch/budge tolerance, and wherein optimization of safety comprises optimizing one or more parameters or variables selected from CRISPR effector stability, CRISPR effector mRNA stability, gRNA stability, CRISPR-Cas complex stability, CRISPR effector protein or mRNA immunogenicity or toxicity, gRNA immunogenicity or toxicity, CRISPR-Cas complex immunogenicity or toxicity, CRISPR effector protein or mRNA dose or titer, gRNA dose or titer, CRISPR-Cas complex dose or titer, CRISPR effector expression level, gRNA expression level, CRISPR-Cas complex expression level, CRISPR effector spatiotemporal expression, gRNA spatiotemporal expression, CRISPR-Cas complex spatiotemporal expression.

[0734] In an embodiment, the invention relates to a method as described herein, comprising optimization of selected parameters or variables associated with the system and/or its functionality, wherein specificity, efficacy, and/or safety are optimized, and optionally wherein optimization of specificity comprises optimizing one or more parameters or variables selected from CRISPR effector specificity, gRNA specificity, CRISPR-Cas complex specificity, PFS or PAM restrictiveness, PFS or PAM type (natural or modified), PFS or PAM nucleotide content, PFS or PAM length, wherein optimization of efficacy comprises optimizing one or more parameters or variables selected from CRISPR effector activity, gRNA activity, CRISPR-Cas complex activity, target cleavage efficiency, target site selection, target sequence length, CRISPR effector protein size, ability of effector protein to access regions of high chromatin accessibility, degree of uniform enzyme activity across genomic targets, epigenetic tolerance, mismatch/budge tolerance, and wherein optimization of safety comprises optimizing one or more parameters or variables selected from CRISPR effector stability, CRISPR effector mRNA stability, gRNA stability, CRISPR-Cas complex stability, CRISPR effector protein or mRNA immunogenicity or toxicity, gRNA immunogenicity or toxicity, CRISPR-Cas complex immunogenicity or toxicity, CRISPR effector protein or mRNA dose or titer, gRNA dose or titer, CRISPR-Cas complex dose or titer, CRISPR effector expression level, gRNA expression level, CRISPR-Cas complex expression level, CRISPR effector spatiotemporal expression, gRNA spatiotemporal expression, CRISPR-Cas complex spatiotemporal expression.

[0735] It will be understood that the parameters or variables to be optimized as well as the nature of optimization may depend on the (therapeutic) target, the functionality of the composition and/or system, the system mode of delivery, and/or the CRISPR-Cas system delivery vehicle or expression system.

[0736] In an embodiment, the invention relates to a method as described herein, comprising optimization of gRNA specificity at the population level. Preferably, said optimization of gRNA specificity comprises minimizing gRNA target site sequence variation across a population and/or minimizing gRNA off-target incidence across a population.

[0737] In an embodiment, optimization can result in selection of a CRISPR-Cas effector that is naturally occurring or is modified. In an embodiment, optimization can result in selection of a CRISPR-Cas effector that has nuclease, nickase, deaminase, transposase, and/or has one or more effector functionalities deactivated or eliminated. In an embodiment, optimizing a PFS or PAM specificity can include selecting a CRISPR-Cas effector with a modified PFS or PAM specificity. In an embodiment, optimizing can include selecting a CRISPR-Cas effector having a minimal size. In an embodiment, optimizing effector protein stability comprises selecting an effector protein having a short half-life while maintaining sufficient activity, such as by selecting an appropriate CRISPR effector ortholog having a specific half-life or stability. In an embodiment, optimizing immunogenicity or toxicity comprises minimizing effector protein immunogenicity or toxicity by protein modifications. In an embodiment, optimizing functional specific comprises selecting a protein effector with reduced tolerance of mismatches and/or bulges between the guide molecule, e.g., guide RNA, and one or more target loci.

[0738] In an embodiment, optimizing efficacy comprises optimizing overall efficiency, epigenetic tolerance, or both. In an embodiment, maximizing overall efficiency comprises selecting an effector protein with uniform enzyme activity across target loci with varying chromatin complexity, selecting an effector protein with enzyme activity limited to areas of open chromatin accessibility. In an embodiment, chromatin accessibility is measured using one or more of ATAC-seq, or a DNA-proximity ligation assay. In an embodiment, optimizing epigenetic tolerance comprises optimizing methylation tolerance, epigenetic mark competition, or both. In an embodiment, optimizing methylation tolerance comprises selecting an effector protein that modify methylated DNA. In an embodiment, optimizing epigenetic tolerance comprises selecting an effector protein unable to modify silenced regions of a chromosome, selecting an effector protein able to modify silenced regions of a chromosome, or selecting target loci not enriched for epigenetic markers.

[0739] In an embodiment, selecting an optimized guide molecule, e.g., guide RNA, comprises optimizing gRNA stability, gRNA immunogenicity, or both, or other gRNA associated parameters or variables as described herein elsewhere.

[0740] In an embodiment, optimizing gRNA stability and/or gRNA immunogenicity comprises RNA modification, or other gRNA associated parameters or variables as described herein elsewhere. In an embodiment, the modification comprises removing 1-3 nucleotides form the 3′ end of a target complementarity region of the gRNA. In an embodiment, modification comprises an extended gRNA and/or trans RNA/DNA element that create stable structures in the gRNA that compete with gRNA base pairing at a target of off-target loci or extended complimentary nucleotides between the gRNA and target sequence, or both.

[0741] In an embodiment, the mode of delivery comprises delivering gRNA and/or CRISPR effector protein, delivering gRNA and/or CRISPR effector mRNA, or delivery gRNA and/or CRISPR effector as a DNA based expression system. In an embodiment, the mode of delivery further comprises selecting a delivery vehicle and/or expression systems from the group consisting of liposomes, lipid particles, nanoparticles, biolistics, or viral-based expression/delivery systems. In an embodiment, expression is spatiotemporal expression is optimized by choice of conditional and/or inducible expression systems, including controllable CRISPR effector activity optionally a destabilized CRISPR effector and/or a split CRISPR effector, and/or cell- or tissue-specific expression system.

[0742] The methods as described herein may further involve selection of the mode of delivery. In an embodiment, gRNA (and tracr, if and where needed, optionally provided as a sgRNA) and/or CRISPR effector protein are or are to be delivered. In an embodiment, gRNA (and tracr, if and where needed, optionally provided as a sgRNA) and/or CRISPR effector mRNA are or are to be delivered. In an embodiment, gRNA (and tracr, if and where needed, optionally provided as a sgRNA) and/or CRISPR effector provided in a DNA-based expression system are or are to be delivered. In an embodiment, delivery of the individual system components comprises a combination of the above modes of delivery. In an embodiment, delivery comprises delivering gRNA and/or CRISPR effector protein, delivering gRNA and/or CRISPR effector mRNA, or delivering gRNA and/or CRISPR effector as a DNA based expression system.

[0743] The methods as described herein may further involve selection of the CRISPR-Cas system delivery vehicle and/or expression system. Delivery vehicles and expression systems are described herein elsewhere. By means of example, delivery vehicles of nucleic acids and/or proteins include nanoparticles, liposomes, etc. Delivery vehicles for DNA, such as DNA-based expression systems include for instance biolistics, viral based vector systems (e.g., adenoviral, AAV, lentiviral), etc. the skilled person will understand that selection of the mode of delivery, as well as delivery vehicle or expression system may depend on for instance the cell or tissues to be targeted. In an embodiment, the delivery vehicle and/or expression system for delivering the compositions, systems, or components thereof comprises liposomes, lipid particles, nanoparticles, biolistics, or viral-based expression/delivery systems.

### Considerations for Therapeutic Applications

[0744] A consideration in genome editing therapy is the choice of sequence-specific nuclease, such as a variant of a Cas nuclease. Each nuclease variant may possess its own unique set of strengths and weaknesses, many of which must be balanced in the context of treatment to maximize therapeutic benefit. For a specific editing therapy to be efficacious, a sufficiently high level of modification must be achieved in target cell populations to reverse disease symptoms. This therapeutic modification ‘threshold’ is determined by the fitness of edited cells following treatment and the amount of gene product necessary to reverse symptoms. With regard to fitness, editing creates three potential outcomes for treated cells relative to their unedited counterparts: increased, neutral, or decreased fitness. In the case of increased fitness, corrected cells may be able and expand relative to their diseased counterparts to mediate therapy. In this case, where edited cells possess a selective advantage, even low numbers of edited cells can be amplified through expansion, providing a therapeutic benefit to the patient. Where the edited cells possess no change in fitness, an increase the therapeutic modification threshold can be warranted. As such, significantly greater levels of editing may be needed to treat diseases, where editing creates a neutral fitness advantage, relative to diseases where editing creates increased fitness for target cells. If editing imposes a fitness disadvantage, as would be the case for restoring function to a tumor suppressor gene in cancer cells, modified cells would be outcompeted by their diseased counterparts, causing the benefit of treatment to be low relative to editing rates. This may be overcome with supplemental therapies to increase the potency and/or fitness of the edited cells relative to the diseased counterparts.

[0745] In addition to cell fitness, the amount of gene product necessary to treat disease can also influence the minimal level of therapeutic genome editing that can treat or prevent a disease or a symptom thereof. In cases where a small change in the gene product levels can result in significant changes in clinical outcome, the minimal level of therapeutic genome editing is less relative to cases where a larger change in the gene product levels is needed to gain a clinically relevant response. In an embodiment, the minimal level of therapeutic genome editing can range from 0.1 to 1%, 1-5%, 5-10%, 10-15%, 15-20%, 20-25%, 25-30%, 30-35%, 35-40%, 40-45%. 45-50%, or 50-55%. Thus, where a small change in gene product levels can influence clinical outcomes and diseases where there is a fitness advantage for edited cells, are ideal targets for genome editing therapy, as the therapeutic modification threshold is low enough to permit a high chance of success.

[0746] The activity of NHEJ and HDR DSB repair can vary by cell type and cell state. NHEJ is not highly regulated by the cell cycle and is efficient across cell types, allowing for high levels of gene disruption in accessible target cell populations. In contrast, HDR acts primarily during S/G2 phase, and is therefore restricted to cells that are actively dividing, limiting treatments that require precise genome modifications to mitotic cells [Ciccia, A. & Elledge, S. J. Molecular cell 40, 179-204 (2010); Chapman, J. R., et al. Molecular cell 47, 497-510 (2012)].

[0747] The efficiency of correction via HDR may be controlled by the epigenetic state or sequence of the targeted locus, or the specific repair template configuration (single vs. double stranded, long vs. short homology arms) used [Hacein-Bey-Abina, S., et al. The New England journal of medicine 346, 1185-1193 (2002); Gaspar, H. B., et al. Lancet 364, 2181-2187 (2004); Beumer, K. J., et al. G3 (2013)]. The relative activity of NHEJ and HDR machineries in target cells may also affect gene correction efficiency, as these pathways may compete to resolve DSBs [Beumer, K. J., et al. Proceedings of the National Academy of Sciences of the United States of America 105, 19821-19826 (2008)]. HDR also imposes a delivery challenge not seen with NHEJ strategies, as it uses the concurrent delivery of nucleases and repair templates. Thus, these differences can be kept in mind when designing, optimizing, and/or selecting a CRISPR-Cas based therapeutic as described in greater detail elsewhere herein.

[0748] CRISPR-Cas-based polynucleotide modification application can include combinations of proteins, small RNA molecules, and/or repair templates, and can make, in an embodiment, delivery of these multiple parts substantially more challenging than, for example, traditional small molecule therapeutics. Two main strategies for delivery of compositions, systems, and components thereof have been developed: ex vivo and in vivo. In an embodiment of ex vivo treatments, diseased cells are removed from a subject, edited and then transplanted back into the patient. In other embodiments, cells from a healthy allogeneic donor are collected, modified using a CRISPR-Cas system or component thereof, to impart various functionalities and/or reduce immunogenicity, and administered to an allogeneic recipient in need of treatment. Ex vivo editing has the advantage of allowing the target cell population to be well defined and the specific dosage of therapeutic molecules delivered to cells to be specified. The latter consideration may be particularly important when off-target modifications are a concern, as titrating the amount of nuclease may decrease such mutations (Hsu et al., 2013). Another advantage of ex vivo approaches is the typically high editing rates that can be achieved, due to the development of efficient delivery systems for proteins and nucleic acids into cells in culture for research and gene therapy applications.

[0749] In vivo polynucleotide modification via compositions, systems, and/or components thereof involves direct delivery of the compositions, systems, and/or components thereof to cell types in their native tissues. In vivo polynucleotide modification via compositions, systems, and/or components thereof allows diseases in which the affected cell population is not amenable to ex vivo manipulation to be treated. Furthermore, delivering compositions, systems, and/or components thereof to cells in situ allows for the treatment of multiple tissue and cell types.

[0750] In an embodiment, such as those where viral vector systems are used to generate viral particles to deliver the CRISPR-Cas system and/or component thereof to a cell, the total cargo size of the CRISPR-Cas system and/or component thereof should be considered as vector systems can have limits on the size of a polynucleotide that can be expressed therefrom and/or packaged into cargo inside of a viral particle. In an embodiment, the tropism of a vector system, such as a viral vector system, should be considered as it can impact the cell type to which the CRISPR-Cas system or component thereof can be efficiently and/or effectively delivered.

[0751] When delivering a system or component thereof via a viral-based system, it can be important to consider the amount of viral particles that will be needed to achieve a therapeutic effect so as to account for the potential immune response that can be elicited by the viral particles when delivered to a subject or cell(s). When delivering a system or component thereof via a viral based system, it can be important to consider mechanisms of controlling the distribution and/or dosage of the system in vivo. Generally, to reduce the potential for off-target effects, it is optimal but not necessarily required, that the amount of the system be as close to the minimum or least effective dose. In practice this can be challenging to do.

[0752] In an embodiment, it can be important to consider the immunogenicity of the system or component thereof. In embodiments where the immunogenicity of the system or component thereof is of concern, the immunogenicity system or component thereof can be reduced. By way of example only, the immunogenicity of the system or component thereof can be reduced using the approach set out in Tangri et al. Accordingly, directed evolution or rational design may be used to reduce the immunogenicity of the CRISPR enzyme in the host species (human or other species).

### Xenotransplantation

[0753] The present invention also contemplates use of the CRISPR-Cas system described herein, e.g., Cas effector protein systems, to provide RNA-guided DNA nucleases adapted to be used to provide modified tissues for transplantation. For example, RNA-guided DNA nucleases may be used to knockout, knockdown or disrupt selected genes in an animal, such as a transgenic pig (such as the human heme oxygenase-1 transgenic pig line), for example by disrupting expression of genes that encode epitopes recognized by the human immune system, i.e., xenoantigen genes. Candidate porcine genes for disruption may for example include a (1,3)-galactosyltransferase and cytidine monophosphate-N-acetylneuraminic acid hydroxylase genes (see PCT Patent Publication WO 2014/066505). In addition, genes encoding endogenous retroviruses may be disrupted, for example the genes encoding all porcine endogenous retroviruses (see Yang et al., 2015, Genome-wide inactivation of porcine endogenous retroviruses (PERVs), Science 27 Nov. 2015: Vol. 350 no. 6264 pp. 1101-1104). In addition, RNA-guided DNA nucleases may be used to target a site for integration of additional genes in xenotransplant donor animals, such as a human CD55 gene to improve protection against hyperacute rejection.

[0754] Embodiments of the invention also relate to methods and compositions related to knocking out genes, amplifying genes and repairing particular mutations associated with DNA repeat instability and neurological disorders (Robert D. Wells, Tetsuo Ashizawa, Genetic Instabilities and Neurological Diseases, Second Edition, Academic Press, Oct. 13, 2011-Medical). Specific aspects of tandem repeat sequences have been found to be responsible for more than twenty human diseases (New insights into repeat instability: role of RNA•DNA hybrids. Mclvor EI, Polak U, Napierala M. RNA Biol. 2010 September-October; 7 (5): 551-8). The present effector protein systems may be harnessed to correct these defects of genomic instability.

[0755] Several further aspects of the invention relate to correcting defects associated with a wide range of genetic diseases which are further described on the website of the National Institutes of Health under the topic subsection Genetic Disorders (website at health.nih.gov/topic/GeneticDisorders). The genetic brain diseases may include but are not limited to Adrenoleukodystrophy, Agenesis of the Corpus Callosum, Aicardi Syndrome, Alpers' Disease, Alzheimer's Disease, Barth Syndrome, Batten Disease, CADASIL, Cerebellar Degeneration, Fabry's Disease, Gerstmann-Straussler-Scheinker Disease, Huntington's Disease and other Triplet Repeat Disorders, Leigh's Disease, Lesch-Nyhan Syndrome, Menkes Disease, Mitochondrial Myopathies and NINDS Colpocephaly. These diseases are further described on the website of the National Institutes of Health under the subsection Genetic Brain Disorders.

### Immune Orthogonal Orthologs

[0756] In an embodiment, when the Cas need to be expressed or administered in a subject, immunogenicity of the Cas may be reduced by sequentially expressing or administering immune orthogonal orthologs of the Cas to the subject. As used herein, the term “immune orthogonal orthologs” refer to orthologous proteins that have similar or substantially the same function or activity, but have no or low cross-reactivity with the immune response generated by one another. In an embodiment, sequential expression or administration of such orthologs elicits low or no secondary immune response. The immune orthogonal orthologs can avoid being neutralized by antibodies (e.g., existing antibodies in the host before the orthologs are expressed or administered). Cells expressing the orthologs can avoid being cleared by the host's immune system (e.g., by activated CTLs). In an embodiment, CRISPR enzyme orthologs from different species may be immune orthogonal orthologs.

[0757] Immune orthogonal orthologs may be identified by analyzing the sequences, structures, and/or immunogenicity of a set of candidates orthologs. In an example method, a set of immune orthogonal orthologs may be identified by a) comparing the sequences of a set of candidate orthologs (e.g., orthologs from different species) to identify a subset of candidates that have low or no sequence similarity; b) assessing immune overlap among the members of the subset of candidates to identify candidates that have no or low immune overlap. In some cases, immune overlap among candidates may be assessed by determining the binding (e.g., affinity) between a candidate ortholog and MHC (e.g., MHC type I and/or MHC II) of the host. Alternatively or additionally, immune overlap among candidates may be assessed by determining B-cell epitopes for the candidate orthologs. In one example, immune orthogonal orthologs may be identified using the method described in Moreno A M et al., BioRxiv, published online Jan. 10, 2018, doi: doi.org/10.1101/245985.

### Patient-Specific Screening Methods

[0758] A nucleic acid-targeting system that targets RNA or single stranded DNA can be used to screen patients or patient samples for the presence of particular RNA or single stranded DNA. Methods may comprise detection of one or more viruses in a sample from the patient. Advantageously, rapid detection using one or more CRISPR Cas systems can identify those patients with particular viral infections.

### Detection Systems and Methods of Use Thereof for Detecting a Target Polynucleotide or Target Polypeptide

[0759] In one aspect, the embodiments disclosed herein are directed to a nucleic acid detection system comprising a multimeric Cas polypeptide complex (e.g., CRISPR effector protein) as described herein which is expected to be an RNA-guided nuclease having collateral cleavage activity. Certain example embodiments disclosed herein are expected to utilize Cas effector proteins as described herein which are RNA targeting effectors to provide a robust CRISPR-based diagnostic. In an embodiment, CRISPR-based diagnostics comprising CRISPR effector proteins as described herein are expected to have attomolar sensitivity. It is expected that embodiments disclosed herein can detect broth DNA and RNA with comparable levels of sensitivity and can differentiate targets from non-targets based on single base pair differences. Moreover, it is expected that the embodiments disclosed herein can be prepared in freeze-dried format for convenient distribution and point-of-care (POC) applications. Such embodiments are expected to be useful in multiple scenarios in human health including, for example, viral detection, bacterial strain typing, sensitive genotyping, and detection of disease-associated cell free DNA. For ease of reference, the embodiments disclosed herein may also be referred to as a SHERLOCK (Specific High-sensitivity Enzymatic Reporter unLOCKing) system.

[0760] In an embodiment, the nucleic acid detection system further comprises one or more guide molecules, e.g., guide RNAs as, described herein designed to bind to corresponding target nucleic acids (e.g., target RNAs or target DNAs) and to form a CRISPR-Cas complex with the CRISPR effector proteins as described herein, a masking construct (e.g., an RNA or DNA masking construct), and optional amplification reagents to amplify target nucleic acid molecules (e.g., RNA or DNA) in a sample. In an embodiment, the nucleic acid detection system comprises amplification reagents. In an embodiment, the nucleic acid detection system does not comprise amplification reagents.

[0761] In another aspect, the embodiments disclosed herein are directed to a polypeptide detection system comprising a CRISPR effector protein as described herein which is an RNA-guided nuclease, e.g., an RNase, having collateral cleavage activity, one or more guide molecules, e.g., guide RNAs, as described herein, designed to bind to corresponding trigger nucleic acids (e.g., trigger RNAs or trigger DNAs), a masking construct, and one or more detection aptamers. In an embodiment, the polypeptide detection system further comprises amplification reagents to amplify the aptamer sequences and/or the trigger nucleic acids. In an embodiment, the polypeptide detection system does not further comprise amplification reagents. In an embodiment, the RNA-guided nuclease is an RNase, and the one or more detection aptamers comprise an RNA polymerase promoter binding site or a primer binding site. The one or more detection aptamers specifically bind one or more target polypeptides and are configured such that the RNA polymerase promoter binding site or primer binding site is exposed only upon binding of the detection aptamer to a target polypeptide. Exposure of the RNA polymerase promoter binding site facilitates generation of a trigger RNA using the aptamer sequence as a template. Accordingly, in such embodiments the one or more guide RNAs are configured to bind to corresponding trigger RNAs.

[0762] In another aspect, the embodiments disclosed herein are expected to be directed to a diagnostic device comprising a plurality of individual discrete volumes. Each individual discrete volume comprises a CRISPR effector protein as described herein, one or more guide molecules, e.g., guide RNAs, as described herein, designed to bind to a corresponding target molecule and to form a CRISPR-Cas complex with the CRISPR effector protein, and a masking construct. In an embodiment, reagents to amplify the target molecules (e.g., RNA or DNA amplification reagents) may be pre-loaded into the individual discrete volumes or be added to the individual discrete volumes concurrently with or subsequent to addition of a sample to each individual discrete volume. The device may be a microfluidic based device, a wearable device, or device comprising a flexible material substrate on which the individual discrete volumes are defined.

[0763] In another aspect, the embodiments disclosed herein are expected to be directed to a method for detecting target nucleic acids in a sample comprising distributing a sample or set of samples into a set of individual discrete volumes, each individual discrete volume comprising a CRISPR effector protein as described herein, one or more guide molecules, e.g., guide RNAs, as described herein, designed to bind a corresponding target molecule and to form a CRISPR-Cas complex with the CRISPR effector protein, and a masking construct. The set of samples are then maintained under conditions sufficient to allow binding of the one or more guide RNAs to one or more target molecules. Binding of the one or more guide RNAs to a target nucleic acid in turn activates the CRISPR effector protein. The expected collateral activity of the activated CRISPR effector protein then deactivates the masking construct, for example, by cleaving the masking construct such that a detectable positive signal is unmasked, released, or generated. Detection of the positive detectable signal in an individual discrete volume indicates the presence of the target molecules.

[0764] In yet another aspect, the embodiments disclosed herein are expected to be directed to a method for detecting polypeptides. The method for detecting polypeptides is similar to the method for detecting target nucleic acids described above. However, one or more peptide detection aptamers are also included. The peptide detection aptamers function as described above and facilitate generation of a trigger molecule (e.g., trigger oligonucleotide) upon binding to a target polypeptide. The guide RNAs are designed to recognize the trigger oligonucleotides thereby activating the CRISPR effector protein. Deactivation of the masking construct by the expected collateral activity of the activated multimeric Cas polypeptide complex leads to unmasking, release, or generation of a detectable positive signal.

[0765] The CRISPR effector proteins and systems of the invention are expected to be useful for specific detection of target polynucleotides, e.g., target RNAs or DNAs, or polypeptides, in a cell or other sample. In the presence of an RNA target of interest, guide-dependent CRISPR effector protein nuclease activity may be accompanied by non-specific nuclease, e.g., RNAse or DNAse, activity against collateral targets. To take advantage of the collateral RNase (or DNAse) activity, all that is needed is a reporter substrate that can be detectably cleaved.

[0766] In one exemplary method, a reporter molecule can comprise RNA (or DNA), tagged with a fluorescent reporter molecule (fluor) on one end and a quencher on the other. In the absence of CRISPR effector protein RNase (or DNAse) activity, the physical proximity of the quencher dampens fluorescence from the fluor to low levels. When CRISPR effector protein target-specific cleavage is activated by the presence of an RNA (or DNA) target-of-interest and suitable guide molecule, e.g., guide RNA, the RNA (or DNA)-containing reporter molecule is non-specifically cleaved and the fluor and quencher are spatially separated. This causes the fluor to emit a detectable signal when excited by light of the appropriate wavelength. In one exemplary assay method, CRISPR-Cas effector, target-of-interest-specific guide molecule, e.g., guide RNA, and reporter molecule are added to a cellular sample. An increase in fluorescence indicates the presence of the RNA (or DNA) target-of-interest. In another exemplary method, a detection array is provided. Each location of the array is provided with CRISPR-Cas effector, reporter molecule, and a target-of-interest-specific guide molecule, e.g., guide RNA. Depending on the assay to be performed, the target-of-interest-specific guide molecules, e.g., guide RNAs, at each location of the array can be the same, different, or a combination thereof. Different target-of-interest-specific guide molecules, e.g., guide RNAs, might be provided, for example when it is desired to test for one or more targets in a single source sample. The same target-of-interest-specific guide molecule, e.g., guide RNA, might be provided at each location, for example when it is desired to test multiple samples for the same target.

### RNA-Based Masking Constructs

[0767] As used herein, a “masking construct” refers to a molecule that can be cleaved or otherwise deactivated by an activated CRISPR-Cas system effector protein as described herein (e.g., a multimeric Cas polypeptide complex). The term “masking construct” may also be referred to in the alternative as a “detection construct.” In an embodiment, the masking construct is an RNA-based masking construct. The RNA-based masking construct comprises an RNA element that is cleavable by a CRISPR effector protein. Cleavage of the RNA element releases agents or produces conformational changes that allow a detectable signal to be produced. Example constructs demonstrating how the RNA element may be used to prevent or mask generation of detectable signal are described below and embodiments of the invention comprise variants of the same. Prior to cleavage, or when the masking construct is in an ‘active’ state, the masking construct blocks the generation or detection of a positive detectable signal. It will be understood that in an embodiment a minimal background signal may be produced in the presence of an active RNA masking construct. A positive detectable signal may be any signal that can be detected using optical, fluorescent, chemiluminescent, electrochemical or other detection methods known in the art. The term “positive detectable signal” is used to differentiate from other detectable signals that may be detectable in the presence of the masking construct. For example, in an embodiment a first signal may be detected when the masking agent is present (i.e., a negative detectable signal), which then converts to a second signal (e.g., the positive detectable signal) upon detection of the target molecules and cleavage or deactivation of the masking agent by the activated CRISPR effector protein.

[0768] In an embodiment, the masking construct may suppress generation of a gene product. The gene product may be encoded by a reporter construct that is added to the sample. The masking construct may be an interfering RNA involved in an RNA interference pathway, such as a short hairpin RNA (shRNA) or small interfering RNA (siRNA). The masking construct may also comprise microRNA (miRNA). While present, the masking construct suppresses expression of the gene product. The gene product may be a fluorescent protein or other RNA transcript or proteins that would otherwise be detectable by a labeled probe, aptamer, or antibody but for the presence of the masking construct. Upon activation of the effector protein the masking construct is cleaved or otherwise silenced allowing for expression and detection of the gene product as the positive detectable signal.

[0769] In an embodiment, the masking construct may sequester one or more reagents needed to generate a detectable positive signal such that release of the one or more reagents from the masking construct results in generation of the detectable positive signal. The one or more reagents may combine to produce a colorimetric signal, a chemiluminescent signal, a fluorescent signal, or any other detectable signal and may comprise any reagents known to be suitable for such purposes. In an embodiment, the one or more reagents are sequestered by RNA aptamers that bind the one or more reagents. The one or more reagents are released when the effector protein is activated upon detection of a target molecule and the RNA aptamers are degraded.

[0770] In an embodiment, the masking construct may be immobilized on a solid substrate in an individual discrete volume (defined further below) and sequesters a single reagent. For example, the reagent may be a bead comprising a dye. When sequestered by the immobilized reagent, the individual beads are too diffuse to generate a detectable signal, but upon release from the masking construct are able to generate a detectable signal, for example by aggregation or simple increase in solution concentration. In an embodiment, the immobilized masking agent is an RNA-based aptamer that can be cleaved by the activated effector protein upon detection of a target molecule.

[0771] In certain other example embodiments, the masking construct binds to an immobilized reagent in solution thereby blocking the ability of the reagent to bind to a separate labeled binding partner that is free in solution. Thus, upon application of a washing step to a sample, the labeled binding partner can be washed out of the sample in the absence of a target molecule. However, if the effector protein is activated, the masking construct is cleaved to a degree sufficient to interfere with the ability of the masking construct to bind the reagent thereby allowing the labeled binding partner to bind to the immobilized reagent. Thus, the labeled binding partner remains after the wash step indicating the presence of the target molecule in the sample. In certain aspects, the masking construct that binds the immobilized reagent is an RNA aptamer. The immobilized reagent may be a protein and the labeled minding partner may be a labeled antibody. Alternatively, the immobilized reagent may be streptavidin and the labeled binding partner may be labeled biotin. The label on the binding partner used in the above embodiments may be any detectable label known in the art. In addition, other known binding partners may be used in accordance with the overall design described herein.

[0772] In an embodiment, the masking construct may comprise a ribozyme. Ribozymes are RNA molecules having catalytic properties. Ribozymes, both naturally and engineered, comprise or consist of RNA that may be targeted by the effector proteins disclosed herein. The ribozyme may be selected or engineered to catalyze a reaction that either generates a negative detectable signal or prevents generation of a positive control signal. Upon deactivation of the ribozyme by the activated effector protein the reaction generating a negative control signal, or preventing generation of a positive detectable signal, is removed thereby allowing a positive detectable signal to be generated. In one example embodiment, the ribozyme may catalyze a colorimetric reaction causing a solution to appear as a first color. When the ribozyme is deactivated the solution then turns to a second color, the second color being the detectable positive signal. An example of how ribozymes can be used to catalyze a colorimetric reaction are described in Zhao et al. “Signal amplification of glucosamine-6-phosphate based on ribozyme glmS,” Biosens Bioelectron. 2014; 16:337-42, and provide an example of how such a system could be modified to work in the context of the embodiments disclosed herein. Alternatively, ribozymes, when present can generate cleavage products of, for example, RNA transcripts. Thus, detection of a positive detectable signal may comprise detection of non-cleaved RNA transcripts that are only generated in the absence of the ribozyme.

[0773] In an embodiment, the one or more reagents is a protein, such as an enzyme, capable of facilitating generation of a detectable signal, such as a colorimetric, chemiluminescent, or fluorescent signal, that is inhibited or sequestered such that the protein cannot generate the detectable signal by the binding of one or more RNA aptamers to the protein. Upon activation of the effector proteins disclosed herein, the RNA aptamers are cleaved or degraded to an extent that they no longer inhibit the protein's ability to generate the detectable signal. In an embodiment, the aptamer is a thrombin inhibitor aptamer. In an embodiment the thrombin inhibitor aptamer has a sequence of GGGAACAAAGCUGAAGUACUUACCC (SEQ ID NO: 85). When this aptamer is cleaved, thrombin will become active and will cleave a peptide colorimetric or fluorescent substrate. In an embodiment, the colorimetric substrate is para-nitroanilide (pNA) covalently linked to the peptide substrate for thrombin. Upon cleavage by thrombin, pNA is released and becomes yellow in color and easily visible to the eye. In an embodiment, the fluorescent substrate is 7-amino-4-methylcoumarin a blue fluorophore that can be detected using a fluorescence detector. Inhibitory aptamers may also be used for horseradish peroxidase (HRP), beta-galactosidase, or calf alkaline phosphatase (CAP) and within the general principals laid out above.

[0774] In an embodiment, RNAse activity is detected colorimetrically via cleavage of enzyme-inhibiting aptamers. One potential mode of converting RNAse activity into a colorimetric signal is to couple the cleavage of an RNA aptamer with the re-activation of an enzyme that is capable of producing a colorimetric output. In the absence of RNA cleavage, the intact aptamer will bind to the enzyme target and inhibit its activity. The advantage of this readout system is that the enzyme provides an additional amplification step: once liberated from an aptamer via collateral activity (e.g., expected multimeric Cas polypeptide complex collateral activity), the colorimetric enzyme will continue to produce colorimetric product, leading to a multiplication of signal.

[0775] In an embodiment, an existing aptamer that inhibits an enzyme with a colorimetric readout is used. Several aptamer/enzyme pairs with colorimetric readouts exist, such as thrombin, protein C, neutrophil elastase, and subtilisin. These proteases have colorimetric substrates based upon pNA and are commercially available. In an embodiment, a novel aptamer targeting a common colorimetric enzyme is used. Common and robust enzymes, such as beta-galactosidase, horseradish peroxidase, or calf intestinal alkaline phosphatase, could be targeted by engineered aptamers designed by selection strategies such as SELEX. Such strategies allow for quick selection of aptamers with nanomolar binding efficiencies and could be used for the development of additional enzyme/aptamer pairs for colorimetric readout.

[0776] In an embodiment, RNAse activity is detected colorimetrically via cleavage of RNA-tethered inhibitors. Many common colorimetric enzymes have competitive, reversible inhibitors: for example, beta-galactosidase can be inhibited by galactose. Many of these inhibitors are weak, but their effect can be increased by increases in local concentration. By linking local concentration of inhibitors to RNAse activity, colorimetric enzyme and inhibitor pairs can be engineered into RNAse sensors. The colorimetric RNAse sensor based upon small-molecule inhibitors involves three components: the colorimetric enzyme, the inhibitor, and a bridging RNA that is covalently linked to both the inhibitor and enzyme, tethering the inhibitor to the enzyme. In the uncleaved configuration, the enzyme is inhibited by the increased local concentration of the small molecule; when the RNA is cleaved (e.g., by Cas13a collateral cleavage), the inhibitor will be released, and the colorimetric enzyme will be activated.

[0777] In an embodiment, RNAse activity is detected colorimetrically via formation and/or activation of G-quadruplexes. G quadraplexes in DNA can complex with heme (iron (III)-protoporphyrin IX) to form a DNAzyme with peroxidase activity. When supplied with a peroxidase substrate (e.g., ABTS: (2,2′-Azinobis [3-ethylbenzothiazoline-6-sulfonic acid]-diammonium salt)), the G-quadraplex-heme complex in the presence of hydrogen peroxide causes oxidation of the substrate, which then forms a green color in solution. An example G-quadraplex forming DNA sequence is: GGGTAGGGCGGGTTGGGA (SEQ ID NO: 86). By hybridizing an RNA sequence to this DNA aptamer, formation of the G-quadraplex structure will be limited. Upon RNAse collateral activation (e.g., C2c2-complex collateral activation), the RNA staple will be cleaved allowing the G quadraplex to form and heme to bind. This strategy is particularly appealing because color formation is enzymatic, meaning there is additional amplification beyond RNAse activation.

[0778] In an embodiment, the masking construct may be immobilized on a solid substrate in an individual discrete volume (defined further below) and sequesters a single reagent. For example, the reagent may be a bead comprising a dye. When sequestered by the immobilized reagent, the individual beads are too diffuse to generate a detectable signal, but upon release from the masking construct are able to generate a detectable signal, for example by aggregation or simple increase in solution concentration. In an embodiment, the immobilized masking agent is an RNA-based aptamer that can be cleaved by the activated effector protein upon detection of a target molecule.

[0779] In one example embodiment, the masking construct comprises a detection agent that changes color depending on whether the detection agent is aggregated or dispersed in solution. For example, certain nanoparticles, such as colloidal gold, undergo a visible purple to red color shift as they move from aggregates to dispersed particles. Accordingly, in an embodiment, such detection agents may be held in aggregate by one or more bridge molecules. At least a portion of the bridge molecule comprises RNA. Upon activation of the effector proteins disclosed herein, the RNA portion of the bridge molecule is cleaved allowing the detection agent to disperse and resulting in the corresponding change in color. In an embodiment, the bridge molecule is an RNA molecule. In an embodiment, the detection agent is a colloidal metal. The colloidal metal material may include water-insoluble metal particles or metallic compounds dispersed in a liquid, a hydrosol, or a metal sol. The colloidal metal may be selected from the metals in groups IA, IB, IIB and IIIB of the periodic table, as well as the transition metals, especially those of group VIII. Preferred metals include gold, silver, aluminum, ruthenium, zinc, iron, nickel, and calcium. Other suitable metals also include the following in all of their various oxidation states: lithium, sodium, magnesium, potassium, scandium, titanium, vanadium, chromium, manganese, cobalt, copper, gallium, strontium, niobium, molybdenum, palladium, indium, tin, tungsten, rhenium, platinum, and gadolinium. The metals are preferably provided in ionic form, derived from an appropriate metal compound, for example the A13+, Ru3+, Zn2+, Fe3+, Ni2+ and Ca2+ ions.

[0780] When the RNA bridge is cut by the activated CRISPR effector protein, the beforementioned color shift is observed. In an embodiment the particles are colloidal metals. In certain other example embodiments, the colloidal metal is a colloidal gold. In an embodiment, the colloidal nanoparticles are 15 nm gold nanoparticles (AuNPs). Due to the unique surface properties of colloidal gold nanoparticles, maximal absorbance is observed at 520 nm when fully dispersed in solution and appear red in color to the naked eye. Upon aggregation of AuNPs, they exhibit a red-shift in maximal absorbance and appear darker in color, eventually precipitating from solution as a dark purple aggregate. In an embodiment the nanoparticles are modified to include DNA linkers extending from the surface of the nanoparticle. Individual particles are linked together by single-stranded RNA (ssRNA) bridges that hybridize on each end of the RNA to at least a portion of the DNA linkers. Thus, the nanoparticles will form a web of linked particles and aggregate, appearing as a dark precipitate. Upon activation of the CRISPR effector proteins disclosed herein, the ssRNA bridge will be cleaved, releasing the AU NPS from the linked mesh, and producing a visible red color. Example DNA linkers and RNA bridge sequences are listed below. Thiol linkers on the end of the DNA linkers may be used for surface conjugation to the AuNPS. Other forms of conjugation may be used. In an embodiment, two populations of AuNPs may be generated, one for each DNA linker. This will help facilitate proper binding of the ssRNA bridge with proper orientation. In an embodiment, a first DNA linker is conjugated by the 3′ end while a second DNA linker is conjugated by the 5′ end.

TABLE 10

| | |
|---|---|
| C2c2 | TTATAACTATTCCTAAAAAAAAAAA/ |
| colorimetric | 3ThioMC3-D/ |
| DNA1 | (SEQ ID NO: 87) |
| C2c2 | /5ThioMC6-D/AAAAAAAAAACTC |
| colorimetric | CCCTAATAACAAT |
| DNA2 | (SEQ ID NO: 88) |
| C2c2 | GGGUAGGAAUAGUUAUAAUUUCCCU |
| colorimetric | UUCCCAUUGUUAUUA |
| bridge | GGGAG(SEQ ID NO: 89) |

[0781] In certain other example embodiments, the masking construct may comprise an RNA oligonucleotide to which are attached a detectable label and a masking agent of that detectable label. An example of such a detectable label/masking agent pair is a fluorophore and a quencher of the fluorophore. Quenching of the fluorophore can occur as a result of the formation of a non-fluorescent complex between the fluorophore and another fluorophore or non-fluorescent molecule. This mechanism is known as ground-state complex formation, static quenching, or contact quenching. Accordingly, the RNA oligonucleotide may be designed so that the fluorophore and quencher are in sufficient proximity for contact quenching to occur. Fluorophores and their cognate quenchers are known in the art and can be selected for this purpose by one having ordinary skill in the art. The particular fluorophore/quencher pair is not critical in the context of this invention, only that selection of the fluorophore/quencher pairs ensures masking of the fluorophore. Upon activation of the effector proteins disclosed herein, the RNA oligonucleotide is cleaved thereby severing the proximity between the fluorophore and quencher needed to maintain the contact quenching effect. Accordingly, detection of the fluorophore may be used to determine the presence of a target molecule in a sample.

[0782] In certain other example embodiments, the masking construct may comprise one or more RNA oligonucleotides to which are attached one or more metal nanoparticles, such as gold nanoparticles. In some embodiments, the masking construct comprises a plurality of metal nanoparticles crosslinked by a plurality of RNA oligonucleotides forming a closed loop. In one embodiment, the masking construct comprises three gold nanoparticles crosslinked by three RNA oligonucleotides forming a closed loop. In some embodiments, the cleavage of the RNA oligonucleotides by the CRISPR effector protein leads to a detectable signal produced by the metal nanoparticles.

[0783] In certain other example embodiments, the masking construct may comprise one or more RNA oligonucleotides to which are attached one or more quantum dots. In some embodiments, the cleavage of the RNA oligonucleotides by the CRISPR effector protein leads to a detectable signal produced by the quantum dots.

[0784] In one example embodiment, the masking construct may comprise a quantum dot. The quantum dot may have multiple linker molecules attached to the surface. At least a portion of the linker molecule comprises RNA. The linker molecule is attached to the quantum dot at one end and to one or more quenchers along the length or at terminal ends of the linker such that the quenchers are maintained in sufficient proximity for quenching of the quantum dot to occur. The linker may be branched. As above, the quantum dot/quencher pair is not critical, only that selection of the quantum dot/quencher pair ensures masking of the fluorophore. Quantum dots and their cognate quenchers are known in the art and can be selected for this purpose by one having ordinary skill in the art Upon activation of the effector proteins disclosed herein, the RNA portion of the linker molecule is cleaved thereby eliminating the proximity between the quantum dot and one or more quenchers needed to maintain the quenching effect. In an embodiment, the quantum dot is streptavidin conjugated. In an embodiment, the RNAs are attached via biotin linkers and recruit quenching molecules with the following sequences:/5Biosg/UCUCGUACGUUC/31AbRQSp/(SEQ ID NO: 90) or/5Biosg/UCUCGUACGUUCUCUCGUACGUUC/31AbRQSp/(SEQ ID NO: 91), where/5Biosg/is a biotin tag and/31AbRQSp/is an Iowa black quencher. Upon cleavage, by the activated effectors disclosed herein the quantum dot will fluoresce visibly.

[0785] In a similar fashion, fluorescence energy transfer (FRET) may be used to generate a detectable positive signal. FRET is a non-radiative process by which a photon from an energetically excited fluorophore (i.e., “donor fluorophore”) raises the energy state of an electron in another molecule (i.e., “the acceptor”) to higher vibrational levels of the excited singlet state. The donor fluorophore returns to the ground state without emitting a fluoresce characteristic of that fluorophore. The acceptor can be another fluorophore or non-fluorescent molecule. If the acceptor is a fluorophore, the transferred energy is emitted as fluorescence characteristic of that fluorophore. If the acceptor is a non-fluorescent molecule the absorbed energy is loss as heat. Thus, in the context of the embodiments disclosed herein, the fluorophore/quencher pair is replaced with a donor fluorophore/acceptor pair attached to the oligonucleotide molecule. When intact, the masking construct generates a first signal (negative detectable signal) as detected by the fluorescence or heat emitted from the acceptor. Upon activation of the effector proteins disclosed herein the RNA oligonucleotide is cleaved and FRET is disrupted such that fluorescence of the donor fluorophore is now detected (positive detectable signal).

[0786] In an embodiment, the masking construct comprises the use of intercalating dyes which change their absorbance in response to cleavage of long RNAs to short nucleotides. Several such dyes exist. For example, pyronine-Y will complex with RNA and form a complex that has an absorbance at 572 nm. Cleavage of the RNA results in loss of absorbance and a color change. Methylene blue may be used in a similar fashion, with changes in absorbance at 688 nm upon RNA cleavage. Accordingly, in an embodiment the masking construct comprises an RNA and intercalating dye complex that changes absorbance upon the cleavage of RNA by the effector proteins disclosed herein.

[0787] In an embodiment, the masking construct may comprise an initiator for an HCR reaction. See, e.g., Dirks and Pierce. PNAS 101, 15275-15728 (2004). HCR reactions utilize the potential energy in two hairpin species. When a single-stranded initiator having a portion of complementary to a corresponding region on one of the hairpins is released into the previously stable mixture, it opens a hairpin of one species. This process, in turn, exposes a single-stranded region that opens a hairpin of the other species. This process, in turn, exposes a single stranded region identical to the original initiator. The resulting chain reaction may lead to the formation of a nicked double helix that grows until the hairpin supply is exhausted. Detection of the resulting products may be done on a gel or colorimetrically. Example colorimetric detection methods include, for example, those disclosed in Lu et al. “Ultra-sensitive colorimetric assay system based on the hybridization chain reaction-triggered enzyme cascade amplification ACS Appl Mater Interfaces, 2017, 9 (1): 167-175, Wang et al. “An enzyme-free colorimetric assay using hybridization chain reaction amplification and split aptamers” Analyst 2015, 150, 7657-7662, and Song et al. “Non-Covalent fluorescent labeling of hairpin DNA probe coupled with hybridization chain reaction for sensitive DNA detection.” Applied Spectroscopy, 70 (4): 686-694 (2016).

[0788] In an embodiment, the masking construct may comprise an HCR initiator sequence and a cleavable structural element, such as a loop or hairpin, that prevents the initiator from initiating the HCR reaction. Upon cleavage of the structure element by an activated CRISPR effector protein, the initiator is then released to trigger the HCR reaction, detection thereof indicating the presence of one or more targets in the sample. In an embodiment, the masking construct comprises a hairpin with an RNA loop. When an activated CRISPR effector protein cuts the RNA loop, the initiator can be released to trigger the HCR reaction.

### Amplification of Target

[0789] In an embodiment, target nucleic acids (or aptamer sequences or trigger nucleic acids), e.g., RNAs and/or DNAs, may be amplified prior to activating the CRISPR effector protein. In an embodiment, the CRISPR effector system is an RNA targeting system and the target nucleic acids/aptamer sequences/trigger nucleic acids are RNAs, transcribed DNAs, amplicons thereof, or any combination thereof. In an embodiment, the CRISPR effector system is a DNA targeting system and the target nucleic acids/aptamer sequences/trigger nucleic acids are DNAs, reverse transcribed RNAs, amplicons thereof, or any combination thereof. As used herein, amplification techniques as described herein which are suitable for target nucleic acids of nucleic acid detection systems are also suitable for aptamer sequences and/or trigger nucleic acids of polypeptide detection systems.

[0790] Any suitable RNA or DNA amplification technique may be used. In an embodiment, the RNA or DNA amplification is an isothermal amplification. In an embodiment, the isothermal amplification may be nucleic-acid sequenced-based amplification (NASBA), recombinase polymerase amplification (RPA), loop-mediated isothermal amplification (LAMP), strand displacement amplification (SDA), helicase-dependent amplification (HDA), or nicking enzyme amplification reaction (NEAR). In an embodiment, non-isothermal amplification methods may be used which include, but are not limited to, PCR, multiple displacement amplification (MDA), rolling circle amplification (RCA), ligase chain reaction (LCR), or ramification amplification method (RAM).

[0791] In an embodiment, the RNA or DNA amplification is NASBA, which is initiated with reverse transcription of target RNA by a sequence-specific reverse primer to create an RNA/DNA duplex. RNase H is then used to degrade the RNA template, allowing a forward primer containing a promoter, such as the T7 promoter, to bind and initiate elongation of the complementary strand, generating a double-stranded DNA product. The RNA polymerase promoter-mediated transcription of the DNA template then creates copies of the target RNA sequence. Importantly, each of the new target RNAs can be detected by the guide RNAs thus further enhancing the sensitivity of the assay. Binding of the target RNAs by the guide RNAs then leads to activation of the CRISPR effector protein and the methods proceed as outlined above. The NASBA reaction has the additional advantage of being able to proceed under moderate isothermal conditions, for example at approximately 41° C., making it suitable for systems and devices deployed for early and direct detection in the field and far from clinical laboratories.

[0792] In certain other example embodiments, a recombinase polymerase amplification (RPA) reaction may be used to amplify the target nucleic acids. RPA reactions employ recombinases which are capable of pairing sequence-specific primers with homologous sequence in duplex DNA. If target DNA is present, DNA amplification is initiated and no other sample manipulation such as thermal cycling or chemical melting is required. The entire RPA amplification system is stable as a dried formulation and can be transported safely without refrigeration. RPA reactions may also be carried out at isothermal temperatures with an optimum reaction temperature of 37-42° C. The sequence specific primers are designed to amplify a sequence comprising the target nucleic acid sequence to be detected. In an embodiment, a RNA polymerase promoter, such as a T7 promoter, is added to one of the primers. This results in an amplified double-stranded DNA product comprising the target sequence and a RNA polymerase promoter. After, or during, the RPA reaction, a RNA polymerase is added that will produce RNA from the double-stranded DNA templates. The amplified target RNA can then in turn be detected by the CRISPR effector system. In this way target DNA can be detected using the embodiments disclosed herein. RPA reactions can also be used to amplify target RNA. The target RNA is first converted to cDNA using a reverse transcriptase, followed by second strand DNA synthesis, at which point the RPA reaction proceeds as outlined above.

[0793] Accordingly, in an embodiment the systems disclosed herein may include amplification reagents. Different components or reagents useful for amplification of nucleic acids are described herein. For example, an amplification reagent as described herein may include a buffer, such as a Tris buffer. A Tris buffer may be used at any concentration appropriate for the desired application or use, for example including, but not limited to, a concentration of 1 mM, 2 mM, 3 mM, 4 mM, 5 mM, 6 mM, 7 mM, 8 mM, 9 mM, 10 mM, 11 mM, 12 mM, 13 mM, 14 mM, 15 mM, 25 mM, 50 mM, 75 mM, 1 M, or the like. One of skill in the art will be able to determine an appropriate concentration of a buffer such as Tris for use with the present invention.

[0794] A salt, such as magnesium chloride (MgC12), potassium chloride (KCl), or sodium chloride (NaCl), may be included in an amplification reaction, such as PCR, in order to improve the amplification of nucleic acid fragments. Although the salt concentration will depend on the particular reaction and application, in some embodiments, nucleic acid fragments of a particular size may produce optimum results at particular salt concentrations. Larger products may require altered salt concentrations, typically lower salt, in order to produce desired results, while amplification of smaller products may produce better results at higher salt concentrations. One of skill in the art will understand that the presence and/or concentration of a salt, along with alteration of salt concentrations, may alter the stringency of a biological or chemical reaction, and therefore any salt may be used that provides the appropriate conditions for a reaction of the present invention and as described herein.

[0795] Other components of a biological or chemical reaction may include a cell lysis component in order to break open or lyse a cell for analysis of the materials therein. A cell lysis component may include, but is not limited to, a detergent, a salt as described above, such as NaCl, KCl, ammonium sulfate [(NH4) 2SO4], or others. Detergents that may be appropriate for the invention may include Triton X-100, sodium dodecyl sulfate (SDS), CHAPS (3-[(3-cholamidopropyl)dimethylammonio]-1-propanesulfonate), ethyl trimethyl ammonium bromide, nonyl phenoxypolyethoxylethanol (NP-40). Concentrations of detergents may depend on the particular application and may be specific to the reaction in some cases. Amplification reactions may include dNTPs and nucleic acid primers used at any concentration appropriate for the invention, such as including, but not limited to, a concentration of 100 nM, 150 nM, 200 nM, 250 nM, 300 nM, 350 nM, 400 nM, 450 nM, 500 nM, 550 nM, 600 nM, 650 nM, 700 nM, 750 nM, 800 nM, 850 nM, 900 nM, 950 nM, 1 mM, 2 mM, 3 mM, 4 mM, 5 mM, 6 mM, 7 mM, 8 mM, 9 mM, 10 mM, 20 mM, 30 mM, 40 mM, 50 mM, 60 mM, 70 mM, 80 mM, 90 mM, 100 mM, 150 mM, 200 mM, 250 mM, 300 mM, 350 mM, 400 mM, 450 mM, 500 mM, or the like. Likewise, a polymerase useful in accordance with the invention may be any specific or general polymerase known in the art and useful or the invention, including Taq polymerase, Q5 polymerase, or the like.

[0796] In some embodiments, amplification reagents as described herein may be appropriate for use in hot-start amplification. Hot start amplification may be beneficial in some embodiments to reduce or eliminate dimerization of adaptor molecules or oligos, or to otherwise prevent unwanted amplification products or artifacts and obtain optimum amplification of the desired product. Many components described herein for use in amplification may also be used in hot-start amplification. In some embodiments, reagents or components appropriate for use with hot-start amplification may be used in place of one or more of the composition components as appropriate. For example, a polymerase or other reagent may be used that exhibits a desired activity at a particular temperature or other reaction condition. In some embodiments, reagents may be used that are designed or optimized for use in hot-start amplification, for example, a polymerase may be activated after transposition or after reaching a particular temperature. Such polymerases may be antibody-based or aptamer-based. Polymerases as described herein are known in the art. Examples of such reagents may include, but are not limited to, hot-start polymerases, hot-start dNTPs, and photo-caged dNTPs. Such reagents are known and available in the art. One of skill in the art will be able to determine the optimum temperatures as appropriate for individual reagents.

[0797] Amplification of nucleic acids may be performed using specific thermal cycle machinery or equipment, and may be performed in single reactions or in bulk, such that any desired number of reactions may be performed simultaneously. In some embodiments, amplification may be performed using microfluidic or robotic devices, or may be performed using manual alteration in temperatures to achieve the desired amplification. In some embodiments, optimization may be performed to obtain the optimum reactions conditions for the particular application or materials. One of skill in the art will understand and be able to optimize reaction conditions to obtain sufficient amplification.

[0798] In an embodiment, detection of DNA with the methods or systems of the invention requires transcription of the (amplified) DNA into RNA prior to detection.

### Target RNA/DNA Enrichment

[0799] In an embodiment, target nucleic acids, aptamer sequences, and/or trigger nucleic acids (e.g., RNA or DNA) may first be enriched prior to detection or amplification of the target nucleic acids, aptamer sequences, and/or trigger nucleic acids (e.g., RNA or DNA). In an embodiment, this enrichment may be achieved by binding of the target nucleic acids, aptamer sequences, and/or trigger nucleic acids (e.g., RNA or DNA) by a CRISPR effector system. As used herein, target RNA/DNA enrichment techniques as described herein which are suitable for target nucleic acids of nucleic acid detection systems are also suitable for aptamer sequences and/or trigger nucleic acids of polypeptide detection systems.

[0800] Current target-specific enrichment protocols require single-stranded nucleic acid prior to hybridization with probes. Among various advantages, the present embodiments can skip this step and enable direct targeting to double-stranded DNA (either partly or completely double-stranded). In addition, the embodiments disclosed herein are enzyme-driven targeting methods that offer faster kinetics and easier workflow allowing for isothermal enrichment. In an embodiment enrichment may take place at temperatures as low as 20-37° C. In an embodiment, a set of guide RNAs to different target nucleic acids are used in a single assay, allowing for detection of multiple targets and/or multiple variants of a single target.

[0801] In an embodiment, a dead CRISPR effector protein, e.g., a dead CRISPR effector protein, may bind the target nucleic acid in solution and then subsequently be isolated from said solution. For example, the dead CRISPR effector protein bound to the target nucleic acid, may be isolated from the solution using an antibody or other molecule, such as an aptamer, that specifically binds the dead CRISPR effector protein.

[0802] In other example embodiments, the dead CRISPR effector protein may bound to a solid substrate. A fixed substrate may refer to any material that is appropriate for or can be modified to be appropriate for the attachment of a polypeptide or a polynucleotide. Possible substrates include, but are not limited to, glass and modified functionalized glass, plastics (including acrylics, polystyrene and copolymers of styrene and other materials, polypropylene, polyethylene, polybutylene, polyurethanes, Teflon™, etc.), polysaccharides, nylon or nitrocellulose, ceramics, resins, silica or silica-based materials including silicon and modified silicon, carbon, metals, inorganic glasses, plastics, optical fiber bundles, and a variety of other polymers. In some embodiments, the solid support comprises a patterned surface suitable for immobilization of molecules in an ordered pattern. In an embodiment a patterned surface refers to an arrangement of different regions in or on an exposed layer of a solid support. In some embodiments, the solid support comprises an array of wells or depressions in a surface. The composition and geometry of the solid support can vary with its use. In some embodiments, the solids support is a planar structure such as a slide, chip, microchip and/or array. As such, the surface of the substrate can be in the form of a planar layer. In some embodiments, the solid support comprises one or more surfaces of a flowcell. The term “flowcell” as used herein refers to a chamber comprising a solid surface across which one or more fluid reagents can be flowed. Example flowcells and related fluidic systems and detection platforms that can be readily used in the methods of the present disclosure are described, for example, in Bentley et al. Nature 456:53-59 (2008), WO 04/0918497, U.S. Pat. No. 7,057,026; WO 91/06678; WO 07/123744; U.S. Pat. Nos. 7,329,492; 7,211,414; 7,315,019; 7,405,281, and US 2008/0108082. In some embodiments, the solid support or its surface is non-planar, such as the inner or outer surface of a tube or vessel. In some embodiments, the solid support comprises microspheres or beads. “Microspheres,” “bead,” “particles,” are intended to mean within the context of a solid substrate to mean small discrete particles made of various material including, but not limited to, plastics, ceramics, glass, and polystyrene. In an embodiment, the microspheres are magnetic microspheres or beads. Alternatively or additionally, the beads may be porous. The bead sizes range from nanometers, e.g., 100 nm, to millimeters, e.g., 1 mm.

[0803] A sample containing, or suspected of containing, the target nucleic acids may then be exposed to the substrate to allow binding of the target nucleic acids to the bound dead CRISPR effector protein. Non-target molecules may then be washed away. In an embodiment, the target nucleic acids may then be released from the dead CRISPR effector protein/guide RNA complex for further detection using the methods disclosed herein. In an embodiment, the target nucleic acids may first be amplified as described herein.

[0804] In an embodiment, the dead CRISPR effector may be labeled with a binding tag. In an embodiment the dead CRISPR effector may be chemically tagged. For example, the dead CRISPR effector may be chemically biotinylated. In another example embodiment, a fusion may be created by adding additional sequence encoding a fusion to the dead CRISPR effector. One example of such a fusion is an AviTag™, which employs a highly targeted enzymatic conjugation of a single biotin on a unique 15 amino acid peptide tag. In an embodiment, the dead CRISPR effector may be labeled with a capture tag such as, but not limited to, GST, Myc, hemagglutinin (HA), green fluorescent protein (GFP), flag, His tag, TAP tag, and Fc tag. The binding tag, whether a fusion, chemical tag, or capture tag, may be used to either pull down the dead CRISPR effector system once it has bound a target nucleic acid or to fix the dead CRISPR effector system on the solid substrate.

[0805] In an embodiment, the guide RNA may be labeled with a binding tag. In an embodiment, the entire guide RNA may be labeled using in vitro transcription (IVT) incorporating one or more biotinylated nucleotides, such as, biotinylated uracil. In some embodiments, biotin can be chemically or enzymatically added to the guide RNA, such as, the addition of one or more biotin groups to the 3′ end of the guide RNA. The binding tag may be used to pull down the guide RNA/target nucleic acid complex after binding has occurred, for example, by exposing the guide RNA/target nucleic acid to a streptavidin coated solid substrate.

Amplification and/or Enhancement of Detectable Positive Signal

[0806] In an embodiment, further modification may be introduced that further amplify the detectable positive signal. For example, activated CRISPR effector protein collateral activation may be used to generate a secondary target (e.g., target nucleic acid, aptamer sequence, or trigger nucleic acid) or additional guide sequence, or both. In one example embodiment, the reaction solution would contain a secondary target that is spiked in at high concentration. The secondary target may be distinct from the primary target (i.e., the target for which the assay is designed to detect) and in certain instances may be common across all reaction volumes. A secondary guide sequence for the secondary target may be protected, e.g., by a secondary structural feature such as a hairpin with a RNA loop, and unable to bind the second target or the CRISPR effector protein. Cleavage of the protecting group by an activated CRISPR effector protein (i.e., after activation by formation of complex with the primary target(s) in solution) and formation of a complex with free CRISPR effector protein in solution and activation from the spiked in secondary target. In certain other example embodiments, a similar concept is used with a second guide sequence to a secondary target sequence. The secondary target sequence may be protected a structural feature or protecting group on the secondary target. Cleavage of a protecting group off the secondary target then allows additional CRISPR effector protein/second guide sequence/secondary target complex to form. In yet another example embodiment, activation of CRISPR effector protein by the primary target(s) may be used to cleave a protected or circularized primer, which is then released to perform an isothermal amplification reaction, such as those disclosed herein, on a template that encodes a secondary guide sequence, secondary target sequence, or both. Subsequent transcription of this amplified template would produce more secondary guide sequence and/or secondary target sequence, followed by additional CRISPR effector protein collateral activation.

### Detection of Proteins

[0807] The systems, devices, and methods disclosed herein may also be adapted for detection of polypeptides (or other molecules) in addition to detection of nucleic acids, via incorporation of a specifically configured polypeptide detection aptamer. The polypeptide detection aptamers are distinct from the masking construct aptamers discussed above. First, the aptamers are designed to specifically bind to one or more target molecules. In one example embodiment, the target molecule is a target polypeptide. In another example embodiment, the target molecule is a target chemical compound, such as a target therapeutic molecule. Methods for designing and selecting aptamers with specificity for a given target, such as SELEX, are known in the art. In addition to specificity to a given target the aptamers are further designed to incorporate an RNA polymerase promoter binding site. In an embodiment, the RNA polymerase promoter is a T7 promoter. Prior to binding the aptamer binding to a target, the RNA polymerase promoter binding site is not accessible or otherwise recognizable to an RNA polymerase. However, the aptamer is configured so that upon binding of a target the structure of the aptamer undergoes a conformational change such that the RNA polymerase promoter binding site is then exposed. An aptamer sequence downstream of the RNA polymerase promoter binding site acts as a template for generation of a trigger RNA oligonucleotide by an RNA polymerase. Thus, the template portion of the aptamer may further incorporate a barcode or other identifying sequence that identifies a given aptamer and its target. Guide RNAs as described above may then be designed to recognize these specific trigger oligonucleotide sequences. Binding of the guide RNAs to the trigger oligonucleotides activates the CRISPR effector proteins which proceeds to deactivate the masking constructs and generate a positive detectable signal as described previously.

[0808] Accordingly, in an embodiment, the methods disclosed herein comprise the additional step of distributing a sample or set of sample into a set of individual discrete volumes, each individual discrete volume comprising peptide detection aptamers, a CRISPR effector protein, one or more guide RNAs, a masking construct, and incubating the sample or set of samples under conditions sufficient to allow binding of the detection aptamers to the one or more target molecules (e.g., target polypeptides), wherein binding of the aptamer to a corresponding target molecule (e.g., target polypeptide) results in exposure of the RNA polymerase promoter binding site such that synthesis of a trigger RNA is initiated by the binding of a RNA polymerase to the RNA polymerase promoter binding site.

[0809] In another example embodiment, binding of the aptamer may expose a primer binding site upon binding of the aptamer to a target polypeptide. For example, the aptamer may expose a RPA primer binding site. Thus, the addition or inclusion of the primer will then feed into an amplification reaction, such as the RPA reaction outlined above.

[0810] In an embodiment, the aptamer may be a conformation-switching aptamer, which upon binding to the target of interest may change secondary structure and expose new regions of single-stranded DNA. In an embodiment, these new-regions of single-stranded DNA may be used as substrates for ligation, extending the aptamers and creating longer ssDNA molecules which can be specifically detected using the embodiments disclosed herein. The aptamer design could be further combined with ternary complexes for detection of low-epitope targets, such as glucose (Yang et al. 2015: pubs.acs.org/doi/abs/10.1021/acs.analchem.5b01634http://pubs.acs.org/doi/abs/10.1021/acs.anal chem.5b01634). Example conformation shifting aptamers and corresponding guide RNAs (crRNAs) are shown below.

TABLE 11

| | |
|---|---|
| Thrombin aptamer | tgtggttggtgtggttggttcatggtcata |
| | ttggtttttttttttttttccaaccacagt |
| | (SEQ ID NO: 92) |
| Thrombin ligation | ggttggtagtctcgaattgctctctttcac |
| probe | tggcc (SEQ ID NO: 93) |
| Thrombin RPA | gaaattaatacgactcactatagggggttg |
| forward 1 primer | gttcatggtcatattggt |
| | (SEQ ID NO: 94) |
| Thrombin RPA | gaaattaatacgactcactatagggggttg |
| forward 2 primer | gtgtggttggttcatggtcatattggt |
| | (SEQ ID NO: 95) |
| Thrombin RPA | ggccagtgaaagagagcaattegagactac |
| reverse 1 primer | c (SEQ ID NO: 96) |
| Thrombin crRNA 1 | gauuuagacuaccccaaaaacgaaggggac |
| | uaaaacccagugaaagagagcaauucgaga |
| | cuac |
| | (SEQ ID NO: 97) |
| Thrombin crRNA 2 | gauuuagacuaccccaaaaacgaagggga |
| | cuaaaacaaagagagcaauucgagacuac |
| | caacca |
| | (SEQ ID NO: 98) |
| Thrombin crRNA 3 | gauuuagacuaccccaaaaacgaagggga |
| | cuaaaacagacuaccaaccacagagacug |
| | ugguug |
| | (SEQ ID NO: 99) |
| PTK7 full length | gttagatcgcaagcatatcattgcgcttg |
| amplicon control | cgatctaactgctgcgccgccgggaaaat |
| | actgtacggttagatcgcatagtctcgaa |
| | ttgctctctttcactggcc |
| | (SEQ ID NO: 100) |
| PTK7 aptamer | gttagatcgcaagcatatcattgcgcttg |
| | cgatctaactgctgcgccgccgggaaaat |
| | actgtacggttag |
| | (SEQ ID NO: 101) |
| PTK7 ligation | atcgcatagtctcgaattgctctctttca |
| probe | ctggcc (SEQ ID NO: 102) |
| PTK7 RPA | gaaattaatacgactcactatagggatcg |
| forward 1 primer | caagcatatcattgcgcttgc |
| | (SEQ ID NO: 103) |
| PTK7 RPA | ggccagtgaaagagagcaattcgagacta |
| reverse 1 primer | tg (SEQ ID NO: 104) |
| PTK7 crRNA 1 | gauuuagacuaccccaaaaacgaagggga |
| | cuaaaacccagugaaagagagcaauucga |
| | gacuau |
| | (SEQ ID NO: 105) |
| PTK7 crRNA 2 | gauuuagacuaccccaaaaacgaagggga |
| | cuaaaacagagcaauucgagacuaugcga |
| | ucuaac |
| | (SEQ ID NO: 106) |
| PTK7 crRNA 3 | gauuuagacuaccccaaaaacgaagggga |
| | cuaaaacacuaugcgaucuaaccguacag |
| | uauuuu |
| | (SEQ ID NO: 107) |

### Devices

[0811] The systems described herein can be embodied on diagnostic devices. A number of substrates and configurations may be used. The devices may be capable of defining multiple individual discrete volumes within the device. As used herein an “individual discrete volume” refers to a discrete space, such as a container, receptacle, or other defined volume or space that can be defined by properties that prevent and/or inhibit migration of target molecules, for example a volume or space defined by physical properties such as walls, for example the walls of a well, tube, or a surface of a droplet, which may be impermeable or semipermeable, or as defined by other means such as chemical, diffusion rate limited, electro-magnetic, or light illumination, or any combination thereof that can contain a sample within a defined space. Individual discrete volumes may be identified by molecular tags, such as nucleic acid barcodes. By “diffusion rate limited” (for example diffusion defined volumes) is meant spaces that are only accessible to certain molecules or reactions because diffusion constraints effectively defining a space or volume as would be the case for two parallel laminar streams where diffusion will limit the migrationCRn of a target molecule from one stream to the other. By “chemical” defined volume or space is meant spaces where only certain target molecules can exist because of their chemical or molecular properties, such as size, where for example gel beads may exclude certain species from entering the beads but not others, such as by surface charge, matrix size or other physical property of the bead that can allow selection of species that may enter the interior of the bead. By “electro-magnetically” defined volume or space is meant spaces where the electro-magnetic properties of the target molecules or their supports such as charge or magnetic properties can be used to define certain regions in a space such as capturing magnetic particles within a magnetic field or directly on magnets. By “optically” defined volume is meant any region of space that may be defined by illuminating it with visible, ultraviolet, infrared, or other wavelengths of light such that only target molecules within the defined space or volume may be labeled. One advantage to the use of non-walled, or semipermeable discrete volumes is that some reagents, such as buffers, chemical activators, or other agents may be passed through the discrete volume, while other materials, such as target molecules, may be maintained in the discrete volume or space. Typically, a discrete volume will include a fluid medium, (for example, an aqueous solution, an oil, a buffer, and/or a media capable of supporting cell growth) suitable for labeling of the target molecule with the indexable nucleic acid identifier under conditions that permit labeling. Exemplary discrete volumes or spaces useful in the disclosed methods include droplets (for example, microfluidic droplets and/or emulsion droplets), hydrogel beads or other polymer structures (for example polyethylene glycol di-acrylate beads or agarose beads), tissue slides (for example, fixed formalin paraffin embedded tissue slides with particular regions, volumes, or spaces defined by chemical, optical, or physical means), microscope slides with regions defined by depositing reagents in ordered arrays or random patterns, tubes (such as, centrifuge tubes, microcentrifuge tubes, test tubes, cuvettes, conical tubes, and the like), bottles (such as glass bottles, plastic bottles, ceramic bottles, Erlenmeyer flasks, scintillation vials and the like), wells (such as wells in a plate), plates, pipettes, or pipette tips among others. In an embodiment, the compartment is an aqueous droplet in a water-in-oil emulsion. In specific embodiments, any of the applications, methods, or systems described herein requiring exact or uniform volumes may employ the use of an acoustic liquid dispenser.

[0812] In an embodiment, the device comprises a flexible material substrate on which a number of spots may be defined. Flexible substrate materials suitable for use in diagnostics and biosensing are known within the art. The flexible substrate materials may be made of plant derived fibers, such as cellulosic fibers, or may be made from flexible polymers such as flexible polyester films and other polymer types. Within each defined spot, reagents of the system described herein are applied to the individual spots. Each spot may contain the same reagents except for a different guide RNA or set of guide RNAs, or where applicable, a different detection aptamer to screen for multiple targets at once. Thus, the systems and devices herein may be able to screen samples from multiple sources (e.g., multiple clinical samples from different individuals) for the presence of the same target, or a limited number of targets, or aliquots of a single sample (or multiple samples from the same source) for the presence of multiple different targets in the sample. In an embodiment, the elements of the systems described herein are freeze dried onto the paper or cloth substrate. Example flexible material-based substrates that may be used in certain example devices are disclosed in Pardee et al. Cell. 2016, 165 (5): 1255-66 and Pardee et al. Cell. 2014, 159 (4): 950-54. Suitable flexible material-based substrates for use with biological fluids, including blood are disclosed in International Patent Application Publication No. WO/2013/071301 entitled “Paper based diagnostic test” to Shevkoplyas et al. U.S. Patent Application Publication No. 2011/0111517 entitled “Paper-based microfluidic systems” to Siegel et al. and Shafiee et al. “Paper and Flexible Substrates as Materials for Biosensing Platforms to Detect Multiple Biotargets” Scientific Reports 5:8719 (2015). Further flexible based materials, including those suitable for use in wearable diagnostic devices are disclosed in Wang et al. “Flexible Substrate-Based Devices for Point-of-Care Diagnostics” Cell 34 (11): 909-21 (2016). Further flexible based materials may include nitrocellulose, polycarbonate, methylethyl cellulose, polyvinylidene fluoride (PVDF), polystyrene, or glass (see e.g., US20120238008). In an embodiment, discrete volumes are separated by a hydrophobic surface, such as but not limited to wax, photoresist, or solid ink.

[0813] In some embodiments, a dosimeter or badge may be provided that serves as a sensor or indicator such that the wearer is notified of exposure to certain microbes or other agents. For example, the systems described herein may be used to detect a particular pathogen. Likewise, aptamer-based embodiments disclosed above may be used to detect both polypeptide as well as other agents, such as chemical agents, to which a specific aptamer may bind. Such a device may be useful for surveillance of soldiers or other military personnel, as well as clinicians, researchers, hospital staff, and the like, in order to provide information relating to exposure to potentially dangerous agents as quickly as possible, for example for biological or chemical warfare agent detection. In other embodiments, such a surveillance badge may be used for preventing exposure to dangerous microbes or pathogens in immunocompromised patients, burn patients, patients undergoing chemotherapy, children, or elderly individuals.

[0814] Samples sources that may be analyzed using the systems and devices described herein include biological samples of a subject or environmental samples. Environmental samples may include surfaces or fluids. The biological samples may include, but are not limited to, saliva, blood, plasma, sera, stool, urine, sputum, mucous, lymph, synovial fluid, spinal fluid, cerebrospinal fluid, a swab from skin or a mucosal membrane, or combination thereof. In an example embodiment, the environmental sample is taken from a solid surface, such as a surface used in the preparation of food or other sensitive compositions and materials.

[0815] In other example embodiments, the elements of the systems described herein may be place on a single use substrate, such as swab or cloth that is used to swab a surface or sample fluid. For example, the system could be used to test for the presence of a pathogen on a food by swabbing the surface of a food product, such as a fruit or vegetable. Similarly, the single use substrate may be used to swab other surfaces for detection of certain microbes or agents, such as for use in security screening. Single use substrates may also have applications in forensics, where the CRISPR systems are designed to detect, for example identifying DNA SNPs that may be used to identify a suspect, or certain tissue or cell markers to determine the type of biological matter present in a sample. Likewise, the single use substrate could be used to collect a sample from a patient-such as a saliva sample from the mouth—or a swab of the skin. In other embodiments, a sample or swab may be taken of a meat product on order to detect the presence of absence of contaminants on or within the meat product.

[0816] Near-real-time microbial diagnostics are needed for food, clinical, industrial, and other environmental settings (see e.g., Lu T K, Bowers J, and Koeris M S., Trends Biotechnol. 2013 June; 31 (6): 325-7). In an embodiment, the present invention is used for rapid detection of foodborne pathogens using guide RNAs specific to a pathogen (e.g., Campylobacter jejuni, Clostridium perfringens, Salmonella spp., Escherichia coli, Bacillus cereus, Listeria monocytogenes, Shigella spp., Staphylococcus aureus, Staphylococcal enteritis, Streptococcus, Vibrio cholerae, Vibrio parahaemolyticus, Vibrio vulnificus, Yersinia enterocolitica and Yersinia pseudotuberculosis, Brucella spp., Corynebacterium ulcerans, Coxiella burnetii, or Plesiomonas shigelloides).

[0817] In an embodiment, the device is or comprises a flow strip. For instance, a lateral flow strip allows for CRISPR effector protein (e.g., CRISPR nuclease, e.g., CRISPR RNAse) detection by color. The nucleic acid reporter (e.g., RNA reporter) is modified to have a first molecule (such as for instance FITC) attached to the 5′ end and a second molecule (such as for instance biotin) attached to the 3′ end (or vice versa). The lateral flow strip is designed to have two capture lines with anti-first molecule (e.g., anti-FITC) antibodies hybridized at the first line and anti-second molecule (e.g., anti-biotin) antibodies at the second downstream line. As the reaction flows down the strip, uncleaved reporter will bind to anti-first molecule antibodies at the first capture line, while cleaved reporters will liberate the second molecule and allow second molecule binding at the second capture line. Second molecule sandwich antibodies, for instance conjugated to nanoparticles, such as gold nanoparticles, will bind any second molecule at the first or second line and result in a strong readout/signal (e.g., color). As more reporter is cleaved, more signal will accumulate at the second capture line and less signal will appear at the first line. In certain aspects, the invention relates to the use of a follow strip as described herein for detecting nucleic acids or polypeptides. In certain aspects, the invention relates to a method for detecting nucleic acids or polypeptides with a flow strip as defined herein, e.g. (lateral) flow tests or (lateral) flow immunochromatographic assays.

[0818] In an embodiment, the device is a microfluidic device that generates and/or merges different droplets (i.e., individual discrete volumes). For example, a first set of droplets may be formed containing samples to be screened and a second set of droplets formed containing the elements of the systems described herein. The first and second set of droplets are then merged, and then diagnostic methods as described herein are carried out on the merged droplet set. Microfluidic devices disclosed herein may be silicone-based chips and may be fabricated using a variety of techniques, including, but not limited to, hot embossing, molding of elastomers, injection molding, LIGA, soft lithography, silicon fabrication and related thin film processing techniques. Suitable materials for fabricating the microfluidic devices include, but are not limited to, cyclic olefin copolymer (COC), polycarbonate, poly(dimethylsiloxane) (PDMS), and poly(methyl methacrylate) (PMMA). In one embodiment, soft lithography in PDMS may be used to prepare the microfluidic devices. For example, a mold may be made using photolithography which defines the location of flow channels, valves, and filters within a substrate. The substrate material is poured into a mold and allowed to set to create a stamp. The stamp is then sealed to a solid support, such as but not limited to, glass. Due to the hydrophobic nature of some polymers, such as PDMS, which absorbs some proteins and may inhibit certain biological processes, a passivating agent may be necessary (Schoffner et al. Nucleic Acids Research, 1996, 24:375-379). Suitable passivating agents are known in the art and include, but are not limited to, silanes, parylene, n-Dodecyl-b-D-maltoside (DDM), pluronic, Tween-20, other similar surfactants, polyethylene glycol (PEG), albumin, collagen, and other similar proteins and peptides.

[0819] In an embodiment, the system and/or device may be adapted for conversion to a flow-cytometry readout in or allow to all of sensitive and quantitative measurements of millions of cells in a single experiment and improve upon existing flow-based methods, such as the PrimeFlow assay. In an embodiment, cells may be cast in droplets containing unpolymerized gel monomer, which can then be cast into single-cell droplets suitable for analysis by flow cytometry. A detection construct comprising a fluorescent detectable label may be cast into the droplet comprising unpolymerized gel monomer. Upon polymerization of the gel monomer to form a bead within a droplet. Because gel polymerization is through free-radical formation, the fluorescent reporter becomes covalently bound to the gel. The detection construct may be further modified to comprise a linker, such as an amine. A quencher may be added post-gel formation and will bind via the linker to the reporter construct. Thus, the quencher is not bound to the gel and is free to diffuse away when the reporter is cleaved by the CRISPR effector protein. Amplification of signal in droplet may be achieved by coupling the detection construct to a hybridization chain reaction (HCR initiator) amplification. DNA/RNA hybrid hairpins may be incorporated into the gel which may comprise a hairpin loop that has a RNase sensitive domain. By protecting a strand displacement toehold within a hairpin loop that has a RNase sensitive domain, HCR initiators may be selectively deprotected following cleavage of the hairpin loop by the CRISPR effector protein. Following deprotection of HCR initiators via toehold mediated strand displacement, fluorescent HCR monomers may be washed into the gel to enable signal amplification where the initiators are deprotected.

[0820] An example of microfluidic device that may be used in the context of the invention is described in Hour et al. “Direct Detection and drug-resistance profiling of bacteremias using inertial microfluidics” Lap Chip. 15 (10): 2297-2307 (2016).

[0821] In systems described herein, may further be incorporated into wearable medical devices that assess biological samples, such as biological fluids, of a subject outside the clinic setting and report the outcome of the assay remotely to a central server accessible by a medical care professional. The device may include the ability to self-sample blood, such as the devices disclosed in U.S. Patent Application Publication No. 2015/0342509 entitled “Needle-free Blood Draw to Peeters et al., U.S. Patent Application Publication No. 2015/0065821 entitled “Nanoparticle Phoresis” to Andrew Conrad.

[0822] In an embodiment, the device may comprise individual wells, such as microplate wells. The size of the microplate wells may be the size of standard 6, 24, 96, 384, 1536, 3456, or 9600 sized wells. In an embodiment, the elements of the systems described herein may be freeze dried and applied to the surface of the well prior to distribution and use.

[0823] The devices disclosed herein may further comprise inlet and outlet ports, or openings, which in turn may be connected to valves, tubes, channels, chambers, and syringes and/or pumps for the introduction and extraction of fluids into and from the device. The devices may be connected to fluid flow actuators that allow directional movement of fluids within the microfluidic device. Example actuators include, but are not limited to, syringe pumps, mechanically actuated recirculating pumps, electroosmotic pumps, bulbs, bellows, diaphragms, or bubbles intended to force movement of fluids. In an embodiment, the devices are connected to controllers with programmable valves that work together to move fluids through the device. In an embodiment, the devices are connected to the controllers discussed in further detail below. The devices may be connected to flow actuators, controllers, and sample loading devices by tubing that terminates in metal pins for insertion into inlet ports on the device.

[0824] As shown herein the elements of the system are stable when freeze dried, therefore embodiments that do not require a supporting device are also contemplated, i.e., the system may be applied to any surface or fluid that will support the reactions disclosed herein and allow for detection of a positive detectable signal from that surface or solution. In addition to freeze-drying, the systems may also be stably stored and utilized in a pelletized form. Polymers useful in forming suitable pelletized forms are known in the art.

[0825] In an embodiment, the CRISPR effector protein is bound to each discrete volume in the device. Each discrete volume may comprise a different guide RNA specific for a different target molecule. In an embodiment, a sample is exposed to a solid substrate comprising more than one discrete volume each comprising a guide RNA specific for a target molecule. Not being bound by a theory, each guide RNA will capture its target molecule from the sample and the sample does not need to be divided into separate assays. Thus, a valuable sample may be preserved. The effector protein may be a fusion protein comprising an affinity tag. Affinity tags are well known in the art (e.g., HA tag, Myc tag, Flag tag, His tag, biotin). The effector protein may be linked to a biotin molecule and the discrete volumes may comprise streptavidin. In other embodiments, the CRISPR effector protein is bound by an antibody specific for the effector protein. Methods of binding a CRISPR enzyme has been described previously (see, e.g., US20140356867A1).

[0826] The devices disclosed herein may also include elements of point of care (POC) devices known in the art for analyzing samples by other methods. See, for example St John and Price, “Existing and Emerging Technologies for Point-of-Care Testing” (Clin Biochem Rev. 2014 August; 35(3): 155-167).

[0827] The present invention may be used with a wireless lab-on-chip (LOC) diagnostic sensor system (see e.g., U.S. Pat. No. 9,470,699 “Diagnostic radio frequency identification sensors and applications thereof”). In an embodiment, the present invention is performed in a LOC controlled by a wireless device (e.g., a cell phone, a personal digital assistant (PDA), a tablet) and results are reported to said device.

[0828] Radio frequency identification (RFID) tag systems include an RFID tag that transmits data for reception by an RFID reader (also referred to as an interrogator). In a typical RFID system, individual objects (e.g., store merchandise) are equipped with a relatively small tag that contains a transponder. The transponder has a memory chip that is given a unique electronic product code. The RFID reader emits a signal activating the transponder within the tag through the use of a communication protocol. Accordingly, the RFID reader is capable of reading and writing data to the tag. Additionally, the RFID tag reader processes the data according to the RFID tag system application. Currently, there are passive and active type RFID tags. The passive type RFID tag does not contain an internal power source, but is powered by radio frequency signals received from the RFID reader. Alternatively, the active type RFID tag contains an internal power source that enables the active type RFID tag to possess greater transmission ranges and memory capacity. The use of a passive versus an active tag is dependent upon the particular application.

[0829] Lab-on-the chip technology is well described in the scientific literature and consists of multiple microfluidic channels, input or chemical wells. Reactions in wells can be measured using radio frequency identification (RFID) tag technology since conductive leads from RFID electronic chip can be linked directly to each of the test wells. An antenna can be printed or mounted in another layer of the electronic chip or directly on the back of the device. Furthermore, the leads, the antenna and the electronic chip can be embedded into the LOC chip, thereby preventing shorting of the electrodes or electronics. Since LOC allows complex sample separation and analyses, this technology allows LOC tests to be done independently of a complex or expensive reader. Rather, a simple wireless device such as a cell phone or a PDA can be used. In one embodiment, the wireless device also controls the separation and control of the microfluidics channels for more complex LOC analyses. In one embodiment, a LED and other electronic measuring or sensing devices are included in the LOC-RFID chip. Not being bound by a theory, this technology is disposable and allows complex tests that require separation and mixing to be performed outside of a laboratory.

[0830] In preferred embodiments, the LOC may be a microfluidic device. The LOC may be a passive chip, wherein the chip is powered and controlled through a wireless device. In an embodiment, the LOC includes a microfluidic channel for holding reagents and a channel for introducing a sample. In an embodiment, a signal from the wireless device delivers power to the LOC and activates mixing of the sample and assay reagents. Specifically, in the case of the present invention, the system may include a masking agent, CRISPR effector protein, and guide RNAs specific for a target molecule. Upon activation of the LOC, the microfluidic device may mix the sample and assay reagents. Upon mixing, a sensor detects a signal and transmits the results to the wireless device. In an embodiment, the unmasking agent is a conductive RNA molecule. The conductive RNA molecule may be attached to the conductive material. Conductive molecules can be conductive nanoparticles, conductive proteins, metal particles that are attached to the protein or latex or other beads that are conductive. In an embodiment, if DNA or RNA is used then the conductive molecules can be attached directly to the matching DNA or RNA strands. The release of the conductive molecules may be detected across a sensor. The assay may be a one step process.

[0831] Since the electrical conductivity of the surface area can be measured precisely quantitative results are possible on the disposable wireless RFID electro-assays. Furthermore, the test area can be very small allowing for more tests to be done in a given area and therefore resulting in cost savings. In an embodiment, separate sensors each associated with a different CRISPR effector protein and guide RNA immobilized to a sensor are used to detect multiple target molecules. Not being bound by a theory, activation of different sensors may be distinguished by the wireless device.

[0832] In addition to the conductive methods described herein, other methods may be used that rely on RFID or Bluetooth as the basic low-cost communication and power platform for a disposable RFID assay. For example, optical means may be used to assess the presence and level of a given target molecule. In an embodiment, an optical sensor detects unmasking of a fluorescent masking agent.

[0833] In an embodiment, the device of the present invention may include handheld portable devices for diagnostic reading of an assay (see e.g., Vashist et al., Commercial Smartphone-Based Devices and Smart Applications for Personalized Healthcare Monitoring and Management, Diagnostics 2014, 4 (3), 104-128; mReader from Mobile Assay; and Holomic Rapid Diagnostic Test Reader).

[0834] As noted herein, certain embodiments allow detection via colorimetric change which has certain attendant benefits when embodiments are utilized in POC situations and/or in resource poor environments where access to more complex detection equipment to readout the signal may be limited. However, portable embodiments disclosed herein may also be coupled with hand-held spectrophotometers that enable detection of signals outside the visible range. An example of a hand-held spectrophotometer device that may be used in combination with the present invention is described in Das et al. “Ultra-portable, wireless smartphone spectrophotometer for rapid, non-destructive testing of fruit ripeness.” Nature Scientific Reports. 2016, 6:32504, DOI: 10.1038/srep32504. Finally, in an embodiment utilizing quantum dot-based masking constructs, use of a hand-held UV light, or other suitable device, may be successfully used to detect a signal owing to the near complete quantum yield provided by quantum dots.

### Kits

[0835] In one aspect, the invention provides kits containing any one or more of the elements disclosed in the above methods and compositions. In an embodiment, the kit comprises a vector system as taught herein or one or more of the components of the CRISPR/Cas system or complex as taught herein, such as crRNAs and/or CRISPR-Cas effector protein or CRISPR-Cas effector protein encoding mRNA, and instructions for using the kit. Elements may be provided individually or in combinations, and may be provided in any suitable container, such as a vial, a bottle, or a tube. In an embodiment, the kit includes instructions in one or more languages, for example in more than one language. The instructions may be specific to the applications and methods described herein. In an embodiment, a kit comprises one or more reagents for use in a process utilizing one or more of the elements described herein. Reagents may be provided in any suitable container. For example, a kit may provide one or more reaction or storage buffers. Reagents may be provided in a form that is usable in a particular assay, or in a form that requires addition of one or more other components before use (e.g., in concentrate or lyophilized form). A buffer can be any buffer, including but not limited to a sodium carbonate buffer, a sodium bicarbonate buffer, a borate buffer, a Tris buffer, a MOPS buffer, a HEPES buffer, and combinations thereof. In an embodiment, the buffer is alkaline. In an embodiment, the buffer has a pH from about 7 to about 10. In an embodiment, the kit comprises one or more oligonucleotides corresponding to a guide sequence for insertion into a vector so as to operably link the guide or crRNA sequence and a regulatory element. In an embodiment, the kit comprises a homologous recombination template polynucleotide. In an embodiment, the kit comprises one or more of the vectors and/or one or more of the polynucleotides described herein. The kit may advantageously allow to provide all elements of the systems of the invention.

[0836] The invention further relates to the following aspects, which are described hereinbelow as numbered statements:
[0837] 1. A non-naturally occurring, engineered composition comprising: a B-CASP polypeptide; and a plurality of Cas polypeptides, wherein (a) and (b) are capable of forming a non-naturally occurring, engineered multimeric CRISPR-Cas complex in the presence of a guide molecule, and wherein the guide molecule is capable of directing sequence-specific binding of the non-naturally occurring, engineered multimeric CRISPR-Cas complex to a target sequence in a target polynucleotide.
[0838] 2. The composition according to Statement 1, wherein the β-CASP polypeptide comprises an N-terminal β-CASP domain and a C-terminal adapter domain.
[0839] 3. The composition according to Statement 2, wherein the C-terminal adapter domain comprises an α-helical domain having homology to the C-terminus of a Cas10 protein.
[0840] 4. The composition according to any one of the preceding Statements, wherein the β-CASP polypeptide comprises a plurality of residues capable of coordinating with Zn2+ ions.
[0841] 5 The composition according to any one of the preceding Statements, wherein the plurality of Cas polypeptides comprise a Cas5 family polypeptide, a Cas7 family polypeptide, and optionally a Cas6 family polypeptide.
[0842] 6. The composition according to any one of the preceding Statements, wherein the Cas5 family polypeptide is a Type III Csx10 polypeptide, a homolog thereof, or an ortholog thereof; wherein the Cas7 family polypeptide is a Type III Csm3 polypeptide, a homolog thereof, or an ortholog thereof; and/or wherein the Cas6 family polypeptide is a Type III Cas6 polypeptide, a homolog thereof, or an ortholog thereof.
[0843] 7. The composition according to any one of the preceding Statements, wherein one or more of the β-CASP polypeptide and/or the Cas polypeptides has catalytic activity; wherein one or more of the β-CASP polypeptide and/or the Cas polypeptides lacks catalytic activity; and/or wherein one or more of the β-CASP polypeptide and/or the Cas polypeptides is or is engineered to have nickase activity.
[0844] 8. The composition according to Statement 7, wherein the β-CASP polypeptide has catalytic activity.
[0845] 9. The composition according to Statement 7 or Statement 8, wherein the Cas7 family polypeptide lacks catalytic activity.
[0846] 10. The composition according to any one of Statements 7 to 9, wherein the catalytic activity is RNAse activity.
[0847] 11. The composition according to any one of the preceding Statements, wherein one or more of the β-CASP polypeptide and/or the Cas polypeptides further comprise one or more additional modifications that increase nuclease efficiency, target polynucleotide binding efficiency, or reduce off-target nuclease activity.
[0848] 12. The composition according to any one of the preceding Statements, wherein the β-CASP polypeptide and/or one or more of the Cas polypeptides is/are further linked to or otherwise capable of associating with a heterologous functional domain.
[0849] 13. The composition according to Statement 12, wherein the heterologous functional domain is a nucleotide deaminase, a transposase, a reverse transcriptase, a recombinase, a methylase, a demethylase, an acetylase, or a deacetylase.
[0850] 14. The composition according to any one of the preceding Statements, wherein the β-CASP polypeptide and/or one or more of the Cas polypeptides is/are derived from one or more bacteria and/or one or more archaea.
[0851] 15. The composition according to Statements 14, wherein:
[0852] the one or more bacteria each independently belong to the phylum selected from the group consisting of: Bacillota; and DTHG01000077 4 candidate division White Oak River group 3 (WOR-3); the one or more archaea each independently belong to the phylum selected from the group consisting of MBU4492343 1/HEQ78297 1/Euryarchaeota; RLE40065.1 Candidatus Woesearchaeota; NHI92075 1 Candidatus Lokiarchaeota; and PKP54316 1 Candidatus Altiarchaeales archaeon; and/or the one or more archaea each independently belong to the order selected from the group consisting of: PXF52022 1/RJS85311 1/Methanophagales; and MCD4797691.1/CAG0966219 1/RLG33181 1 Methanosarcinales.
[0853] 16. The composition according to Statements 14 or Statements 15, wherein: the one or more bacteria each independently belong to the Staphylococcus genus, and optionally one of the bacteria is 6NBT Staphylococcus epidermis; the one or more archaea each independently belong to the family MCG2727882 1 Candidatus Methanoperedenaceae, and optionally one of the archaea is WP 0972978485 1 Candidatus Methanoperedens sp BLZ2; the one or more archaea each independently belong to a genus selected from the group consisting of: WP 0972978485 1 Candidatus Methanoperedens; and/or the one or more archaea each independently belong to a species selected from the group consisting of: 4QTS (Csm3) Mathanocaldococcus jannaschii; and WP 012965105 1 Ferroglobus placidus, and optionally one of the archaea is WP 012965105 1 Ferroglobus placidus DSM 10642.
[0854] 17. The composition according to any one of Statements 14-16, wherein each of the β-CASP polypeptide and the one or more Cas polypeptides are derived from a same species or from one or more different species.
[0855] 18. The composition according to any one of Statements 14-17, wherein the β-CASP polypeptide is derived from a first species, and the one or more Cas polypeptides are derived from a second species different from the first species.
[0856] 19. The composition according to any one of Statements 1-18, further comprising one or more guide molecules, wherein the guide molecules comprise a guide sequence capable of hybridizing to a target sequence of the target molecule, and wherein the composition is optionally in the form of the non-naturally occurring, engineered multimeric CRISPR-Cas complex.
[0857] 20. The composition according to Statement 19, wherein the at least one guide molecule is a crRNA comprising a spacer sequence flanked on the 5′ and 3′ ends by direct repeat sequences.
[0858] 21. A nucleic acid molecule comprising a nucleotide sequence encoding one or more components of the composition of any one of Statements 1-20.
[0859] 22. A vector comprising a polynucleotide comprising one or more nucleic acid molecules of Statement 21.
[0860] 23. The vector of Statement 22, wherein the vector is a viral vector.
[0861] 24 A delivery vehicle comprising one or more components of the composition of any one of Statements 1-20, the non-naturally occurring, engineered multimeric CRISPR-Cas complex of Statement 19 or Statement 20, the nucleic acid molecule of Statement 21, the vector of Statement 22 or Statement 23, or any combination thereof.
[0862] 25. The delivery vehicle of Statement 24, wherein the delivery vehicle is a lipid nanoparticle, a viral capsid, an engineered retroelement vector, a polynucleotide-based nano-structure, or an extracellular contractile injection system.
[0863] 26. An engineered cell comprising the one or more components of the composition of any one of Statements 1-20, the non-naturally occurring, engineered multimeric CRISPR-Cas complex of Statement 19 or Statement 20, the nucleic acid molecule of Statement 21, the vector of Statement 22 or Statement 23, or any combination thereof.
[0864] 27. The engineered cell according to Statement 26, wherein the engineered cell is an engineered eukaryotic cell or an engineered prokaryotic cell.
[0865] 28. An organism comprising the cell according to Statement 26 or Statement 27.
[0866] 29. The organism of Statement 28, wherein the organism is an animal or a plant.
[0867] 30. A pharmaceutical composition for treatment of a disease or disorder, comprising one or more components of the composition of any one of Statements 1-20, the non-naturally occurring, engineered multimeric CRISPR-Cas complex of Statement 19 or Statements20, the nucleic acid molecule of Statement 21, the vector of Statement 22 or Statement 23, the delivery particle of Statement 24 or Statement 25, the engineered cell of Statement 26 or Statements 27, or any combination thereof.
[0868] 31. A method of modifying a target polynucleotide, the method comprising contacting a sample comprising a target polynucleotide with one or more components of the composition of any one of Statements 1-20, the non-naturally occurring, engineered multimeric CRISPR-Cas complex of Statement 19 or Statement 20, the nucleic acid molecule of Statement 21, the vector of Statement 22 or Statement 23, the delivery particle of Statement 24 or Statement 25, the engineered cell of Statement 26 or Statement 27, the pharmaceutical composition of Statement 30, or any combination thereof.
[0869] 32. The method of Statement 31, wherein contacting results in modification of a gene product or modification of the amount or expression of a gene product.
[0870] 33. The method of Statement 31 or Statement 32, wherein the target polynucleotide is a disease- or disorder-associated target polynucleotide.

### EXAMPLES

[0871] Further embodiments are illustrated in the following Examples which are given for illustrative purposes only and are not intended to limit the scope of the invention.

### Example 1

[0872] Uncovering the functional diversity of CRISPR-Cas systems with deep terascale clustering.

[0873] Microbial systems have formed the foundation of widely applicable biotechnologies such as CRISPR, but the exponential growth of sequence databases has made exploring their diversity increasingly challenging. To address this limitation, Applicant developed the Fast Locality-Sensitive Hashing-based clustering algorithm (FLSHclust) that can perform deep protein clustering on massive datasets in linear (linearithmically O (N logN), with N protein sequences) time. Applicant incorporated FLSHclust into a sensitive, scalable CRISPR discovery pipeline and identified previously unreported CRISPR-linked genes, including new CRISPR effector modules, transposon-linked systems, CRISPR adaptation-linked genes, and diverse auxiliary genes, indicating that many more biochemical functions are coupled to adaptive immunity in prokaryotes than previously thought. Applicant identified and characterized a candidate Type VII CRISPR system from archaea and demonstrated that it acts on RNA. This work opens new avenues for harnessing CRISPR diversity for biotechnology and medicine and for broader exploration of the vast functional diversity of microbial proteins.

### INTRODUCTION

[0874] Discovery of enzymes and natural biochemical systems advances molecular evolution studies, shines new light on biological processes, and provides a starting point for the development of molecular technologies. Over the past few decades, an enormous variety of previously unknown protein families and entire functional systems has been discovered through the systematic mining of the rapidly growing nucleic acid and protein sequence databases. Many of these efforts employ protein clustering to group similar protein sequences in large datasets (FIG. 1A). The output of these algorithms can then be used to inform efforts aimed at deep learning on protein sequences, 3D protein structure prediction, and genome mining. One prime example of the latter is the discovery of novel CRISPR systems, which has led to the development of transformative biotechnologies and therapeutic approaches (1-4).

[0875] CRISPR systems, which are widely found in bacteria and archaea, are RNA-guided adaptive immune systems (5). They are composed of a CRISPR array, which encodes the CRISPR (cr) RNAs that gives rise to the guides, an adaptation module, which integrates new spacers into the CRISPR array, and an interference module that consists of effector components guided by the crRNAs to matching targets, which are then cleaved. CRISPR effectors can be either complexes of Cas proteins (e.g., Cascade) in Class 1 CRISPR systems or single, multidomain proteins (e.g., Cas9, Cas12, Cas13) in Class 2 CRISPR systems (6). This inherent modularity and programmability of CRISPR systems has been capitalized on to develop a suite of RNA-guided molecular technologies, starting with Cas9-mediated genome editing (1).

[0876] This toolbox was considerably expanded through computational searches that uncovered many new CRISPR systems (3, 7-9), but existing computational methods have relied on algorithms that have quadratic runtime, such as all-against-all comparisons and protein clustering (9). These methods quickly become impractical for mining exponentially growing datasets containing billions of proteins (10). Linear scaling clustering methods like LinClust (11) can address some of these issues but produce small clusters of highly similar sequences that limit the ability to study deep evolutionary relationships. Protein domain profiles, such as PFAM, can be used to identify broad abundant associations (12), but group remote homologs, leading to spurious associations while missing rare ones (13).

[0877] To address these limitations and take advantage of the explosive increase of the known structural and functional diversity of proteins resulting from the exponential growth of sequence databases, Applicant developed FLSHclust (pronounced “flash clust”), a parallelized, deep clustering algorithm that scales linearithmically, O(N logN). FLSHclust can handle billions of proteins, enabling efficient analysis of the vast, rapidly growing sequence databases. Applicant applied FLSHclust to identify previously uncharacterized CRISPR systems, including a candidate type VII CRISPR system, generating a catalog of RNA-guided proteins that expand the understanding of the biology and evolution of these systems and provide the starting point for the development of new biotechnologies.

### Fast Locality-Sensitive Hashing Allows for Deep Clustering of all Known Proteins at Terabyte Scale.

[0878] To circumvent the need for all-to-all comparisons, Applicant used locality sensitive hashing (LSH), which efficiently groups together similar objects in linear time (14), to develop FLSHclust (Fast LSH clustering) (FIG. 1B). FLSHclust first converts all amino acids in each protein to a reduced alphabet and extracts all kmers of size k from each protein (FIG. 1C). An optimal LSH family with no false negatives is generated using Markov Chain Monte Carlo, and for each hash function, all hashed kmers are mapped to buckets (FIG. 1D) (14). Two representative sequences are then selected per bucket, and for all sequences in the bucket, a graph edge is formed if an alignment between the sequence and each of the representatives satisfies the clustering criteria. The resulting graph is simplified using a density-based transformation and community detection is applied to form groups of sequences, which are then clustered using greedy clustering to produce a final set of clusters (FIG. 5A for schematic depiction of full algorithm and FIG. 5B for pseudocode, see herein Extended Discussion of FLSHclust Algorithm).

[0879] The clustering performance and scalability of FLSHclust were compared to those of other commonly used algorithms (MMSeqs2, uclust, and LinClust) using a random sample of 1 million UniRef50 proteins clustered at 30% sequence identity (FIG. 1E) (11, 15-17). The clustering quality was assessed by the percentage of proteins in clusters of size≥2 as a function of sequence identity to the nearest neighbor protein. FLSHclust clustered a substantially higher fraction of sequences than LinClust when using 2 tolerated mismatches in the LSH family with a kmer length of 13 (FIG. 1E). When attempting to cluster the entire UniRef50 database (51M sequences) down to 30% sequence identity, MMSeqs2 and uclust did not finish within 2 weeks on 32 CPUs. Furthermore, FLSHclust was substantially more complete in clustering the full database than LinClust (which does not cluster effectively below 50% sequence identity, as previously reported (11)), with a 58% increase in the total number of clustered sequences (FIG. 1F). Although FLSHclust's run times are dependent on the number of tolerated mismatches, r, it scales pseudo-linearly with the number of sequences and exhibits linear scaling behavior empirically, in contrast to MMSeq2 and uclust, which scale quadratically (FIG. 6). The ability of FLSHclust to deeply cluster sequences down to 30-35% while scaling linearly with the number of sequences makes it suitable for a wide range of big data applications in biology such as genome mining.

### Discovery of Previously Unreported, Rare CRISPR Systems

[0880] Applicant applied FLSHclust to discover new, rare CRISPR systems. CRISPR systems have diverse architectures and mechanisms and are divided into 33 subtypes (6). To find additional CRISPR systems, which may be extremely rare, Applicant developed a sensitive, linearithmically scaling ( ) N logN) CRISPR discovery pipeline that combines FLSHclust and CRISPR repeat finders to identify deep clusters of proteins that are stably associated with CRISPR arrays (FIG. 2A). Applicant curated a database of 8.8 Tbp of prokaryotic genomic and metagenomic contigs (excluding metagenomic contigs<2 kbp in length) from NCBI, WGS, and JGI (FIG. 2A). All coding sequences were predicted using Genemark (18), and CRISPR arrays were predicted using previously developed CRISPR finders (19-22) and CRONUS, a tool Applicant developed to detect smaller CRISPR arrays including imperfect repeats as well as other repeat arrays with hypervariable spacers (see Materials and Methods, FIG. 7 for benchmarking). The final database contained 8 billion proteins and 10.2 million CRISPR arrays. Using FLSHclust, Applicant iteratively clustered all proteins resulting in 1.3 billion redundancy reduced and 499.9 million deep clusters at 90% and 30% sequence identity, respectively. In contrast to clustering at 50% identity, which produced 646.4 million clusters, clustering at 30% with FLSHclust produced fewer but larger clusters with higher sample sizes (mean cluster size of 2.5 vs 2.0 non-redundant proteins).

[0881] To identify genes stably associated with CRISPR arrays, Applicant then computed a CRISPR association score (naive score) for each 30% cluster by calculating the weighted fraction of non-redundant proteins encoded within 3 kbp of a CRISPR array over the effective sample size of the cluster, N_eff, which adjusts for contig truncations that occur in metagenomic data (see Materials and Methods). To capture emerging or degrading CRISPR systems, which often only contain a single direct repeat (DR) or highly diverged DRs (23), for each CRISPR-associated cluster, Applicant selected a representative DR and searched its sequence against all other non-redundant loci in the cluster (24). The identified divergent DR sequences were used to compute an enhanced CRISPR-association score. Finally, to expand the search to find genomically distant components of CRISPR systems, all proteins considered to be CRISPR-associated were used as baits for identifying additional associated proteins (FIG. 2A).

[0882] To evaluate the performance of this CRISPR search pipeline, Applicant compared the naive and enhanced CRISPR scores of known CRISPR-associated sequence (cas) genes and found that the mean naive score of cas genes was 0.44, whereas the enhanced score increased to 0.72 (FIG. 2B), highlighting the importance of identifying divergent DRs and mini CRISPR arrays. Using the enhanced score, Applicant compared cas and non-cas genes and empirically determined a cutoff of 0.35, which included the majority of known CRISPR-associated genes while removing most of the non-cas genes (FIG. 2C). Applicant then applied this filter to all protein clusters with an effective sample size N_eff≥3, resulting in ˜130,000 clusters with associations to CRISPR-like repeats (out of 16 million total clusters with N_eff≥3). Many of these CRISPR-associated clusters included proteins or domains not previously linked to CRISPRs.

[0883] The abundance and distribution of different CRISPR systems is uneven across sequenced bacterial and archaeal genomes (25). To gauge how the increasing diversity of sequencing data correlates with the detectable CRISPR-Cas diversity with Applicant's pipeline, Applicant back-calculated the time at which the clusters with a minimum of four non-redundant CRISPR-associated loci appeared in the public dataset. These calculations track with the abundance of cas genes, highlighting the importance of diverse environmental sampling for discovering useful biochemical and mechanistic diversity in CRISPR-Cas systems. Notably, the system that Applicant identifies here is rare and appeared in the dataset only recently in the past decade. This system is a candidate Type VII CRISPR system, which Applicant has experimentally characterized. Type VII CRISPR system is a precise RNA-guided RNA endonuclease complex containing a β-CASP nuclease domain protein.

[0884] CRISPR systems evolve through modular replacement of Cas components and subdomains. Applicant further identified a distinct system that is represented in diverse archaea and contains a β-CASP nuclease domain protein. This protein is encoded in a predicted operon with Cas7 and Cas5 which, together, likely form a previously unreported minimal effector complex, and in some cases, a Cas6, which is implicated in crRNA processing (FIG. 3A, FIG. 8A The Cas5 and the Cas7 of this system are distantly related to the Type III-D Cas5 and Cas7 proteins, respectively, with an apparent inactivation of the Cas7 catalytic residues that are required for target RNA cleavage in type III systems (FIG. 3B, FIG. 8B-8E).

[0885] The β-CASP domain is an ancient nuclease fold found in all domains of life that exhibits RNA endonuclease, 5′ to 3′ RNA exonuclease and/or DNA nuclease activity (37). β-CASP domain proteins are involved in Non-Homologous End Joining DNA repair (NHEJ), V (D) J recombination, RNA surveillance, mRNA/rRNA maturation and RNA decay (38-42). Phylogenetic analysis of the β-CASP family supports the origin of the CRISPR-associated members from a distinct, well-defined clade (FIG. 3C, FIG. 8F). Structural modeling of the β-CASP protein with AlphaFold2 (+3) shows two distinct domains, namely, the N-terminal β-CASP domain (FIG. 9, FIG. 8G), and a C-terminal adaptor domain with structural similarity (but not detectable sequence similarity) to the ˜200 aa C-terminal domain of Cas10 (FIG. 3D), the large subunit of type III systems that is involved in target RNA interaction (44). Given its unique domain composition and association with CRISPR, Applicant propose to designate the β-CASP domain protein Cas15.

[0886] Applicant next searched for protospacer matches to the CRISPR spacers contained in these systems and found that they exhibited a pronounced bias towards the antisense strand of matching target sequences (FIG. 3E), suggesting that these systems target RNA. Applicant further observed that spacers primarily target transposon genes, indicating that the system likely functions as a defense against actively expressed transposons, unlike other known CRISPR types, which primarily target viruses or plasmids (FIG. 3F, FIG. 10).

[0887] Applicant hypothesized that the Cas15-containing system carries out interference via the β-CASP nuclease domain, in contrast to CRISPR subtype III-E, which also likely originated from subtype III-D but retains a Cas7-based interference mechanism (6, 45, 46). These findings suggest convergent evolution of minimal effector complexes. Given the distant relationship between the effector complex of the Cas15-containing system and those of other known CRISPR types, and the substitution of the effector nuclease with an unrelated protein domain, β-CASP, Applicant propose that the Cas 15-containing system is classified as type VII CRISPR-Cas system.

[0888] Small RNA-seq on purified Cas7/Cas5 RNP complexes showed that Cas7 and Cas5 form a complex that co-purifies with a processed crRNA that contains both a 5′ and 3′ DR tag, similar to Type I and IV systems (FIG. 3G) (27, 35). The complex is stable only in the presence of the corresponding crRNA, suggesting a specific functional association of the Cas7-Cas5 proteins in this system with the crRNA component encoded nearby. (FIG. 3H). To test cleavage activity, Applicant separately purified the Cas15 protein and mixed it with the purified Cas7/Cas5 RNP complex and labeled target RNA. Applicant observed precise target RNA cleavage with two cleavage sites only in the presence of all proteins and the cognate target sequence (FIG. 3I), suggesting that Cas15 is the nuclease effector in these systems. Target RNA cleavage by Cas15 and associated Cas7-Cas5 RNP was further evaluated at various temperatures. Cleavage was apparent in a range from 37° C. to 52° C. (FIG. 3J).

### Putative Novel CRISPR Variants and CRISPR-Associated Genes

[0889] Applicant's biodiscovery pipeline identified many more putative novel systems that collectively highlight expansive diversity in the mechanisms of CRISPR-associated systems, reveal previously unreported enzymatic functions linked to RNA-guided activity, and suggest evolutionary trajectories leading to the creation and loss of CRISPR systems. In total, Applicant identified 193 CRISPR-linked genes that, to the best of Applicant's knowledge, have not been reported previously. From these findings, Applicant identified the candidate Type VII system described herein comprising new gene associations between the β-CASP domain and the Cas5, Cas7, and optionally Cas6 domains (FIG. 4A), potentially evolved via addition of the β-CASP domain into an alternate system (e.g., Class 1 Type III) system (FIG. 4B).

### DISCUSSION

[0890] The continuing and accelerating proliferation of public sequence data has the potential to transform biology, but realizing this potential requires computational approaches that can keep pace with the database growth. Central to this effort is moving away from all-to-all comparisons. Here, Applicant used LSH to develop FLSHclust, an algorithm for clustering proteins and applied it to identify CRISPR systems. Applicant found many previously unreported CRISPR systems and associated genes. The systems identified are rare, with many encompassing only a single cluster out of the ˜130,000 CRISPR-linked clusters identified, highlighting the power of this approach. The discovery of new cas genes and CRISPR systems substantially expands the known CRISPR diversity, emphasizing the functional versatility of CRISPR whereby new proteins and domains are often recruited, either replacing pre-existing components or, as in the candidate Type VII system, conferring new functions to the pre-existing scaffold of Cas proteins (FIG. 4B).

[0891] Applicant observed many new domains and proteins associated with CRISPR effector modules, several of which appear to replace the function of lost components (FIG. 4A), highlighting the modular evolution of CRISPR effectors. Applicant identified the notable case of the candidate type VII CRISPR system discovered here, in which the enzymatic domains of Cas10 were functionally replaced by the unrelated β-CASP nuclease (FIG. 3D). Similarly, the discovery of a broad variety of proteins and domains associated with CRISPR adaptation modules suggests the existence of many functional and mechanistic variations in this first stage of the CRISPR function. CRISPR systems can also be co-opted for other RNA-guided functions, such as transposition (56).

[0892] Due to the ability of CRISPR-Cas systems to programmably sense specific nucleic acids and subsequently enact enzymatic functions, the discovery and characterization of novel CRISPR effectors and downstream auxiliary functions has the potential to enable a wide range of applications and improve existing CRISPR-based technologies, such as genome editing.

### Materials and Methods

### FLSHclust Implementation

[0893] The FLSHclust algorithm was implemented in Python 3 using PySpark for distributed computation on commodity clusters without shared memory or disk. Described below are the general implementation details (see FIG. S1 for visual depiction of the algorithm).

[0894] The algorithm has the following core parameters: min_seq_id: The minimum sequence identity for including proteins in a cluster, cov: The minimum coverage between sequences for alignment, cov_approx_factor: an approximation parameter for filtering out sequences pairs that will not match the clustering criteria without actually aligning the sequences, k: The main kmer length used for clustering.

[0895] The family of hash functions used for locality-sensitive hashing is random position masking, which involves dropping random positions in each kmer before matching them with a hash table. Each hash function drops different combinations of positions. Thus, the set of hash functions can be reduced to the set of position combinations that are dropped, {Hᵢ}, which essentially is a boolean matrix of positions that are to be dropped out. Optimal functions are generated using Markov Chain Monte Carlo (MCMC) as follows. Applicants use the following method to achieve hash functions with no false negatives for up to r mismatches. All combinations of mismatch positions are enumerated up until a value m max and stored asApplicant's input X. For an initial set of hash functions, {Hᵢ}, LSH is performed on the entirety of X. The fraction of recovered sequences via LSH as a function of the number of mismatches, m, is stored as R. An energy function of the form exp (−R 7) is used for MCMC to maximize R as a function of {Hᵢ}. Optimal hash functions can be obtained and then stored for use. Perfect hash functions are obtained when R 1 at the end of optimization. Not all combinations of parameters will result in perfect hash functions.

[0896] Proteins are assigned random numeric IDs at the start. Next, all protein amino acid sequences are first converted to a reduced alphabet that groups related amino acids together. The reduced alphabet has 13 tokens, which allows each token to be represented by 4 bits, allowing for more space efficient representations than using a full char (8 bits). The map between tokens and amino acids are shown below:
[0897] [(O, [′T′, ‘A’, ‘S’]), (1, [′L′, ‘M’]), (2, [′I′, ‘V’]), (3, [′R′, ‘K’]), (4, [′Q′, ‘E’]), (5, [′D′, ‘N’]), (6, [′Y′, ‘F’]), (7, [′W′]), (8, [′C′]), (9, [′G′]), (10, [′H′]), (11, [′P′]), (12, [′U′, ‘O’, ‘J’, ‘Z’, ‘X’, ‘B’, ‘*’])]

[0898] Kmers of length k are then generated for each protein, while excluding any kmers that contain amino acid stop codons (′*′) characters. Kmers are stored in compressed format as integers when performing joins and merges to reduce space usage. Compressed formats are calculated efficiently using a rolling calculation with bitshifting. Each reduced amino acid token is stored as 4 bits in the final representation, and the bits are stored in an 8-byte integer.

[0899] Calculations comparing kmers and number of mismatches between kmers are performed directly on the bit representations when possible. To assist with reducing noise, for each kmer, Applicant additionally added a paired kmer of the same size that is equal to the length k sequence immediately upstream from the kmer, which Applicant referred to as the paired kmer (kmer_pre). Using the paired kmer mode is optional.

[0900] Next, Applicant iterated over all L hash functions, starting with i=0. All kmers (represented as integers) are mapped to their respective hash values using the hash function Hᵢ. Hash values are matched. Buckets with more than 1 kmer are retained. Two representative protein ids (rep_proteins) are then selected for each bucket: L_rep, which is the protein id corresponding to the longest sequence in the bucket (using protein id as a tiebreaker), and H_rep, which is the protein with the largest protein id (which was randomly selected at the start), using length (in descending order) as a tiebreaker. All proteins in the bucket are then paired to each of the two representative protein ids. For each protein/rep_protein pair, if cov*cov_approx_factor*length (rep_seq)>length (protein), then remove the pair from further consideration. If paired kmer mode is used, then additionally, the paired kmers between the protein and the rep_protein are compared according to their hamming distances as computed from their bit representations. If the hamming distance divided by k is less than the min_seq_id, Applicant discarded the pair from future consideration. All remaining pairs are merged into a persistent bucketed table, and i is incremented from 0 to 1-1. The persistent bucketed table is maintained across all iterations and holds all pairs of sequences to be aligned. The bucketing is performed on the join keys during save to prevent complete repartitioning of both the persistent and update table at each iteration, drastically reducing runtime. The maximum number of pairs in the table will be K*N*L., where K is the maximum sequence length. The iterations can be performed in batches as memory and disk allows.

[0901] After all iterations have been completed, the final persistent table is used to generate alignments. Due to the massive size of the table, the task of creating alignments is split further into A iterations, where A is determined by the size of the persistent table as well as the cluster resources so as to prevent consuming the entire storage of the cluster. For each of the A iterations, j 0, . . . ,A, all rep_seq ids with a modulo equal to j are considered for alignment. Then all passing protein/rep_protein pairs are materialized using a join to a database containing the original sequences. The sequence identity between each protein and the rep protein sequences are then determined according to the user's choice of 1) a fast edit distance-based estimate of sequence identity or 2) a slower but more Smith-Waterman accurate local sequence alignment using a Blosum62 scoring matrix with a gap open penalty of 11 and a gap extension penalty of 1 (which can be adjusted if desired). Minimum sequence coverage and minimum sequence identity are then enforced according to the clustering criterion min_seq_id and cov, resulting in a set of protein/rep_protein pairs that satisfy the clustering criteria. After all A iterations have been performed and their results merged, the next step is the optional graph simplification.

[0902] The resulting set of remaining protein/rep protein pairs then form the basis for a directed graph. Graph simplification is essential for reducing long chains in the graph that result from deep homology within a family or fold of proteins. These long chains can result in very large communities detected by connected components and is thus important when clustering at low sequence identity and while using connected components for community detection. Graph simplification may not be necessary if other community detection algorithms are used.

[0903] The main graph simplification step works by clustering together nodes that are closely connected, in a way that preserves the overall structure of the graph. The first step is to create a new table of nodes and their degrees, where the degree of a node is the number of edges that it is connected to. Next, Applicant grouped the edges by their destination node and aggregate the information for each node in a list of (degree, source) tuples. The winning edge for each node is then determined as the edge with the highest degree and smallest source node.

[0904] The next step is to determine the winning edges for each source and destination node.

[0905] This is done by ranking the edges for each node based on their winning degree and then selecting the top-ranked edge. Finally, the winning edges for the source nodes are combined with the winning edges for the destination nodes to form the final set of edges for the simplified graph.

[0906] Any edges that connect a node to itself are filtered out.

[0907] After the graph simplification, a distributed connected components algorithm is performed on the graph to identify communities. Within each community, all sequences are realigned to the representative protein. Extremely large communities are processed separately to avoid skew times due to allocation to a single CPU.

[0908] The node with the max original degree in the graph (prior to simplification) within each community is selected as the megarep node. All nodes within the community that have not been aligned to the megarep node are realigned to the megarep node, forming new edges as required. For each cluster, all nodes are then sorted by the number of edges it is connected to within the cluster. The list of sorted nodes is then traversed and for each node visited that has not been assigned to a cluster, a new cluster is created consisting of all nodes that it is connected to that has not been clustered, along with itself. The final list of clusters are then combined across all communities to form the final clustering of the entire dataset. Numeric protein ids were then reassigned back to their original ids using a join.

### Clustering Comparison

[0909] UniRef100, UniRef90, and UniRef50 were downloaded from UniProt on 2022 Apr. 18 for comparing clustering methods. Clustering was performed either on UniRef90 or UniRef50 using multiple software packages as possible to compare their clustering results. For timing comparisons, different clustering software were tested on a single 32 CPU node against various random samples of differing size from UniRef50 to test their runtimes as a function of the number of input sequences. Linear models were fitted to linear/linearithmic scaling algorithms on the data transformation using a least squares fit on the log-log transformed data/model predictions (log time vs log sequences). Quadratic models were fitted in the same manner for quadratic algorithms but using a quadratic model in place of a linear model.

[0910] A 1 million sample subset of UniRef50 was generated at random. The subset was then searched against UniRef50 on a 160 CPU machine with 3.8 TB shared memory using MMSeqs2 with sensitivity of 7.5, a minimum coverage of 0.8, and maximum 100 sequences per query, with the—realign mode. For each query, the top 100 hits were then realigned to the query using the standard Smith-Waterman algorithm with a Blosum62 matrix, a gap open penalty of 11 and a gap extension penalty of 1. If the number of aligned residues in the query divided by the length of the query was less than the min_cov of 0.8, then the query/target pair was ignored. Similarly, if the number of aligned residues in the target divided by the length of the target was less than the min_cov of 0.8, then the query/target pair was ignored. Of the passing query/target pairs, the target with the maximum sequence identity was selected to be the nearest neighbor.

### CRONUS CRISPR Repeat Tool

[0911] CRONUS was implemented with python 3 and operates as follows. For main parameters, CRONUS uses the minimum number of repeats-min_repeats (default 3), the minimum repeat length-min_len (default 15), the minimum sequence identity between repeats-min_id (default 85), the maximal size of the direct repeats-max_repeat_sz (default 200), the maximum spacer length-max_spacer_len (default 200), the seed size of the initial search-seed_size (default 5), the maximum number of repeat types per array-max_repeat_types (default 2). A general description of the program is given below.

[0912] First, vmatch2 is run with the query (len N) against itself with a seed length seed_size and a min identity min_id and a max edit distance based on the min_len, min_id, and seed_size. A sparse N×N coverage matrix was then formed containing all of the pairwise matches from vmatch2 with max genomic distance of 400. Connected components were then obtained from treating the coverage matrix as an adjacency matrix. Clusters of related sequences were determined by the connected components algorithm. Match groups were formed based on the connected components, consisting of a sequence along with all of its matches if it belongs to a connected component. For each match group the following was performed: A focus region was defined as the entire region spanning the sequences found in the component plus an additional 200 bp on either side. Next, length 5 kmers from all sequences covered by the connected component are grouped into a list to serve as passable kmers. All kmers of length 5 in the focus region were then identified and counted, provided that they exist in the list of passable kmers.

[0913] Kmers with a count of 3 or more were included for further processing. For each kmer, the positions in the focus were taken into a list d′in sorted order. If med len, the median difference in adjacent positions (called diff) in d was below 15, the kmer was skipped. The spacing regularity was defined as mean (abs (diff−med_len) % med len), where % is the modulo operator. The normalized regularity was equal to the spacing regularity divided by the med len. If the normalized regularity was >0.35 or if med len>=300, then the kmers were discarded. For the remaining kmers, if any of them overlap with the positions of the initial matches from the match group, the match was retained. If the final number of matches was less than min_repeats, then the entire match group was skipped. Next, the distances between all remaining matches were calculated. If the 80th percentile of the distance between matches (defined as soft_max_neigh_dist) is greater than 2*max_spacer_len, then the entire match group was skipped. Next, the match group was filtered to remove deviating matches. Specifically, if a match on either end of the match group is more than 1.5*soft_max_neigh_dist from the rest of the list, it is removed. This is repeated until no more matches are removed.

[0914] Next, Applicant constructed a list of start and end positions for each putative DR, as determined by the current match group. Applicant then sorted these positions by their starting location. Next, Applicant applied a merging step to combine overlapping DRs into longer contiguous regions. This is done by checking if two adjacent DRs have an overlap of at least overlap_buffer base pairs, and if so, merging them together. After the DRs have been identified and merged, Applicant aligned the putative DR sequences to each other and process the alignment to determine which DRs should be extended to improve the alignment. DRs are extended if they have a critical threshold of mismatches or gaps compared to the other DRs in the alignment. The extended DRs are then re-aligned with the other DRs, and the process is repeated until either no DRs need to be extended or the maximum number of iterations is reached. Using these alignments of the putative DRs, the DRs are further refined. The full alignment is converted into an embedding matrix, E of size N*5*M, where N is the number of sequences and M is the alignment length, by setting E [i, j+5*f (x [i.j])]=1/M for each i.j, and 0 otherwise, where f sends ‘A’ to 0, ‘T’ to 1, ‘G’ to 2, ‘C’ to 3 and ‘-’ to 4. Lastly, clustering is performed using DBSCAN with the dbscan function from scikit-learn. The parameters used are eps=0.55 and p=1. The eps parameter determines the maximum distance between two samples for them to be considered as in the same neighborhood. The p parameter is the power parameter for the Minkowski metric used by DBSCAN. Using the DBSCAN clusters, the repeat boundaries are refined while considering sequence divergence. The spacer regions are then tested for minimum variability.

[0915] To limit the extent of all-to-all comparisons within each contig, contigs are split into 20 kb overlapping tiles (with 13334 bp overlaps) and CRONUS is run on each split with resulting overlapping CRISPR arrays deduplicated by prioritizing the longest arrays followed by the arrays with the smallest start site.

### Extended Discussion of FLSHclust Algorithm

[0916] Hash-based clustering algorithms divide objects into a set of elements that can be matched individually using hash functions. With proteins, a hash function bucketing scheme allows grouping proteins that share kmers. However, the efficiency of kmer-based grouping for linear time clustering decreases as sequence identity between proteins drops because kmer bucketing requires long strings of identical consecutive matches. Thus, the technique becomes less effective in grouping proteins that share low sequence similarity.

[0917] Locality sensitive hashing (LSH) is a well-established technique for approximate nearest neighbor matching (9). By expanding a single hash function into a family of hash functions, LSH allows for inexact matching of elements at the cost of false negatives, false positives, and extra computational time (FIG. 1D). While LSH eliminates the need for long consecutive identical sequence matches, the high number of false negatives can adversely affect clustering performance by causing missed matches. However, a recent theorem for binary LSH functions (functions acting on 01 bit vectors) demonstrates the possibility of implementing these functions in a way that guarantees the absence of binary LSH families that have no false negatives (14).

[0918] Applicant applied this theorem to the case of string kmers to generate false negative-free kmer LSH families and subsequently developed the FLSHclust algorithm. Using Markov-Chain Monte Carlo, Applicant generated kmer LSH functions with no false negatives. To do so for a specific kmer length, k, Applicant enumerated all possible combinations of mismatch positions up to r and computed a loss equal to the number of mismatch combinations that go undetected using the entire set of hash functions. The hash functions are then perturbed using MCMC until the loss converges.

[0919] The FLSH clustering algorithm is then constructed as follows: first, all amino acids are compressed to a reduced alphabet that groups similar amino acids together. Next, all kmers of size k are extracted from each protein. Then, for each hash function, all kmers are mapped to buckets using the output of the hash function applied to the kmers. 2 representative sequences are deterministically selected per bucket to be temporary cluster centers. All sequences in the bucket are then retrieved and aligned against the cluster centers. A graph edge is formed if the alignment between the two sequences satisfies the clustering sequence identity and minimum coverage criteria. The resulting graph of edges is then simplified using a local density-based transformation that removes weak links that would otherwise create long chains of unrelated sequences in the graph. Next, a community detection algorithm is applied to form groups of sequences. For simplicity, a PREGEL implementation of the breadth first connected components algorithm is used; however notably other algorithms could be used in this place instead, such as the Leiden algorithm (11). The most hub-like sequence from each group is selected as the initial cluster center and all sequences in the group are realigned to the initial cluster center forming new edges. Each group of sequences is then clustered using greedy clustering using the new subgraph. To increase parallelizability, the FLSHclust algorithm replaces the global greedy clustering stage included in LinClust (11) with a parallelized graph simplification and community detection algorithm followed by local greedy clustering within each detected community (FIG. 1E). The algorithm is parallelizable and is bottlenecked by the maximum size of the detected communities. Applicant implemented FLSHclust in Apache Spark, employing Apache Arrow for in-memory access to enhance fault tolerance and scalability on distributed commodity clusters. Other implementations aimed at speed as opposed to fault tolerance may yield performance improvements in other computing environments.

### Performance Comparison of CRISPR Finders on Synthetic CRISPR Array Benchmark

[0920] A synthetic benchmark was constructed using parameterized probability distributions over CRISPR arrays. These CRISPR arrays were then embedded in totally random nucleotide sequences and then used as inputs for the various CRISPR finders along with different parameter combinations for the CRISPR finders. Tasks were parallelized using Apache Spark on a compute cluster with 6400 CPUs.

[0921] Synthetic CRISPRs were generated according to the following process. Applicant started by setting the seed for the random number generator using the “trial” value. Then, Applicant generated a consensus sequence for the direct repeat (DR) by generating a random sequence of canonical bases (A, C, G, T) of length equal to the prespecified DR length. Applicant also defined a range for the DR size that is equal to [floor (dr_len*(1-rel_indel_range)), ceil (dr_len*(1+rel_indel_range))]. Similarly, Applicant defined a range for the spacer size that takes into account the spacer indel relative range, equal to [floor (dr_len*(1-spacer_rel_indel_range)), ceil (dr_len*(1+spacer_rel_indel_range))].

[0922] Next, Applicant created empty lists to hold the DR and spacer sequences generated in the loop. Applicant iterated “n_dr” times to generate the DR sequences. For each DR, Applicant started with the consensus sequence and perform mismatches by randomly selecting a base that is different from the consensus base with a probability of “p_mismatch”. Applicant then checked if an indel should be performed by randomly selecting a value between the defined range for the DR size and comparing it to the original length. If an indel should be performed, Applicant randomly selected the position(s) and type of indel(s) to be made. If an insertion is made, Applicant inserted a randomly chosen base at the selected position(s). If a deletion is made, Applicant removed the base(s) at the selected position(s). The resulting DR sequence is added to the list.

[0923] Similarly, Applicant iterated “n_dr-1” times to generate the spacer sequences between the DRs. For each spacer, Applicant started with the consensus spacer sequence and perform mismatches with a probability of “1-p_spacer_similarity”. This allows control over the level of similarity between spacer sequences. For all tests used, p_spacer_similarity is selected to be 0.3, resulting in highly differing spacer sequences. Applicant then checked if an indel should be performed by randomly selecting a value between the defined range for the spacer size and comparing it to the original length. If an indel should be performed, Applicant randomly selected the position(s) and type of indel(s) to be made. If an insertion is made, Applicant inserted a randomly chosen base at the selected position(s). If a deletion is made, Applicant removed the base(s) at the selected position(s). The resulting spacer sequence is added to the list.

[0924] The final CRISPR array is formed by interleaving the spacers into the DR sequences and then concatenating the full array into a single sequence. Then, Applicant generated left and right flanking sequences to be added to the CRISPR sequence. Then, Applicant generated a random DNA sequence of length 20000 and insert the synthetic CRISPR array at the randomly selected position in the sequence.

[0925] For each CRISPR parameter set of the 35 selected combinations, 2000 random synthetic CRISPRs embedded in random DNA sequences were created using the above procedure, and all CRISPR predictors with selected corresponding parameters were tested against the synthetic sequences, keeping track of time elapsed.

[0926] To understand the CRISPR performance of each of the finders, Applicant compiled scores for each CRISPR finder/CRISPR parameter set (condition group) pair as follows. Applicant defined the consensus sequence of a list of DRs to be the DR with the minimum average normalized edit distance to the remaining DRs, where the normalized edit distance is defined as the edit distance between DR_i and DR j divided by the minimum length of the two DRs (DR_i, DR_j). Applicant then calculated 3 simple metrics of performance: “hit” rate, “DR count error” and “boundary position error” (indels between predicted and true DR). For each synthetic CRISPR, a predicted CRISPR was considered a “hit” if it overlaps with the synthetic CRISPR interval (expanded by a 50 bp buffer). If a hit was found, then Applicant aligned the consensus of the synthetic DRs with the consensus of the predicted DRs using Biopython pairwise2 alignment module and calculated the number of gap columns in the alignment as the boundary prediction error (in bp). The absolute value difference between the number of true DRs and predicted DRs was taken to be the DR count error. Applicant then used bootstrapping with 2000 samples to calculate the mean, upper quartile, and lower quartile of the means of all three performance metrics as well as elapsed time in order to compare between all CRISPR predictors.

### Prokaryotic Genome/Metagenome CDS Prediction and Clustering

[0927] Applicant used Prodigal (1) to predict all genes in the genomes/metagenomes, using the metagenomic option for metagenomic datasets (WGS metagenomes, JGI, MG-RAST). Next Applicant deduplicated all proteins, then iteratively clustered all proteins at 100%, 98%, 90%, 70%, 50%, and 30% sequence identities with a minimum coverage of 80%. For 100%-50% sequence identity, Applicant clustered using the FLSHclust implementation without the use of LSH functions and used the LSH functions for clustering from 50% to 30% sequence identity. All 6 clusterings along with deduplication were performed with the FLSHclust implementation over the course of ˜1-2 weeks with intermittent breaks on a Hadoop cluster containing 30 compute nodes with 32CPUs, 256 GB memory and 2 TB SSD non-shared storage each.

### Sensitive CRISPR Discovery Pipeline

[0928] For CRISPR prediction, 4 CRISPR finders were used with a total of 6 different runs based on parameter combinations selected from a calibration against the synthetic CRISPR array benchmark. Parameters for each CRISPR finder are as follows:
[0929] 1. PILERCR with minarray=3, mincons-0.9, minid=0.94, maxrepeat=64, maxspacer=64
[0930] 2. PILERCR with minarray=3, mincons=0.8, minid=0.85, maxrepeat=128, maxspacer=128
[0931] 3. CRT with minNR=3, minRL=16, maxRL=128, minSL=16, maxSL=128
[0932] 4. CRISPRFinder with mNS=2
[0933] 5. CRONUS with seed_size=5, min_len=16, minid=8, max_repeat_size=128
[0934] 6. CRONUS with seed_size=11, min_len=16, minid=80, max_repeat_size=512

[0935] Next, Applicant deduplicated CRISPR array predictions from the various CRISPR finders as follows. For each contig, Applicant created an empty list of intervals. Applicant looped through each CRISPR and checked if it overlapped with any of the existing intervals. If it did, Applicant merged the intervals and added the CRISPR to the corresponding list of CRISPRs in the merged interval. If it did not overlap with any existing intervals, Applicant created a new interval for the CRISPR.

[0936] Finally, Applicant selected the best CRISPR from each interval by selecting the CRISPR with the most DRs, highest priority index, longest length, and earliest start position. Here, the priority index of the various CRISPR finders is determined according to the following order: [′CRISPRFinder′, ‘PILER_5’, ‘PILER_1’, ‘CRT_2’, ‘CRONUS_4’, ‘CRONUS_2’]. For consistency across the CRISPR arrays, Applicant then redefined the spacers to be the sequences interleaving the predicted DRs, as not all CRISPR prediction tools may do this.

[0937] Applicant defined the distance (interval_distance) between two genomic feature intervals (e.g., a CRISPR array, or CDS) to be equal to zero if the two intervals overlap, and otherwise the minimum distance between all combinations of the endpoints. Applicant further corrected this distance for circular contigs (e.g., plasmids and some phage, entire bacterial genomes) by using the nearest distance along a circle as opposed to a line when necessary.

[0938] Applicant then used the following procedure to define operons from the set of predicted proteins within a given contig. Applicant created two lists called “proteins_f” and “proteins_r” to store proteins in forward and reverse directions, respectively. Applicant then sorted the proteins in both lists based on their starting position for forward proteins and ending position for reverse proteins. Applicant created an empty list called “intervals_f” to store forward protein operons. Applicant looped through each forward protein in “proteins_f” and obtained its starting and ending positions. If the “intervals_f” list was empty, Applicant created a new interval with the protein and appended it to the list. Otherwise, Applicant checked if the current protein was within a distance of 200 bp to the last interval in the list. If it was, Applicant added the protein to the last operon and updated its starting and ending positions to encompass all proteins currently in the operon. If it was not, Applicant created a new interval with the protein and appended it to the list. If the DNA strand was circular and there was more than one interval in the “intervals_f” list, Applicant checked if the first and last intervals were within the maximum distance of each other. If they were, Applicant merged them into a single interval that crossed the circular boundary. Applicant repeated the above process for the reverse proteins and stored the resulting intervals in a list called “intervals_r”. The final set of operons is defined by the concatenation of “intervals f” and “intervals_r”.

[0939] Applicant then defined the operonic distance between a protein and another feature of interest as the interval_distance between the feature of interest and the operon containing the protein. Applicant then computed the operonic distance between each protein and the nearest CRISPR array. For this study, Applicant set max_association_distance=3000 to be the maximum operonic distance between a protein gene and a CRISPR array at which the protein gene is considered to be associated with a CRISPR array. For each gene, the associated CRISPR array is the CRISPR array closest to the protein within max_association_distance operonic distance from the protein, or an empty array if none exists.

[0940] Metagenomic data poses a challenge in inferring associations due to the tendency for short contigs to contain partial systems. However, the information from metagenomic data can still be leveraged for calculating associations by calculating an effective sample size for each protein that incorporates information about distances to the contig edge. For each protein, two quantities are computed, “u_d” and “d_d” which are the upstream and downstream distances to the contig edge from the operon containing the protein. Upstream and downstream are determined relative to the orientation of the protein on the contig. The contig weight for the protein is then computed as the weighted average w=0.5*min (1, u_d/max_association_distance)+0.5*min (1, d_d/max_association_distance). If the protein is not associated with a CRISPR array (i.e., there is no CRISPR array with an operonic distance of less than 3000 to the protein), the effective sample size is the contig weight. If the protein is considered to be associated with a CRISPR array, then the effective sample size is equal to 1.

[0941] Proteins are then redundancy reduced as follows. All proteins within the same c90 cluster (90% identity cluster) are grouped. The proteins are then ordered in lexicographic order using the followed ordered criteria: 1) the number of DRs in the associated CRISPR array (descending order), 2) contig weight of the protein (descending order), 3) the protein id as a tiebreaker (descending order). The rank 1 protein from each c90 cluster as determined from the above ordering is then selected to be the representative protein for the c90 cluster with regards to association calculation. The resulting set of proteins is considered to be the redundancy reduced set for the naive score calculation.

[0942] The naive association score is then calculated as follows. For each c30 cluster (30% identity cluster), three quantities were computed using all the non-redundant proteins (c90 cluster representatives defined above) contained within the 30% cluster: the number of non-redundant proteins with CRISPR associations (N_cr), and the sum of the effective sample sizes of all non-redundant proteins (N_eff), as well as the total number of non-redundant proteins (N). The naive score (referred to as weighted_icity) was then calculated to be S=N_cr/N_eff.

[0943] All 30% clusters with (weighted_icity>=0.02 and N_cr>=2) or (weighted_icity>=0.1 and N_cr>=1) were selected for performing blast searches of the respective DRs in order to calculate the enhanced score. Therefore, extremely low confidence clusters were dropped to avoid performing excessive blast searches. The remaining 30% clusters were considered candidate 30% clusters.

[0944] Applicant then searched for divergent DRs for the candidate 30% clusters as follows. All non-redundant 90% clusters were assigned to the consensus DR of the closest CRISPR array of the representative cluster member, which were selected as above. Then, for each of the 30% clusters, the consensus DRs of all 90% clusters were collected into a list. For each protein belonging to the candidate 30% clusters, the 10 kb vicinity was searched against all of the consensus DRs from the 30% cluster using an expect value of le-3 (with the db size equal to the 10kbp window around the protein, accounting for reduced size when necessary due to short contigs), and a word size of 7, a gap open penalty of 6, and a gap extension penalty of 2. Applicant additionally required a minimum coverage of 0.4 to the DR to be considered a divergent DR, that is match length/DR length was required to be >=0.4. Furthermore, Applicant required that all matches be >=16 bp to reduce noise. All remaining matches were considered divergent DRs (alternatively referred to as “searched DRs”). Enhanced CRISPR scores were then calculated in the same manner as the naive score, but using the “searched DRs” in place of the CRISPR arrays when computing all quantities, namely presence of CRISPR within the vicinity (“searched DRs” within 3kbp of the protein) and effective sample size, with the caveat that only “searched DRs” for a given 30% cluster were considered for scoring that cluster (i.e., “searched DRs” for cluster i would not be used to count towards the scores for cluster j).

### Appearance of CRISPR Systems in the Public Dataset

[0945] All projects from NCBI, JGI, WGS, and EMBL were mapped to their project add dates whenever possible. Projects that could not be matched were discarded from analysis. All predicted proteins were then assigned a date based on the add date of the corresponding project. The appearance of a cluster in the public data was defined as follows. All proteins with an upstream or downstream distance to the contig edge of <500 bp were discarded due to their low quality and likely presence of protein truncations from having incomplete contigs. Then all proteins with a distance of <=10000 to a predicted CRISPR array were retained. For each 90% cluster, the minimum add date of all proteins within the cluster was taken to be the appearance date of the 90% cluster (referred to as non-redundant protein). This step constitutes the redundancy reduction step for CRISPR-associated non-redundant proteins in the calculation.

[0946] Afterward, for each 30% cluster, all of the CRISPR-associated non-redundant proteins were obtained, and their appearance dates sorted. The date of the 4th row in the sorted list was designated the appearance date of the cluster in the public data (corresponding to the minimum date at which 4 or more CRISPR-associated non-redundant proteins existed in the public data. The appearance date of a given CRISPR system was then defined as the minimum appearance date of all clusters from the system, as defined by a given signature gene. The signature gene used for defining the VII system are as follows: β-CASP.

### Spacer Search for Selected CRISPR Systems

[0947] CRISPR spacers were obtained from predicted CRISPR arrays, including the left and right cryptic “spacers” outside of the array by extending 30 bp past the first and last DRs. A consensus DR was obtained for each CRISPR array by taking the DR with the minimum average normalized edit distance to all the other DRs in the array, where Applicant define normalized edit distance as the edit distance between DR_i and DR j divided by the maximum length of DR_i and DR j. Each spacer was assigned a representative DR equal to the consensus DR for the CRISPR array it originated from.

[0948] Spacers were then searched against the entire genomic/metagenomic database using BLASTN with an e-value cutoff of 1 and word size of 11, and effective database size of 8871099067954. The effective database size was used because the BLASTN search was performed by distributing the query identically over all nodes in the cluster and then using each cluster node to blast the query against different subsets of the full database, such that the full database was searched against across all nodes. Instead of an e-value cutoff, a bit score threshold of 48 was used as a minimum for a significant match. A threshold was selected as opposed to an e-value cutoff to reduce the effect of database size on the search, however, the database size still affected the number of candidate hits below the e-value cutoff of 1. For each query, all target matches were then expanded by 100 bp in each direction. The representative DR for the spacer was then searched against the expanded region using BLASTN with a word size of 7. A target was then considered a self-match if any of the DR representative blast hits occurred within 100 bp of the spacer target match with a minimum bit score of 24. Here, a self-match is a spacer match to a locus that is identical or similar to the original CRISPR array containing the spacer. All target matches with self-matches as defined above were removed. All remaining matches were considered significant matches to the spacer sequence that are considered unrelated to the original locus.

### Expression and Purification of Candidate Type VII Proteins and RNP Complexes

[0949] To purify the candidate type VII Cas7/Cas5 RNP complex and Cas15 protein, cognate crRNAs were cloned into a pET45b (+) vector under control of a T7 promoter by Gibson assembly. The E. coli codon optimized operon was synthesized by Twist Biosciences and cloned into the crRNA-containing pET45b (+) backbone by Gibson assembly. A His14 tag was inserted at the N-terminus of the Cas5 gene and a TwinStrep tag was inserted at the N-terminus of the Cas15 gene by Gibson assembly. Proteins were expressed as described above using media supplemented only with 100 μg/ml ampicillin and cell paste was resuspended in His lysis buffer for Cas7/Cas5 RNP complexes (50 mM Tris-HCl pH 8, 250 mM NaCl, 5% glycerol, 40 mM imidazole and 5 mM β-mercaptoethanol) or Strep lysis buffer for Cas15 proteins (50 mM Tris-HCl pH 8, 250 mM NaCl, 5% glycerol, 5 mM B-mercaptoethanol). Cells were lysed and lysate was cleared as described, then the soluble fraction was mixed with Ni Sepharose 6 Fast Flow Affinity Chromatography Media (Cytiva) at 4° C. for Cas7/Cas5 RNP complexes or Strep-Tactin Superflow Plus resin (Qiagen) at 4° C. for Cas15. Each resin was washed on a gravity flow column as described above with the modification for Cas15 that imidazole was removed for all buffers. Bound RNP was then eluted in His elution buffer (50 mM Tris pH 8, 500 mM NaCl, 5% glycerol, 300 mM imidazole and 5 mM β-mercaptoethanol) or Strep elution buffer (50 mM Tris-HCl pH 8, 500 mM NaCl, 5% glycerol, 5 mM desthiobiotin and 5 mM β-mercaptoethanol) as appropriate and dialyzed overnight into dialysis buffer (20 mM Tris-HCl pH 8, 250 mM NaCl, 5% glycerol and 1 mM DTT).

### Small RNA Sequencing

[0950] RNPs: Small RNA sequencing of RNPs was performed as previously described (23). Briefly, 300 μL of protein elute was mixed with 900 μL TRI reagent (Zymo) and incubated at room temperature for 5 min. 180 μL of chloroform (Sigma Aldrich) was added and the samples were mixed gently and incubated at room temperature for an additional 3 min, then spun at 12000×g for 15 min at 4° C. The aqueous phase was used as input for RNA extraction using a Direct-zol RNA miniprep plus kit (Zymo), with in-column DNAse treatment. The purified RNA was then subject to treatment as per manufacturer's instructions with 20 U of T4 PNK (NEB) for 1 hour at 37° C., then 20 U of RNA 5′ polyphosphatase (Biosearch Technologies) for 30 min at 37° C., with each enzymatic step followed by cleanup with a Zymo RNA Clean & Concentrator-5 kit as per the manufacturer's instructions. Following enzymatic treatments, purified RNA was subject to library preparation with an NEBNext Multiplex Small RNA Library Prep kit (NEB) as per the manufacturer's instructions, with an extension time of 1 min and 12 cycles in the final PCR. Amplified libraries were gel extracted, quantified by qPCR using a KAPA Library Quantification Kit for Illumina (Roche) on a CFX Opus 384 (BioRad) and sequenced on an Illumina MiSeq with Read 1 45 cycles, Read 2 45 cycles and Index 1 6 cycles. Adapters were trimmed using CutAdapt (6) and mapped to loci of interest using BWA. Filled reads were obtained and filled reads filtered as indicated were visualized using a custom Python script (23).

### In Vitro Candidate Type VII RNA Cleavage Assays

[0951] Templates for in vitro transcription of target RNAs were produced by PCR amplification of pUC19 plasmids containing the target site. RNA was in vitro transcribed using the PCR templates with a HiScribe T7 Quick High Yield RNA Synthesis kit (NEB). 50 pmol of target RNA was heated for 3 min at 65° C., then labeled with 100 pmol of pCp-Cy5 (Jena Biosciences) using 68 U T4 RNA ligase 1, ssRNA ligase (High Concentration) (NEB) in a 1X buffer of 50 mM Tris-HCl pH 7.5, 10 mM MgCl2, 2 mM DTT, 2 mM ATP and 10% DMSO at 4° C. overnight and purified using a Zymo RNA Clean & Concentrator-5 column as per the manufacturer's instructions. Target cleavage assays contained 25 nM of labeled RNA substrate, ˜1 μM of Cas7/Cas5 RNP and ˜2 μM of Cas15 protein in a final 1x reaction buffer of 20 mM HEPES pH 8, 100 mM KCl, 40 mM NaCl, 1 mM MgCl₂, and 1 mM ATP. Assays were allowed to proceed at 45° C. or temperature as specified for 1 hour.

[0952] Reactions were then treated with 1.6 U of Proteinase K (NEB) at room temperature for 15 min. RNA was resolved by gel electrophoresis on Novex 10% TBE-Urea polyacrylamide gels (Thermo Fisher Scientific) as specified and imaged using a BioRad ChemiDoc imaging system.

### Size Exclusion Chromatography

[0953] Candidate Type VII Cas7/Cas5 complexes were purified as described, with the following modifications: buffer A contained 500 mM NaCl, buffer B contained 250 mM NaCl, and elution buffer contained 250 mM NaCl. The elution was directly diluted into to achieve a final concentration of 20 mM Tris-HCl pH 8, 150 mM NaCl, 100 mM imidazole and 3.6% glycerol. The sample was concentrated to 500 μL using a Vivaspin 20 column with a molecular weight cutoff of 50 kDa (Cytiva) and purified through a Superose 6 Increase 10/300 GL column (Cytiva) in 20 mM Tris-HCl pH 8, 150 mM NaCl, 1% glycerol. Fractions were collected and analyzed by SDS-PAGE gel electrophoresis.

### REFERENCES FOR EXAMPLE 1

[0954] 1. J. Y. Wang, J. A. Doudna, CRISPR technology: A decade of genome editing is only the beginning. Science. 379, eadd8643 (2023).
[0955] 2. S. A. Shmakov, G. Faure, K. S. Makarova, Y. I. Wolf, K. V. Severinov, E. V. Koonin, Systematic prediction of functionally linked genes in bacterial and archaeal genomes. Nature Protocols. 14 (2019), pp. 3013-3031.
[0956] 3. W. X. Yan, P. Hunnewell, L. E. Alfonse, J. M. Carte, E. Keston-Smith, S. Sothiselvam, A. J. Garrity, S. Chong, K. S. Makarova, E. V. Koonin, D. R. Cheng, D. A. Scott, Functionally diverse type V CRISPR-Cas systems. Science. 363 (2019), pp. 88-91.
[0957] 4. S. Shmakov, O. O. Abudayyeh, K. S. Makarova, Y. I. Wolf, J. S. Gootenberg, E. Semenova, L. Minakhin, J. Joung, S. Konermann, K. Severinov, F. Zhang, E. V. Koonin, Discovery and functional characterization of diverse Class 2 CRISPR-Cas systems. Mol. Cell. 60, 385 (2015).
[0958] 5. F. Hille, H. Richter, S. P. Wong, M. Bratovič, S. Ressel, E. Charpentier, The biology of CRISPR-Cas: Backward and forward. Cell. 172, 1239-1259 (2018).
[0959] 6 K. S. Makarova, Y. I. Wolf, J. Iranzo, S. A. Shmakov, O. S. Alkhnbashi, S. J. J. Brouns, E. Charpentier, D. Cheng, D. H. Haf\acute{t}, P. Horvath, S. Moineau, F. J. M. Mojica, D. Scott, S. A. Shah, V. Siksnys, M. P. Terns, Č. Venclovas, M. F. White, A. F. Yakunin, W. Yan, F. Zhang, R. A. Garrett, R. Backofen, J. van der Oost, R. Barrangou, E. V. Koonin, Evolutionary classification of CRISPR-Cas systems: a burst of class 2 and derived variants. Nat. Rev. Microbiol. 18, 67-83 (2020).
[0960] 7. S. Kannan, H. Altae-Tran, X. Jin, V. J. Madigan, R. Oshiro, K. S. Makarova, E. V. Koonin, F. Zhang, Compact RNA editors with small Cas13 proteins. Nat. Biotechnol. 40, 194-197 (2022).
[0961] 8. S. Shmakov, A. Smargon, D. Scott, D. Cox, N. Pyzocha, W. Yan, O. O. Abudayyeh, J. S. Gootenberg, K. S. Makarova, Y. I. Wolf, K. Severinov, F. Zhang, E. V. Koonin, Diversity and evolution of class 2 CRISPR-Cas systems. Nat. Rev. Microbiol. 15, 169-182 (2017).
[0962] 9. S. A. Shmakov, K. S. Makarova, Y. I. Wolf, K. V. Severinov, E. V. Koonin, Systematic prediction of genes functionally linked to CRISPR-Cas systems by gene neighborhood analysis. Proc. Natl. Acad. Sci. U.S.A 115, E5307-E5316 (2018).
[0963] 10. UniProt Consortium, UniProt: a worldwide hub of protein knowledge. Nucleic Acids Res. 47, D506-D515 (2019).
[0964] 11. M. Steinegger, J. Söding, Clustering huge protein sequence sets in linear time. Nat. Commun. 9, 2542 (2018).
[0965] 12. S. Doron, S. Melamed, G. Ofir, A. Leavitt, A. Lopatina, M. Keren, G. Amitai, R. Sorek, Systematic discovery of antiphage defense systems in the microbial pangenome. Science. 359 (2018), doi: 10.1126/science.aar4120.
[0966] 13. L. Gao, H. Altae-Tran, F. Böhning, K. S. Makarova, M. Segel, J. L. Schmid-Burgk, J. Koob, Y. I. Wolf, E. V. Koonin, F. Zhang, Diverse enzymatic activities mediate antiviral immunity in prokaryotes. Science. 369, 1077-1084 (2020).
[0967] 14. R. Pagh, CoveringLSH. ACM Transactions on Algorithms. 14 (2018), pp. 1-17.
[0968] 15. R. C. Edgar, Search and clustering orders of magnitude faster than BLAST. Bioinformatics. 26, 2460-2461 (2010).
[0969] 16. M. Steinegger, J. Söding, MMseqs2 enables sensitive protein sequence searching for the analysis of massive data sets. Nat. Biotechnol. 35, 1026-1028 (2017).
[0970] 17. B. E. Suzek, Y. Wang, H. Huang, P. B. McGarvey, C. H. Wu, UniProt Consortium, UniRef clusters: a comprehensive and scalable alternative for improving sequence similarity searches. Bioinformatics. 31, 926-932 (2015).
[0971] 18. A. Lomsadze, K. Gemayel, S. Tang, M. Borodovsky, Modeling leaderless transcription and atypical genes results in more accurate gene prediction in prokaryotes. Genome Res. 28, 1079-1089 (2018).
[0972] 19. R. C. Edgar, PILER-CR: fast and accurate identification of CRISPR repeats. BMC Bioinformatics. 8, 18 (2007).
[0973] 20. C. Bland, T. L. Ramsey, F. Sabree, M. Lowe, K. Brown, N. C. Kyrpides, P. Hugenholtz, CRISPR recognition tool (CRT): a tool for automatic detection of clustered regularly interspaced palindromic repeats. BMC Bioinformatics. 8, 209 (2007).
[0974] 21. I. Grissa, G. Vergnaud, C. Pourcel, CRISPRFinder: a web tool to identify clustered regularly interspaced short palindromic repeats. Nucleic Acids Res. 35, W52-7 (2007).
[0975] 22. A. Biswas, R. H. J. Staals, S. E. Morales, P. C. Fineran, C. M. Brown, CRISPRDetect: A flexible algorithm to define CRISPR arrays. BMC Genomics. 17, 356 (2016).
[0976] 23. H. Altae-Tran, S. Kannan, F. E. Demircioglu, R. Oshiro, S. P. Nety, L. J. Mckay, M. Dlakić, W. P. Inskeep, K. S. Makarova, R. K. Macrae, E. V. Koonin, F. Zhang, The widespread IS200/IS605 transposon family encodes diverse programmable RNA-guided endonucleases. Science. 374, 57-65 (2021).
[0977] 24. G. Faure, S. A. Shmakov, W. X. Yan, D. R. Cheng, D. A. Scott, J. E. Peters, K. S. Makarova, E. V. Koonin, CRISPR-Cas in mobile genetic elements: counter-defence and beyond. Nat. Rev. Microbiol. 17, 513-525 (2019).
[0978] 25. C. Pourcel, M. Touchon, N. Villeriot, J.-P. Vernadet, D. Couvin, C. Toffano-Nioche, G. Vergnaud, CRISPRCasdb a successor of CRISPRdb containing CRISPR arrays and cas genes from complete genome sequences, and tools to download and query lists of repeats and spacers. Nucleic Acids Res. 48, D535-D544 (2020).
[0979] 26. H. N. Taylor, E. E. Warner, M. J. Armbrust, V. M. Crowley, K. J. Olsen, R. N. Jackson, Structural basis of Type IV CRISPR RNA biogenesis by a Cas6 endoribonuclease. RNA Biol. 16, 1438-1447 (2019).
[0980] 27. A. Özcan, P. Pausch, A. Linden, A. Wulf, K. Schühle, J. Heider, H. Urlaub, T. Heimerl, G. Bange, L. Randau, Type IV CRISPR RNA processing and effector complex formation in Aromatoleum aromaticum. Nat Microbiol. 4, 89-96 (2019).
[0981] 28. R. Pinilla-Redondo, D. Mayo-Muñoz, J. Russel, R. A. Garrett, L. Randau, S. J. Sørensen, S. A. Shah, Type IV CRISPR-Cas systems are highly diverse and involved in competition between plasmids. Nucleic Acids Res. 48, 2000-2012 (2020).
[0982] 29. X. Guo, M. Sanchez-Londono, J. V. Gomes-Filho, R. Hernandez-Tamayo, S. Rust, L. M. Immelmann, P. Schäfer, J. Wiegel, P. L. Graumann, L. Randau, Characterization of the self-targeting Type IV CRISPR interference system in Pseudomonas oleovorans. Nat Microbiol. 7, 1870-1878 (2022).
[0983] 30. V. M. Crowley, A. Catching, H. N. Taylor, A. L. Borges, J. Metcalf, J. Bondy-Denomy, R. N. Jackson, A Type IV-A CRISPR-Cas System in Mediates RNA-Guided Plasmid Interference. CRISPR J. 2, 434-440 (2019).
[0984] 31. A. Moya-Beltrán, K. S. Makarova, L. G. Acuña, Y. I. Wolf, P. C. Covarrubias, S. A. Shmakov, C. Silva, I. Tolstoy, D. B. Johnson, E. V. Koonin, R. Quatrini, Evolution of Type IV CRISPR-Cas Systems: Insights from CRISPR Loci in Integrative Conjugative Elements of. CRISPR J. 4, 656-672 (2021).
[0985] 32. S. Mulepati, S. Bailey, In vitro reconstitution of an Escherichia coli RNA-guided immune system reveals unidirectional, ATP-dependent degradation of DNA target. J. Biol. Chem. 288, 22184-22192 (2013).
[0986] 33. M. L. Hochstrasser, D. W. Taylor, P. Bhat, C. K. Guegler, S. H. Sternberg, E. Nogales, J. A. Doudna, CasA mediates Cas3-catalyzed target degradation during CRISPR RNA-guided interference. Proc. Natl. Acad. Sci. U.S.A 111, 6618-6623 (2014).
[0987] 34 B. Zetsche, J. S. Gootenberg, O. O. Abudayyeh, I. M. Slaymaker, K. S. Makarova, P. Essletzbichler, S. E. Volz, J. Joung, J. van der Oost, A. Regev, E. V. Koonin, F. Zhang, Cpf1 is a single RNA-guided endonuclease of a class 2 CRISPR-Cas system. Cell. 163, 759-771 (2015).
[0988] 35. R. E. Haurwitz, M. Jinek, B. Wiedenheft, K. Zhou, J. A. Doudna, Sequence0-and structure-specific RNA processing by a CRISPR endonuclease. Science. 329, 1355-1358 (2010).
[0989] 36. J. L. Schmid-Burgk, L. Gao, D. Li, Z. Gardner, J. Strecker, B. Lash, F. Zhang, Highly Parallel Profiling of Cas9 Variant Specificity. Mol. Cell. 78, 794-800.e8 (2020).
[0990] 37. Z. Dominski, A. J. Carpousis, B. Clouet-d′Orval, Emergence of the β-CASP ribonucleases: highly conserved and ubiquitous metallo-enzymes involved in messenger RNA maturation and degradation. Biochim. Biophys. Acta. 1829, 532-551 (2013).
[0991] 38. C. R. Mandel, S. Kaneko, H. Zhang, D. Gebauer, V. Vethantham, J. L. Manley, L. Tong, Polyadenylation factor CPSF-73 is the pre-mRNA 3′-end-processing endonuclease. Nature. 444, 953-956 (2006).
[0992] 39. D. K. Phung, C. Etienne, M. Batista, P. Langendijk-Genevaux, Y. Moalic, S. Laurent, S. Liuu, V. Morales, M. Jebbar, G. Fichant, M. Bouvier, D. Flament, B. Clouet-d′Orval, RNA processing machineries in Archaea: the 5′-3′ exoribonuclease aRNase J of the β-CASP family is engaged specifically with the helicase ASH-Ski2 and the 3′-5′ exoribonucleolytic RNA exosome machinery. Nucleic Acids Res. 48, 3832-3847 (2020).
[0993] 40. M. R. Lieber, The mechanism of double-strand DNA break repair by the nonhomologous DNA end-joining pathway. Annu. Rev. Biochem. 79, 181-211 (2010).
[0994] 41. I. Callebaut, D. Moshous, J.-P. Mornon, J.-P. de Villartay, Metallo-beta-lactamase fold within nucleic acids processing enzymes: the beta-CASP family. Nucleic Acids Res. 30, 3592-3601 (2002).
[0995] 42. D. Moshous, I. Callebaut, R. de Chasseval, B. Corneo, M. Cavazzana-Calvo, F. Le Deist, I. Tezcan, O. Sanal, Y. Bertrand, N. Philippe, A. Fischer, J. P. de Villartay, Artemis, a novel DNA double-strand break repair/V (D) J recombination protein, is mutated in human severe combined immune deficiency. Cell. 105, 177-186 (2001).
[0996] 43. J. Jumper, R. Evans, A. Pritzel, T. Green, M. Figurnov, O. Ronneberger, K. Tunyasuvunakool, R. Bates, A. Žídek, A. Potapenko, A. Bridgland, C. Meyer, S. A. A. Kohl, A. J. Ballard, A. Cowie, B. Romera-Paredes, S. Nikolov, R. Jain, J. Adler, T. Back, S. Petersen, D. Reiman, E. Clancy, M. Zielinski, M. Steinegger, M. Pacholska, T. Berghammer, S. Bodenstein, D. Silver, O. Vinyals, A. W. Senior, K. Kavukcuoglu, P. Kohli, D. Hassabis, Highly accurate protein structure prediction with AlphaFold. Nature. 596, 583-589 (2021).
[0997] 44. L. You, J. Ma, J. Wang, D. Artamonova, M. Wang, L. Liu, H. Xiang, K. Severinov, X. Zhang, Y. Wang, Structure Studies of the CRISPR-Csm Complex Reveal Mechanism of Co-transcriptional Interference. _{Cell}. 176, 239-253.e16 (2019).
[0998] 45. A. Özcan, R. Krajeski, E. Ioannidi, B. Lee, A. Gardner, K. S. Makarova, E. V. Koonin, O. O. Abudayyeh, J. S. Gootenberg, Programmable RNA targeting with the single-protein CRISPR effector Cas7-11. Nature. 597, 720-725 (2021).
[0999] 46. S. P. B. van Beljouw, A. C. Haagsma, A. Rodríguez-Molina, D. F. van den Berg, J. N. A. Vink, S. J. J. Brouns, The gRAMP CRISPR-Cas effector is an RNA endonuclease complexed with a caspase-like peptidase. Science. 373, 1349-1353 (2021).
[1000] 47. J. E. Peters, K. S. Makarova, S. Shmakov, E. V. Koonin, Recruitment of CRISPR-Cas systems by Tn7-like transposons. Proc. Natl. Acad. Sci. U.S.A 114, E7358-E7366 (2017).
[1001] 48. J. Strecker, F. E. Demircioglu, D. Li, G. Faure, M. E. Wilkinson, J. S. Gootenberg, O. O. Abudayyeh, H. Nishimasu, R. K. Macrae, F. Zhang, RNA-activated protein cleavage with a CRISPR-associated endopeptidase. Science. 378, 874-881 (2022).
[1002] 49. K. Kato, S. Okazaki, C. Schmitt-Ulms, K. Jiang, W. Zhou, J. Ishikawa, Y. Isayama, S. Adachi, T. Nishizawa, K. S. Makarova, E. V. Koonin, O. O. Abudayyeh, J. S. Gootenberg, H. Nishimasu, RNA-triggered protein cleavage and cell growth arrest by the type III-E CRISPR nuclease-protease. Science. 378, 882-889 (2022).
[1003] 50. R. M. Harshey, Transposable Phage Mu. Microbiol Spectr. 2 (2014), doi: 10.1128/microbiolspec.MDNA3-0007-2014.
[1004] 51. M. Saito, A. Ladha, J. Strecker, G. Faure, E. Neumann, H. Altae-Tran, R. K. Macrae, F. Zhang, Dual modes of CRISPR-associated transposon homing. Cell. 184, 2441-2453.e18 (2021).
[1005] 52. W. Y. Wu, P. Mohanraju, C. Liao, B. Adiego-Pérez, S. C. A. Creutzburg, K. S. Makarova, K. Keessen, T. A. Lindeboom, T. S. Khan, S. Prinsen, R. Joosten, W. X. Yan, A. Migur, C. Laffeber, D. A. Scott, J. H. G. Lebbink, E. V. Koonin, C. L. Beisel, J. van der Oost, The miniature CRISPR-Cas12m effector binds DNA to block transcription. Mol. Cell. 82, 4487-4502.e7 (2022).
[1006] 53. G. Kaur, A. M. Burroughs, L. M. Iyer, L. Aravind, Highly regulated, diversifying NTP-dependent biological conflict systems with implications for the emergence of multicellularity. Elife. 9 (2020), doi: 10.7554/eLife.52696.
[1007] 54. A. Maikova, J. Peltier, P. Boudry, E. Hajnsdorf, N. Kint, M. Monot, I. Poquet, I. Martin-Verstraete, B. Dupuy, O. Soutourina, Discovery of new type I toxin-antitoxin systems adjacent to CRISPR arrays in Clostridium difficile. Nucleic Acids Res. 46, 4733-4751 (2018).
[1008] 55 H. Altae-Tran, L. Gao, J. Strecker, R. K. Macrae, F. Zhang, Computational Identification of Repeat-Containing Proteins and Systems. ORB Discovery. 1 (2020),, doi: 10.1017/qrd.2020.14.
[1009] 56. P. Mohanraju, C. Saha, P. van Baarlen, R. Louwen, R. H. J. Staals, J. van der Oost, Alternative functions of CRISPR-Cas systems in the evolutionary arms race. Nat. Rev. Microbiol. 20, 351-364 (2022).
[1010] 57. M. Kazlauskiene, G. Kostiuk, Č. Venclovas, G. Tamulaitis, V. Siksnys, A cyclic oligonucleotide signaling pathway in type III CRISPR-Cas systems. Science. 357, 605-609 (2017).
[1011] 58. O. Niewoehner, C. Garcia-Doval, J. T. Rostøl, C. Berk, F. Schwede, L. Bigler, J. Hall, L. A. Marraffini, M. Jinek, Type III CRISPR-Cas systems produce cyclic oligoadenylate second messengers. Nature. 548, 543-548 (2017).
[1012] 59 J. T. Rostøl, W. Xie, V. Kuryavyi, P. Maguin, K. Kao, R. Froom, D. J. Patel, L. A. Marraffini, The Card1 nuclease provides defence during type III CRISPR immunity. Nature. 590, 624-629 (2021).
[1013] 60. C. Rouillon, N. Schneberger, H. Chi, K. Blumenstock, S. Da Vela, K. Ackermann, J. Moecking, M. F. Peter, W. Boenigk, R. Seifert, B. E. Bode, J. L. Schmid-Burgk, D. Svergun, M. Geyer, M. F. White, G. Hagelueken, Antiviral signalling by a cyclic nucleotide activated CRISPR protease. Nature. 614, 168-174 (2023).
[1014] 61. S. L. Shipman, J. Nivala, J. D. Macklis, G. M. Church, Molecular recordings by directed CRISPR spacer acquisition. Science. 353, aaf1175 (2016).
[1015] 62 F. Schmidt, M. Y. Cherepkova, R. J. Platt, Transcriptional recording by CRISPR spacer acquisition from RNA. Nature. 562, 380-385 (2018).
[1016] 63. D. Hyatt, G.-L. Chen, P. F. Locascio, M. L. Land, F. W. Larimer, L. J. Hauser, Prodigal: prokaryotic gene recognition and translation initiation site identification. BMC Bioinformatics. 11, 119 (2010).
[1017] 64. A. B. Crawley, J. R. Henriksen, R. Barrangou, CRISPRdisco: An Automated Pipeline for the Discovery and Analysis of CRISPR-Cas Systems. CRISPR J. 1, 171-181 (2018).
[1018] 65 F. W. Studier, Protein production by auto-induction in high density shaking cultures. Protein Expr. Purif. 41, 207-234 (2005).
[1019] 66. M. Martin, Cutadapt removes adapter sequences from high-throughput sequencing reads. EMBnet.journal. 17 (2011), p. 10.
[1020] 67. K. Clement, H. Rees, M. C. Canver, J. M. Gehrke, R. Farouni, J. Y. Hsu, M. A. Cole, D. R. Liu, J. K. Joung, D. E. Bauer, L. Pinello, CRISPResso2 provides accurate and rapid genome editing sequence analysis. Nat. Biotechnol. 37, 224-226 (2019).
[1021] 68. Piotr Indyk Department of Computer Science, Stanford University, Stanford, CA, Rajeev Motwani Department of Computer Science, Stanford University, Stanford, CA, Approximate nearest neighbors, doi: 10.1145/276698.276876.
[1022] 69. V. A. Traag, L. Waltman, N. J. van Eck, From Louvain to Leiden: guaranteeing well-connected communities. Sci. Rep. 9, 5233 (2019).

### Example 2—Exemplary Small Type II Polypeptides

[1023] An exemplary small Type II-C Cas9 (Cas9-t) polypeptide is shown in FIG. 11. The exemplary Cas9-t has an NGCH PAM (FIG. 12). The purification pulldown shows more distinct associated small RNAs (FIG. 13). The purified Cas9-t was able to cleave DNA in vitro at 37° C. with a single guide RNA (FIG. 14). FIG. 15 shows the structure of the crRNA and tracrRNA in the form of a complex. Some exemplary small Type II-B Cas9 polypeptides are shown in FIG. 16.

### Example 3—Exemplary Methods of Identifying and Characterizing Small Type II Polypeptides

[1024] FIG. 17 shows an exemplary method of identifying and characterizing Cas polypeptides. Applicants tested the interference activity showed that an exemplary Cas9-t had interference activity with NGCH PAM (FIG. 18). Pulldown of the Cas9-t polypeptide bound to ncRNAs revealed processed CRISPR and tracrRNA (FIG. 19). The Cas9-t cleaved dsDNA in vitro using an sgRNA (FIG. 20).

### Example 4—Exemplary Type II-D Cas Polypeptides

[1025] Exemplary loci for Type II-D Cas polypeptides and systems and components thereof are shown in FIG. 21. Relevant polypeptide sequences are shown in SEQ ID NO.: 8899-9520. Exemplary Type II-D Small Cas proteins can be demonstrated in this Example. Such exemplary Cas proteins are referred to in this Example “Small Cas9” and “IntCas9 (s)”. In other words, both the “Small Cas9” and “IntCas9” polypeptides and encoding polynucleotides of this Example can be demonstrative of the Type II-D small Cas polypeptides of the present invention described and provided elsewhere herein. The Small Cas9 and IntCas9 (s) demonstrated in this Example are about 950 amino acids or less in size. The exemplary IntCas9s have sizes from 650-776 amino acids. The exemplary Small Cas9s are about 950 amino acids or less.

[1026] The loci for the IntCas9s (about 650-700 amino acids) have a strong CRISPR association and tracrRNA association. The DR length is variable and was between about 29 base pairs and 36 base pairs. IntCas9s were not associated with Cas1, Cas2, Cas4, or Csn2.

[1027] Various modifications and variations of the described methods, pharmaceutical compositions, and kits of the invention will be apparent to those skilled in the art without departing from the scope and spirit of the invention. Although the invention has been described in connection with specific embodiments, it will be understood that it is capable of further modifications and that the invention as claimed should not be unduly limited to such specific embodiments. Indeed, various modifications of the described modes for carrying out the invention that are obvious to those skilled in the art are intended to be within the scope of the invention. This application is intended to cover any variations, uses, or adaptations of the invention following, in general, the principles of the invention and including such departures from the present disclosure come within known customary practice within the art to which the invention pertains and may be applied to the essential features herein before set forth.

The application's sequence listing, which the Patent Office published only in electronic form, follows.

SEQUENCE LISTING (9602 sequences)

SEQ ID NO: 1 - protein, 643 aa, synthetic construct
  REGION 1..643: note = Synthetic
MIWSHPQFEKGGGSGGGSGGSAWSHPQFEKSSGSMIKFIGGASKVTGSAFLLETGNAKILIDCGIEQEKGIEKDNNEIIEKKINEIGKADICILTHAHLDHSGLVPLLVKKRKVNKIISTPATKELCRLLFNDFQRIQEENNDIPLYSYDDIESSFEIWDEIDDRNTIELFDTKITFYNNSHIIGSVSVFIETHNGNYLFSGDIGSKLQQLMDYPPDMPDGNVDYLILESTYGNKSHDSSDRDRLLEIAKTTCENGGKVLIPSFAIGRLQEVLYTFSNYNFNFPVYIDSPMGSKVTNLIKEYNIYLKKKLRRLSITDDLFNNKYIAINTSNQSKELSNSKEPAVIISASGMLEGGRILNHLEQIKNDENSTLIFVGYQAQNTRGRKILDGEEKVRCRIEKLNSFSAHADQDELIDYIERLKYTPYKVFLVHGEKEQREILAKRIISKKIRVELPENYSQGKEILIEKKVVLNINTDNMCNFASYRLMPFSGFIVEKDDRIEINDKNWFDMIWNEEYNKMRSQIVAEDFSTDQNEDSMALPDMSHDKIIENIEYLFNIKILSKNRIKEFWEEFCKGQKAAIKYITQVHRKNPNTGRRNWNPPEGDFTDNEIEKLYETAYNTLLSLIKYDKNKVYNILINFNPKL

SEQ ID NO: 2 - protein, 643 aa, synthetic construct
  REGION 1..643: note = Synthetic
MTGLTFIGATREVTGSCHLLEVNDRRILLDCGMRQGRGVSKASEFPFKPDGINAVILSHAHIDHSGLLPLLVSQGFKGKIYSTVATRELVRILLYDSAKIQEEDYVAGGEPPLYSEDDVNETMRLFEVFPYHEEFDLLNVGTVKFYDAGHILGSAITVISTAKTVCYTGDLGHGMSPILRAPETPIEEVDYLIMESTYGNKLHSRDDPTLKIKEIVSEVYKNKGKLLIPVFAVGRAQEILYSLKEMKEAGEIPHDLKVYLDSPMADKSTSLYSNMADYLKPEFYTQFLNNTSPFEFEGFEIIKGHEDSLNLATSNGTAIILAASGMLEGGRVMNHLPKILSDKNSVICFVGYQVEGTHGRTLLDGVSEIKLKEKVVEVSCKIEAISSYSAHADKKGLFNFLNSLKFNPYKVFVVHGEEDANKAVVESLKNLKLRAVAPTRGDTESFGGTVIKIIKEKEFKIDFSPEYITLKKSHLRIAPFCGALVESKNGMIRLISNSVLIGLMEAEEQAFTNEFKEKKIELEDLQESNNIPSKTENLSENITSFISYDMYCKKLEKFYNSKDNFGDSILSKNLAHEIYCKAIREGKDSVIRLINQKKDKGKFNIDDEEIIEKFVELIKIAVINLTIREFCKGLEPYKIKKQC

SEQ ID NO: 3 - protein, 617 aa, synthetic construct
  REGION 1..617: note = Synthetic
VVKIRFLGACREVTGSMHLLDTGKTKILLDCGMRQGVDSVEREKHIPFDPSEIDYIILSHAHIDHSGLIPYLYLRGFRGRVVTTTATRAIAELLLLDSAKIMKEEYEKSNIPPLFDERDVVEVMSHFDAYPYNKPVRLQDVKLSFLDAGHILGSAVTLLRINGLQICYTGDIGSGTSPLMNPPTPPKEADVLIMESTYGNRRHEDRAKAVETMKAVISDTIKAGGKVLIPVFAVGRAQEVLYVLRNLRDKIRVKVYLDTPLGSRVTDIYKSYSNMLRKEFYELFLRGKNPIEFEGLEYVTTYNRSRELAKSNEPCIILSASGMLEGGRVLNHLPYILQDENSTVLFVGYQAEGTLGRQIVDGNKLVYVNGDEVDVRCNVVNVSAFSAHADEDGLVGFVEGMDYYPRRIYIVHGEEEAARNLLARLPKVRKSIPERGEEADLGWGGRAGMDGEREGRAIIDFKPGFVDFMGLSIHPEPLLLVREGEMLILRRYGEVVGELMSAGEELAVEIRAAVKSAEVEKISVEAGDIARLREFMEAGILSKKLSKEIVCTLLKEGRDEVIRMLNLKRDKDRFPVKDPEVVNDFVEYMVNLLKTRKEVEIVAAFEELIPKISGMCY

SEQ ID NO: 4 - protein, 630 aa, synthetic construct
  REGION 1..630: note = Synthetic
MKITFLGGVREVTGSHHLLEINGRRILLDCGLRQGKGLPKAPEFPFKAGDIDAVVLSHAHLDHSGLLPFLACSGFSGKIYSTSATRELARLLLLDAAKIMKEDYGKGLSDAPPLYDEEAVHRTIRMFETADYNQEIEISPEVSLKFLDAGHILGSAVSLLKIKGVGSLCYTGDIGHGRSPILNPPQVPEEDVTFLMIESTYGNRKHGRGGEKELENVITKTLSRGGKVLIPVFAVGRAQEILFCIKRLVEEGKVNAKVYVDTPMGESATDLYSSFSNYLREEFREHFLRGKSPFEFSGLEFVRGHKTSLDIAESEEPCIILAASGMLEGGRVLNHLPGILKDEKHSLVFVGYQAEGTLGREILEAANSTMRRVRINDSEVELRCSVVALSSFSAHADIDGLIGFASRLKYCPYRTFVVHGEHESSLNLANELIKLKHRARVPGIKEEFSLGFTRVVVEKTRDVELGFSPEFTCLGDAEVAVFSGGLVKTASGIKLLNKQRFLEFLDELLTKEEEMLKARVRVKSGLTDQKKEEESKKALISEREIIEKFRAFQEKGILTKRLMESIYCELLTSGDEAIRMLNEKRRKKRFNITDEKIIDEFCDFMVKLLDSVDEKVIIRCLKKFDIHPEC

SEQ ID NO: 5 - protein, 623 aa, synthetic construct
  REGION 1..623: note = Synthetic
MKLKFLGATQEVTGSCILLETKEHKYLFDCGMYQGPEKRDQSNLFFNPHEIDGIFLSHAHIDHSGLLPLLWKRGYNGPIYSTTATKELTRILLLDSAKIQAEEENETGIEALYNESDVKNIINNFEGIPYKRKTSLSDLEFSFCDAGHILGSAITYLNLNGITLTYTGDLGHGQSPILNPPTKIKASDYLIIESTYGNKTHSNLNIVDKFLSKEIKETMKNEGKLLIPVFAVGRSQEILYYLWKIKDQIKDIPIFFDTPMGTDVTELYSEFQDYLKPSFREYFLKNKSIFHLENLKFVKTQKESRSIASSSNSSIILAASGMLEGGRVMNHIESILSDTNSKILFSGYQPEGTLGRKVMEKKSKLLINDKEIELKCQICKLSGLSAHADKTGLLSFFKNFGIHPQKTFIVHGEKEASLNLFNMISHEHGKAIIPSKLHRESLSGIMVKKLEKNNIDLKFKPSFFKIGNKEIMPFVGAIIKNKEGMEVIDLNQYNQLMNKYKDQMELPLNTEIKDIIRPIDQDQVLIISPEEFAKNLKSLHSDIFSKRKIKDYIKILEKEGKDQLIRTFLVDLNKNRLGKSLYVANPSIFEIEIKKFKDFFIAGLNSIERYEIIKILEEYLESK

SEQ ID NO: 6 - protein, 595 aa, synthetic construct
  REGION 1..595: note = Synthetic
MRLKFLGGAREVTGSSFLLDFGYKILVDCGMRQKEEEKIFLKEEVDAVLLTHAHLDHSGLLPLLIKNNLLKGNVYSTPATKEVASLLLFDAAKIQREDEEKGKKALFDENDIVNLLKVWETYDLNKQFSLGNARVKFLDAGHIIGSSQILIEIEGIKILFTGDIGCGRSLLLNKPDVPKEHIDYLIIESTYGDREHPDKPPEEILYEEITSLGDYSRILIPAFAVGRAQEIIYGLKLKGLDIPVFLDSPLAEKVAETYDYFLPYLKPEIKNKWKKMGEMFSIPHLEYVRSNKRSKELAEDRKKKIVIAASGMLEGGRVMNHLPHILKDENAVLLFIGYQAEGTLGRKILEGERSVWIEDKEIEVKCSIKKIEGFSAHSDRRGLINFINNLPFYPSYIFIVHGEYETQKRFADELRIQKFYPYIPSKEEEIDLKGGAREKIIIDFEKKFQKYGMYEIMLFTGGILKDDNLIRVISKEDLFEIINEEEKRLKHKEKVEIPVDIEKEEIESITEEEFYRELKNMREEKILSKSKLQEFIENASPGIDNLFSWIRITKNKIRFYPDKEKNDMVAEILLRGINSLREIAVSIAEKVLEET

SEQ ID NO: 7 - protein, 652 aa, synthetic construct
  REGION 1..652: note = Synthetic
VSTCEAIPLPSLRFIGATKEVTGSCHLLEVDDRKVLLDFGMKQGEGADRAFEFREFHPGEIDAVLLSHAHIDHSGLLPYLVAQGFEGKIHSTVATKDLARLLLEDSAKIQKMDSEAGGEAPLYTAEDVVETVRRIEPAEYGKEFEIPGGSACFYDAGHILGSAVTVISAAGKTVCYTGDLGHSRSPILNAPQVPEEEIDYLIMESTYGNRSHSDERPEEKLSELAGSAYRGRGKLLVPVFAVGRAQELVLTIKNMKEHGTIPADMKVYLDSPMAREATELYADWANHLKPEFYSMFYRGESPFEFEGFELIKSHGSSEKLAEEEGPAIILAASGMLEGGRVLNHLPRVLKDRSSAICFVGYQAEGTLGRELVDGGSEVRVNEELVRVLCRVDSIGSYSAHAGRNGLLGFLDSLPVVPYKTFLVHGEPDAAKALAGEVHRRRLRVAVPDRGDREPFGGVVSRTVREKEFELGIKPSYTDIGGGVQVAPVVGALVTDPGGNVRLVSQAELHELMEKRKGELEGDIREMKAAPQRAAEGTAAGAGEAHERDRTASITLQGYREKLEHFATSRKDAMGDTILTRKLAHEIYCKARREGPDSVIKFINKKLEKKKFNVDDEEIMEEFSEFIKGAVGSLRVDEFCGELDEYRSLGGCE

SEQ ID NO: 8 - protein, 639 aa, synthetic construct
  REGION 1..639: note = Synthetic
MNRIKFVGAAGEVTGSCHLLELNGKKILLDCGFKQGEGADNSPQWPFRPQDIDAVVLSHAHIDHSGHLPTLVSQGFKGRIYATEATRELARVLLLDSAKIQEEDHENGRTAEPPLYGEEDVHETVRRIEPHPYEKSFELPGGATGKFYDAGHILGSAVVVLEAGKTICYTGDLGHGESPILGAPQVPREDVDYLIMESTYGGEHRGGTSEDAENRLAELVESACVESGGRLLIPVFAVGRAQEILYAIRKLKESGRVPEDIPVYLDSPMATRVTDLHSTMADYLRPEFYGKFVEGDSPFEFDGFEPVRSNRDSSRLAEERSPAVVLAASGMVEGGRVMNHISRVLKDDNSTICFVGFQVKGTLGRDIRDGNEEVVVGDTPVEVKCGVESLPFFSAHADTDGLMKFFDGLDPLPYKTFAVHGEPESCETVVSAVAEKKARCAAPSPDHEEAFGGVTEVVKEQGGFKMDLAPDFVRVGSRRFAPVVGVMVEDEDGTLRLTNESEVIPLWEDERRSSLLRFNESLPVGNGLRVPGDDSGGEDSADMAYEEFCDRLEELARRTDEYGDSIMTKALARDLCGEAVVGANAVIRMINSKEEKGKFNIEDPDTVAEFCETVRRAVMSLNQYEFREALSRYNERDCI

SEQ ID NO: 9 - protein, 640 aa, synthetic construct
  REGION 1..640: note = Synthetic
MSSPINIQFCGATGEVTGSMHLLTIDNKKILLDAGAFQGTEAKDKNSAPLIFDPAEIDYIFLTHAHYDHTGRLPMLCQRGFKGEIITTPVTREITFRIMDDSLRIQKEEGKELLFSEDDVKKAKSLFVPLNEDYPQWQDDEKKIKIKFIPSEHILGSSSIFIEEPVSLLYSGDVGGGSSSLHSIPKPPDTCDYLIIESTYGNRNLEKSNSEILSQLKAAVESIGKNNSRLLIPIFSIDRAEEILFMLRELNIKEKIYLDTPMGIDILDIYSHNKYLLSKISDEFIKKNSKELDKIFHPDNFERLRAKKNSDELAESSESCIILASSGMLEGGRIRKYLPQFLPDEKNILLFSGFQAEGTLGRDIINGYPEVNVDGIPVKVKAQIRKIEGLSAHADKTALLNYIDCFKTLPVKIFIVHGEMVASLELSDAIKEKFRIKTVLPKINEKYDLAAGEIRERTIIKGISIGNVRLNFENISGKKIALFAGGIIDNGNEYSLVSVREIEEMLHDLKKEMVKSLPEEIIISETHIRPETLSSATPPSPEELILGLIKIFKAGYVSKGLIRDLMDASERGISEYRKVIDKKIKNDALILDENDLRRKGIQIPDRSLISGQLEDLLKRSSLMEQLNLQLALHRMFTEIK

SEQ ID NO: 10 - protein, 623 aa, synthetic construct
  REGION 1..623: note = Synthetic
MKIQFLGAAKEVTGSCILIETRRSKFLLDCGQRQGQGAESSPEFQFNPREIDFVILSHAHIDHSGLLPKLVAEGFDGEIYSTVATRDVAELLLEDSAKIQKEAESGAGLIPMFTEEDVALTMDKFSVYEWDVPIDASDDVTVTFLDAGHILGASISVIDISGAGRLVYTGDIGHGHSPIMNPPAKLNNTDFLIIESTYGAKRHPAVNPKESLKQIILDTYANKGKVLIPVFAVGRAQEVLYILKQLYEESELPNIPVYFDTPLGAETTSLYQYHQNYLRAQFRSSFLKGENPFHFGTLDFIRGNNRSLDVASSEEPCVVIAASGMLTGGRILNHLKTTLEDPDSSLVFVGYQAEGTPGREILDGKKRVEIAGKEYEVKLKVHYIPGLSAHADADGLFSFVNSADILPKKIFVVHGEPENAEALQRRIINNLRIDTFVPEMGYTENFMDREVVKVVEKDVHLDFKPEFTKVGELEVYPFVGALLKKQDGIHLISKEQYIGILTETEEELETMLTKMTSKEGLEAETETETAEPVEEISETEFKETLLKYADVGIFSRSRARELKNMLENEGRDATIAHINKLARKDRLYPLDTTKQEELRRVLVAGINSFPQKARELFNEIVER

SEQ ID NO: 11 - protein, 200 aa, synthetic construct
  REGION 1..200: note = Synthetic
MAKTMKKIYVTMKTLSPLYTGEVRREDKEAAQKRVNFPVRKTATNKVLIPFKGALRSALEIMLKAKGENVCDTGESRARPCGRCVTCSLFGSMGRAGRASVDFLISNDTKEQIVRESTHLRIERQTKSASDTFKGEEVIEGATFTATITISNPQEKDLSLIQSALKFIEENGIGGWLNKGYGRVSFEVKSEDVATDRFLK

SEQ ID NO: 12 - protein, 207 aa, synthetic construct
  REGION 1..207: note = Synthetic
MSREYLYMEIEMNTESPFVSGEIKQVHQERGAAKPVRKTADGKVAAPIYGALRAYLEKTLRAKGDTVCDSGKKTCGHCVLCNLFGSLGKGGRAVIDDLISDKPASEIVKPVIHLRLNREDNTVADSLRQEEVQEAVVFKGRIIIDNPGDRDLTLIQTGIEAINEFGLGGWRTRGRGKVNMKITKVEKRNWATFEEKGKEIADKLLTP

SEQ ID NO: 13 - protein, 210 aa, synthetic construct
  REGION 1..210: note = Synthetic
LRVGGDGVNKYLVFDIKATTTLPAVTGEIKMDRKADIKLARITGDGRVAIPIYGALRGYLERILRENGENVCDTGMKDAKPCGRCVLCDLFGSLGKKGRAIIDDLVSERSYKEIVHPSVHLRISREDGVVSNTLKIEEIEEGAVFTGKIRVVDPKPRDKELIVAGLKAIEEFGIGGWVTRGRGRVKVDFSIQEREWTDFLKQARNILEKL

SEQ ID NO: 14 - protein, 214 aa, synthetic construct
  REGION 1..214: note = Synthetic
MTNDEFYVLDMEMKTISPVISGEIKTSERDFKRKKDINAPCRITGDNKVAVPIYGVVRGYLERILREKGENVCDTGAKGAKGCGRCILCDLFGNLGRRGRVFFDDLKSNEDFNKVVKVSFHSRISRDDASVSDSLTIEEIQEDALFEGKIRILNPKEKDIELLSASIEAINEFGLGGWIRRGRGRVDMKIKSVSKRKWSEFYERGKEVAAKIMV

SEQ ID NO: 15 - protein, 210 aa, synthetic construct
  REGION 1..210: note = Synthetic
VDEYLSIRVEATTLLPLVSGEIKSREVREGEHRIKPARITGDGKVAVPIYGALRAYLEKTLRENGEQVCDTGLPGKEGQGCGKCVLCDLFGYLGKRGRAIIDDLKSEKPYREVVARATHLKIDREKGAVNATLKMEEIVEGTKFVGYIRIIDPKPRDVELILTGLKAIEEFGLGGWLTRGRGRVKIGYAIEKKRWSDFVKKAREELKGIT

SEQ ID NO: 16 - protein, 215 aa, synthetic construct
  REGION 1..215: note = Synthetic
VIKLDDITRLKIKMTTISTLISGEIKTDYINKDKSVKLIRRTSNGKVAVPIYGVLRANAEKILKEKGGNVCDAGRPGTDATCGKCKVCSLFGAMSQRGRAIIDDLISKKDAKEIVHKSFHSKIDRDTRSVVSGGTLNVEEVEENADFYGDIVILNSKEEDLNILAASMEATNMTGLGGWVTRGRGKVKMEIETIESFKWTDFIKNAGEKLLKVLK

SEQ ID NO: 17 - protein, 210 aa, synthetic construct
  REGION 1..210: note = Synthetic
MDKFLVIEVYAKTISPLYTGEIKKEAIREARDVNLPVRRTEDGKVAIPIYGVIRAYLEKILTEKGENVCDTGAKGAKGCGRCVLCDLFGYLGRRGRAFIDDLVSKENAMKIVSSVTHNRIDRNSGTVSDALKMEEIKEGSEFYGKIRIIEPKERDIELFATAFEAMKEFGIGGWVTRGRGRVDIQFKVYERRWTEFINRAKETLKQIGIK

SEQ ID NO: 18 - protein, 215 aa, synthetic construct
  REGION 1..215: note = Synthetic
MEKEFGKYRLEMRAVSTVISGEIKEERRRKEKSGVHLPCRLTADGKVAVPIYGALRGYAEIALRATGEEVCDTGAKGSKGCGRCSLCDLYGSLGMRGRAIIDDLRSEENFDKVVNKVMHVKLDREKGVVSDSLEAEEIQEGTIFTGTIIVLNPRERDLELINIGIQGINTFGLGGWLTRGRGRVELKIVSAERISWASLVEEARKRVKELVKTKK

SEQ ID NO: 19 - protein, 215 aa, synthetic construct
  REGION 1..215: note = Synthetic
MLNEDLWILELKATAVSPLYTGENKIDSLKRRKQGNLLPTRMSGDGFASISIFGAIRGYAEKIYKDAGTCDTGKDTKGCGRCLTCDMFGNLGRKGRVSFEDLKSVRPFDKVVERTVHPHIDRETGTISSGKGASIELEEIVEGTELTGRIIIKNPTEKDIEVLNAALAAAEDNGIGGWTRRGKGRVKFEVTAKKVKWANYKEQGAAEAKKLVSMK

SEQ ID NO: 20 - protein, 207 aa, synthetic construct
  REGION 1..207: note = Synthetic
MGNKGEYFHIDVEMRTLSPLFTGEIKGTKAKGVKPVRKSSDGRVVVPIYGALRAGIERSLRASGEQVCDSGKKACGQCVVCSLFGSLSQGGRAVIDDIVSDEPASKIAHASNHVRLNRETNTVEDSLKQEEVEEGAVFRGRILVDRPDDRDIELLQTGVEAVNEFGLGGWRTRGRGKVEISLANVEKRRWEDFKEEGSKKARELLSS

SEQ ID NO: 21 - protein, 210 aa, synthetic construct
  REGION 1..210: note = Synthetic
MSEKKESERPYAVVDLEMETVSPLVTGEIKKVPNKGTKPVRKTAGGSVAVPIYGAIRAGLEKSLRDKGEKVCDSGKKTCGRCVLCGLFGSLGKGGRALIDDMVSERPASEIAHPSTHVRLNRDDGTVDDSLSQEEVEEGAKFTGRMIVDRANDRDIELIHSGIESINEFGLGGWKTRGRGRVNMRITGITWKRHRDFMDRGKEKARELLR

SEQ ID NO: 22 - protein, 215 aa, synthetic construct
  REGION 1..215: note = Synthetic
MQNEYMKYELEMKTLSTVISGEIKEEERRRKERAGVHLPCRITADGRVAVPIYGALRGYAEIALRANGEDVCDTGGKGTKGCGKCVLCDLYGSLGRRGRAMIDDLRSAENYDKVVKKVMHVKLDREKGNVSDALGAEEIQEGTAFTGNIVVLNPKERDTELINTGIEGINEFGLGGWLTRGRGRVSLKIASVEKKLWDTLVEEARKKTKELLEKK

SEQ ID NO: 23 - protein, 216 aa, synthetic construct
  REGION 1..216: note = Synthetic
MEKEYMRYGLEMKTLSTVISGEIKEEERRRKEREGVHLPCRITADNKVAVPIYGSLRGYAEIALRASGEDVCDTGGKGTKGCGKCVLCEIYGSLGRRGRALIDDLRSVENYDKVVKKVMHVKLDREEGKVSDALGAEEIQEGTVFTGNIVVLNPKERDTELLNIGIAGINEFGLGGWLTRGRGRVELKIASVEKRSWDTLVEEARKKAKELLEKKK

SEQ ID NO: 24 - protein, 215 aa, synthetic construct
  REGION 1..215: note = Synthetic
MLNEDLWILELKATAVSPLYTGENKLESQKRRKQGNMLPTRMSGDGFASISIFGAVRGYAEKIYKDAGTCDTGKDTKGCGRCLTCDMFGNLGRKGRVSFEDLKSVRPFDKVVERTVHPHIDRETGAISAGKGASIELEEIVEGTELTGKIVIKNPTEKDIEVINAALAAAEDNGIGGWTRRGKGRVKFEVTPKKVKWANYKELGAAEAKKLVNMK

SEQ ID NO: 25 - protein, 254 aa, synthetic construct
  REGION 1..254: note = Synthetic
MIGVDLCNLSRITIPSSLSNNLTFIRQKYKIKRYIGYGEMDNEYMRYGLEMKTLSTVISGEIKEEERRRKERAGVHLPCRITADGRVAVPIYGALRGYAEIALRASGEDVCDTGGKGTKGCGKCVLCDLYGSLGRRGRAIIDDMRSVENYDKVVKKVTHIKLNREEGNVSDALGAEEIQEGTVFTGNIVVLNPKERDTELINTGIEGINEFGLGGWLTRGRGRVELKIASVERRSWDTLVKEAREKAKELLGRE

SEQ ID NO: 26 - protein, 240 aa, synthetic construct
  REGION 1..240: note = Synthetic
MKEIKGILESITGFSIPLDNGEYALYPAGRHLRGAIGYIAFNLDLPISSKFLDFDFDDIIFRDLLPISKCGKIFYPEKNSNSLKCPSCNEIYGSSVLRNIMARGLSYKEVIEGKKYRLSIIVKDEKYLNEMEAIIRYILSYGIYLGNKVSKGYGKFKIKEYSIVDILPVKDSEVLLLSDAIIDNGEKDIVFSKKEISSSKFEIIRKRGKAKGDIIRDNNHNGFYIGKYGGLGFGEIISLK

SEQ ID NO: 27 - protein, 233 aa, synthetic construct
  REGION 1..233: note = Synthetic
MNEMRVEISFGTIEKPPIHSIQSFIYQCLHEEDKEYATFIHKEGIKHKWKSIKPFIFSHPYIKKDNKCYIKVSSLDSFFNYNFFSGLNKIMFKKNNAIIKPESIRIINIPKIKYDSNGNTQQNMFFISPLLVKSNSGYIKDPDDEKFLQILKKNLIDKYLAINKKECTNDTFSIFLKDKTPKLKIYKKEELPVFLSKFVLISSKELFNIAYYLGLGCKNALGFGMIEFDREDL

SEQ ID NO: 28 - protein, 316 aa, synthetic construct
  REGION 1..316: note = Synthetic
VKDIKLFPIAYYGFSFIVIDRVYFTKNICASLRGIIFSNLKGLFCEKKGKDCGECDYSSKCPVSGFFEITRDTKRYRDYPRPVVLRVDEPLNVYEASSDFEFSLGLLSKKSIDDFPYIFSAIKHIENTGIGSEEEKKRGKVKLISAYFLNPLNNEKKILYFYKENIFNERKLYIKKKEIIERAKEISKGKRIKIEFLTPLAITYEKKIMKDFSFPLFIERLYERINKISELSLKKPLDINVPPLDSIKILYKNFTYYNSFRYSTRKGSYIPLNGIIGEAVISGRIDKIAVPLVIGELIHVGKHTTSGFGRYKLSVL

SEQ ID NO: 29 - protein, 335 aa, synthetic construct
  REGION 1..335: note = Synthetic
MSEQSYIALIAEGTLKNITEIILGTGEKDKYNALMSKAYPEGQNIRGAFGYTFLEADAGISQTYMENTPAVLYFRDARPRHFRDKGKLMPVMKENKFVNYRCTSCGDNIESPTYMNKIVSIKLDRKTNSVASGAFVKHEAILGRSIFDFRVALNLKRGKEYASEFIAAVEKFSNEYIRLGKRRNKGKGLFTLEDVKYSTVTLNDIKKRAEALKKKDKLIMYFFSDIVVDRKITVEMILRSIKNCAKFMHPEYESYNDPSLKIFSNTLPIKKIVFLDRKEGISQKVIYENIIPKGGVVKLQVKDASTMFWEALALTEAFMGIGKRTSFGKGEFKIF

SEQ ID NO: 30 - protein, 325 aa, synthetic construct
  REGION 1..325: note = Synthetic
VAEGVITNITEYHLGTGFKKHGLSTTHPYPQGQHIRGSVGYELLHVNAGLSKSFLDENAALIYFKDAIPLHADGGLLLPFVAEKFQNFKCSTCGQVLKHPTRKGTIIQTRVDRKTGKTSAFRLEAVTRGYSYRFKAVLNMRRGEDYAEEFVAVMELIEENGLKLGRRSGKGKGHFRIDRLNYRMIRLEDIRRRARELERELERKDRLTLHFISDFIGELTGETILTGVKNAGRHFHPDYESYEDPFVGVKKECLPPRTVLSLHRKVTPNGGKNRIMKDMAIPAGAKVQVEFAEKPPEIFYECLAIAELRGIGAKTSFGKGEFVVV

SEQ ID NO: 31 - protein, 354 aa, synthetic construct
  REGION 1..354: note = Synthetic
MTEKIATIVNGNFTNITETVLGAGFRNERLKVEVSHDYPLGQMLRGAFGYLFMDMNLKIADTYEADNHSVIYFRDAIPHHFKDDGIIVPFIADKRFINYKCEKCGEVLKYASYKTVINKTRINRNIGGVSQMFREEGIVRKNKFRFKNVLNLKETLNKNPEYLVDYMSAIEYVKEFGINLGRGHLKGMGKMVFDDIKYHTITLKDIKKRSEELANKKVLTLRLMSDTIVNHNGTSVGKVDEKILIGSVKTAMKFFHPEWGITGENKLIRNEDSGFINLVNYDTILNRKMSFMDCKITKRQRRISTEDIIPRGSMFKYEISENMPDGFYEGLAILEMCYGIGKRIEFGKGEILIE

SEQ ID NO: 32 - protein, 334 aa, synthetic construct
  REGION 1..334: note = Synthetic
MREKEVALEVRGVMENVTEVHLGKGISRNKIPLSYSYPQGQNLRGFFGYEFLRANSKVSKTFLAGNPNYLYFKDARPLHGDGGELLPVIVDGRFINYRCSSCGAVLRYPARKGIFTSVKLDRATGRVTAFIRREGIVGRNKFLFRVYLNLKRAPEFAEDLLGAVLKAREEGIRLGARKGRGKGLFTLSDFQIGVITLEDIRRRADELESQEVHTFHFLSDVVAPEGLPETIVRSIKNAGKFLHPEYVSYSDPYFKVVSKKVLPPRTVVFLDRKEDRDGYGKNRLSKVSVIPRGAEITLKFSSAPRMFYECMAVAEKIMGAGKRTGFGKGEFRVL

SEQ ID NO: 33 - protein, 329 aa, synthetic construct
  REGION 1..329: note = Synthetic
MIAVELTAKFRNKDLLHFGTGYKDQRARAKNTWPYPPGQVLRGRFGYLLMNMQSDIVDSFKDGIPLLYFKDALVYHKKCGGLLYPTIEKQRFLNYKCNNCNEILRYATRISTVNKTRMSRQTYKVNQLYRLQMISNYNKFRLKIIIKLKNNEKRFEDPIAIMEFARNFGLNFGGRCHKGIGKLFIEDYQLDVISDEMINQRAEELCIKKKFKIHLLSQYIPKQNNNTNFLTVKDFLTSIKNAGKFFLYDYTNYPDPKLKLIDSQTRKPIKINFFDTNRFISHHALPEGSQFDFEIENAPFIFWKSLAVAEKCSGIGARTSFGKGEFIIT

SEQ ID NO: 34 - protein, 321 aa, synthetic construct
  REGION 1..321: note = Synthetic
MRYLLIEGIIRNKEIFSIYEPYPVGRHIRGAFGWIAKDMGLGIKELFPDLNNDILIFRDGIPICRKERWRPFSGKKTLYLPFIDGGRIKYRCSSCGDFFSQGFHRTEISRIQLDRKKGSVNSFRRIEAFHREAIFRLSIILDIERGERFVEDLFSMMSFVKEFGINIGKRHQKGMGHFILEEFDAKIMEDIEIGEKDEFTINFISDAYIRNGDGFLDLKIKTDKIIGMMERLGNRFKIDFRGEIEEISKTLIEPRNITMIQVIEDENRFIRIPLNVLSRGISIRFKRRGNSRNILKLLKAIELFYGLGDYIGLGLGEIYVN

SEQ ID NO: 35 - protein, 335 aa, synthetic construct
  REGION 1..335: note = Synthetic
MSTDNIAVEVTGDLVNLNETILSTGELDSRTHMMTSHNYPPGQVLRGAFGHLFFVANLPIIKTYEINAEPVLYFKDALPLHWRDGGILFPTIVDGKFVNYQCQVCKEILRYASFKSMITRTRLDRHKGTVSMMWRQEGITQRTQFRFRVIVKLKTDIEDNLSALFAVLSFVEDNGLSLGKRSMKGSGKFRLDNLAYNLVTREDIDRRAKELREKEVMKIRLLSDAIVRKQGTNLTIIKGDDFLWSVKNAAKNFNYDYKPFSAEVKLIDTQTTKPYPIGFLDIKGQYEIAIPKGSTFTYRIAPGASEDFYIALALLERCHGIGNRSSSGKGEIIIE

SEQ ID NO: 36 - protein, 269 aa, synthetic construct
  REGION 1..269: note = Synthetic
MGKLQRTRGSGSQEAGEHEMKPLAFKIQGELENQSELHIATNNTYTERGSQIKESDMYPLGQNLRGAFGYLFLEMKSKIADTLKNGHPVIYFKDALIKHHDGTFIPVVKLDKGIRQVVYECSECLHIDKYPAIRQPMAGISLGSGGTVKNMYMTDVVSGKNRFRFEAIFNMKAKNVEEETLNEEYLAEFICALKYVEDNGLYLGRRNSKGLGKVLLKKLKILPITMDDIKKRAKIISQIVRDEDGKMWIHLFSDTISSFPLSGEDIVRD

SEQ ID NO: 37 - protein, 341 aa, synthetic construct
  REGION 1..341: note = Synthetic
MSSNDKVALVVEGKLQNRTEVILGTAMRGKDKVYMSKKYPEGQHLRGAFGYAFLYGGAEVIESYREDRPKSHPAIYFRDARPVHFEDGGDLVPVVVKRRFVNYRCSRCGKVLRFPTFMQPVTSIKLDRRTNTVARGAGFVKNQAITRKSNFSFRAALNLKRGEEYAPELIAAVEKFASEGMRLGKRRSKGKGLFELKDLGYSTVDLGEIRERAGELREREELVLRLMSDTVVDGEGAITESMLLRSIKKAAKFWHPEYEPYSDPFVKMSVDALPPQSTVFLDRKEGVGAKTLKAKVVPRGATVRLQPRDAPGMFYEALAIAEAFMGIGKRISSGKGEFAVV

SEQ ID NO: 38 - protein, 338 aa, synthetic construct
  REGION 1..338: note = Synthetic
MAGEADVALVASADLVNLSEVVLGTGTKSKKGLPMSRGYPEGQHLRGAAGYTFLDAGAGILKTYEDGVPAATYWRDARPLHRDGGVLVPVNVKGRFVNYRCVKCGRVERFPTEMSPITSVKLSRTGNTVNNMFGYFGITGQHRFLFRAALPLKRGREYAHEFAGVLTKWSEEGLRLGRRKSKGKGLFSLTDLTFDTLTLDDIRDRAAHLDSVADNGGELKLSFFSDIVVGEDGALTEKMILRSIKNAAKFQHPMYEPYEDPTVSTRIHALPARREVYLDTKGKKRRVDKPLVVPRGAEVRMRVRGAPDMFWEALALAESCMGIGKRTSSGKGEFHCLV

SEQ ID NO: 39 - protein, 338 aa, synthetic construct
  REGION 1..338: note = Synthetic
MSGESTAVEVMGELVTQNEAILSTGEFDRRAHAMRSYGYPPGQAIRGAFGYLFLAAGLPIIKTYEVNAEPVLYFKDALPYHYRDGGILYPVITPEKYVNYQCQECKEVLRYPSFKSVITKTRLDRHKGTVSMMWRQEGITKRARFRFKIIVKLKRDAEENLAALMTVLKFVEENGLALGKRSMKGSGKLRLENLSYKLVTAGDIEDRAAELREKDIIRVRLLSEAIAREKGANLTLIRGNNFLWSVKNAAKNFWYDYKNFSAEVKLINYETTRPYPVGFLDLKLAGGRPEIAIPKGSTFTYKIARDAPAEFYTALALLERCHGIGNRASSGKGEIIVE

SEQ ID NO: 40 - protein, 338 aa, synthetic construct
  REGION 1..338: note = Synthetic
MSSDNIAVEVTGELANQNEATLSTGEFDRRAHAARSYDYPPGQAIRGAFGYLFLAAGLPIIKTYEVNAEPVLYFRDALPYHYRDGGILYPVITPEKYVNYQCQKCKEVLRYPTFKSVVTKTRLDRYKGVVSMMWRQEGITRRENFRFLVIVKLKRDAEDNLSALIAALRFVEENGLAIGKRSMKGSGKLLLKNLSYELITRRDIEGRAAELREKEVIKVRLLSEAIVREKGTNLTTIPGKNFLWSVKNAAKNFNYNYQNFAVDVKLINYETTRPSSVGFLDLKLSGGGLEIAIPKGSTFTYKIERGAPSEFYTALALLERCHGVGNRVSSGKGEIIIE

SEQ ID NO: 41 - protein, 348 aa, synthetic construct
  REGION 1..348: note = Synthetic
MKPLAFKIQGELENQSELHIATNNTYNERGSRIKASDIYPLGQNLRGAFGYLFLEMKSKIADTLENGHPVIYFRDALIKHHDGIFIPVVKLDKGIRQVVYECCECLHIDKYPALRQPMAGISLGIGGTVRNMYTTDVISSKNRFRFEAIFNMKAKSAQEEKLNEEYLAEFISALKYVEDNGLYIGKRNSKGLGKVILKKLTIVPITMEDIKKRAKIISQIVRDEDGKMWIHLFSDTLSSFPLSGEDIVRDTKNAAKFFDPDFTQYKDPKITHIEKPVELLVNLSFLDLKVKTGKPRFEAPKSVISRGTRFRYQVTDAVPEFFNAFAMAELLRGLGDRTSFGKGEFVVS

SEQ ID NO: 42 - protein, 338 aa, synthetic construct
  REGION 1..338: note = Synthetic
MSNENIAVEVTGKLVTQNEVTLSTGEFDRRAHAMRSYGYPPGQTIRGAFGYLFLAAGLPIIKTYEVNAEPVLYFKDALPYHYRDGGILYPVITPEKYVNYQCQECKEVLRYPSFKSVITKTRLDRHKGTVSMMWRHEGITKRAQFRFKVIVKLKRDGEENLAALMAVLKFVEENGLAIGKRSMKGSGRLRLENLSYKPITRDDIEDRAAELRDKEVIKVRLLSEAIVREKGTNLTIIRGKNFLWSVKNAAKNFYYDYKNFSAEVKLIDYVTTRPYPVGFLDLELAGGRPEIAIPKGSTFTYRVERGAPAEFYTALALLERCHGIGNRASSGKGEIIVE

SEQ ID NO: 43 - protein, 249 aa, synthetic construct
  REGION 1..249: note = Synthetic
MAYILKPDEKTAKLFSDKTRLKILELLSEKELTNSQLAGMLNLSKPTISHHLKLLLDGGIVKISRIEHEEHGIAMKFYAVNPNILSVEALKDNKLTEQISKEIQEAMDARSGLSGGHANSAFLRMLKSTILNTGIDMDKPFYDAGYKIGVNVISKQVKANTLKDVLKELAVLWEKLKLGTVELVSENKIKVADCYQCGNMPNMGKTLCPSDAGIIAGVLNTVCQKRYSVKETKCWGTGYDFCEFEIKEL

SEQ ID NO: 44 - protein, 7 aa, unidentified
  source 1..7: note = Simian virus 40
PKKKRKV

SEQ ID NO: 45 - protein, 10 aa, unidentified
  source 1..10: note = Simian virus 40
PKKKRKVEAS

SEQ ID NO: 46 - protein, 16 aa, synthetic construct
  REGION 1..16: note = Synthetic
KRPAATKKAGQAKKKK

SEQ ID NO: 47 - protein, 9 aa, Homo sapiens
PAAKRVKLD

SEQ ID NO: 48 - protein, 11 aa, Homo sapiens
RQRRNELKRSP

SEQ ID NO: 49 - protein, 38 aa, Homo sapiens
NQSSNFGPMKGGNFGGRSSGPYGGGGQYFAKPRNQGGY

SEQ ID NO: 50 - protein, 42 aa, Homo sapiens
RMRIZFKNKGKDTAELRRRRVEVSVELRKAKKDEQILKRRNV

SEQ ID NO: 51 - protein, 8 aa, Homo sapiens
VSRKRPRP

SEQ ID NO: 52 - protein, 8 aa, Homo sapiens
PPKKARED

SEQ ID NO: 53 - protein, 8 aa, Homo sapiens
PQPKKKPL

SEQ ID NO: 54 - protein, 12 aa, Mus sp.
SALIKKKKKMAP

SEQ ID NO: 55 - protein, 5 aa, unidentified
  source 1..5: note = Influenza virus
DRLRR

SEQ ID NO: 56 - protein, 7 aa, unidentified
  source 1..7: note = Influenza virus
PKQKKRK

SEQ ID NO: 57 - protein, 10 aa, unidentified
  source 1..10: note = Hepatitis D virus
RKLKKKIKKL

SEQ ID NO: 58 - protein, 10 aa, Mus sp.
REKKKFLKRR

SEQ ID NO: 59 - protein, 20 aa, Homo sapiens
KRKGDEVDGVDEVAKKKSKK

SEQ ID NO: 60 - protein, 17 aa, Homo sapiens
RKCLQAGMNLEARKTKK

SEQ ID NO: 61 - protein, 4 aa, synthetic construct
  REGION 1..4: note = Synthetic
GGGS

SEQ ID NO: 62 - protein, 5 aa, synthetic construct
  REGION 1..5: note = Synthetic
GGGGS

SEQ ID NO: 63 - protein, 9 aa, synthetic construct
  REGION 1..9: note = Synthetic
GGSGGSGGS

SEQ ID NO: 64 - protein, 15 aa, synthetic construct
  REGION 1..15: note = Synthetic
GGGGSGGGGSGGGGS

SEQ ID NO: 65 - protein, 10 aa, synthetic construct
  REGION 1..10: note = Synthetic
GGGGSGGGGS

SEQ ID NO: 66 - protein, 20 aa, synthetic construct
  REGION 1..20: note = Synthetic
GGGGSGGGGSGGGGSGGGGS

SEQ ID NO: 67 - protein, 25 aa, synthetic construct
  REGION 1..25: note = Synthetic
GGGGSGGGGSGGGGSGGGGSGGGGS

SEQ ID NO: 68 - protein, 30 aa, synthetic construct
  REGION 1..30: note = Synthetic
GGGGSGGGGSGGGGSGGGGSGGGGSGGGGS

SEQ ID NO: 69 - protein, 35 aa, synthetic construct
  REGION 1..35: note = Synthetic
GGGGSGGGGSGGGGSGGGGSGGGGSGGGGSGGGGS

SEQ ID NO: 70 - protein, 40 aa, synthetic construct
  REGION 1..40: note = Synthetic
GGGGSGGGGSGGGGSGGGGSGGGGSGGGGSGGGGSGGGGS

SEQ ID NO: 71 - protein, 45 aa, synthetic construct
  REGION 1..45: note = Synthetic
GGGGSGGGGSGGGGSGGGGSGGGGSGGGGSGGGGSGGGGSGGGGS

SEQ ID NO: 72 - protein, 50 aa, synthetic construct
  REGION 1..50: note = Synthetic
GGGGSGGGGSGGGGSGGGGSGGGGSGGGGSGGGGSGGGGSGGGGSGGGGS

SEQ ID NO: 73 - protein, 55 aa, synthetic construct
  REGION 1..55: note = Synthetic
GGGGSGGGGSGGGGSGGGGSGGGGSGGGGSGGGGSGGGGSGGGGSGGGGSGGGGS

SEQ ID NO: 74 - protein, 60 aa, synthetic construct
  REGION 1..60: note = Synthetic
GGGGSGGGGSGGGGSGGGGSGGGGSGGGGSGGGGSGGGGSGGGGSGGGGSGGGGSGGGGS

SEQ ID NO: 75 - protein, 32 aa, synthetic construct
  REGION 1..32: note = Synthetic
LEPGEKPYKCPECGKSFSQSGALTRHQRTHTR

SEQ ID NO: 76 - protein, 20 aa, synthetic construct
  REGION 1..20: note = Synthetic
PKKKRKVEASSPKKRKVEAS

SEQ ID NO: 77 - protein, 27 aa, synthetic construct
  REGION 1..27: note = Synthetic
GGTGGTAGTGGAGGGAGCGGCGGTTCA

SEQ ID NO: 78 - protein, 21 aa, synthetic construct
  REGION 1..21: note = Synthetic
GGSGGSGGSGGSGGSGGSGGS

SEQ ID NO: 79 - protein, 72 aa, synthetic construct
  REGION 1..72: note = Synthetic
GGTGGAGGAGGCTCTGGTGGAGGCGGTAGCGGAGGCGGAGGGTCGGGTGGTAGTGGAGGGAGCGGCGGTTCA

SEQ ID NO: 80 - protein, 48 aa, synthetic construct
  REGION 1..48: note = Synthetic
TCGGGATCTGAGACGCCTGGGACCTCGGAATCGGCTACGCCCGAAAGT

SEQ ID NO: 81 - protein, 192 aa, synthetic construct
  REGION 1..192: note = Synthetic
GTGGATAACAAATTTAACAAAGAAATGTGGGCGGCGTGGGAAGAAATTCGTAACCTGCCGAACCTGAACGGCTGGCAGATGACCGCGTTTATTGCGAGCCTGGTGGATGATCCGAGCCAGAGCGCGAACCTGCTGGCGGAAGCGAAAAAACTGAACGATGCGCAGGCGCCGAAAACCGGCGGTGGTTCTGGT

SEQ ID NO: 82 - protein, 108 aa, synthetic construct
  REGION 1..108: note = Synthetic
GGTGGTTCTGCCGGTGGCTCCGGTTCTGGCTCCAGCGGTGGCAGCTCTGGTGCGTCCGGCACGGGTACTGCGGGTGGCACTGGCAGCGGTTCCGGTACTGGCTCTGGC

SEQ ID NO: 83 - protein, 9 aa, synthetic construct
  REGION 1..9: note = Synthetic
IEVMYPPPY

SEQ ID NO: 84 - DNA, 10 bp, synthetic construct
  misc_feature 1..10: note = Synthetic
  source 1..10: mol_type = other DNA
ccccctcccc

SEQ ID NO: 85 - RNA, 25 nt, synthetic construct
  source 1..25: mol_type = other RNA
  misc_feature 1..25: note = Synthetic
gggaacaaagctgaagtacttaccc

SEQ ID NO: 86 - DNA, 18 bp, synthetic construct
  misc_feature 1..18: note = Synthetic
  source 1..18: mol_type = other DNA
gggtagggcgggttggga

SEQ ID NO: 87 - DNA, 25 bp, synthetic construct
  misc_feature 25: note = /3ThioMC3-D/ is a 3' thiol modification
  misc_feature 1..25: note = Synthetic
  source 1..25: mol_type = other DNA
ttataactattcctaaaaaaaaaaa

SEQ ID NO: 88 - DNA, 26 bp, synthetic construct
  source 1..26: mol_type = other DNA
  misc_feature 1: note = /5ThioMC6-D/ is a 5' thiol modification
  misc_feature 1..26: note = Synthetic
aaaaaaaaaactcccctaataacaat

SEQ ID NO: 89 - RNA, 45 nt, synthetic construct
  misc_feature 1..45: note = Synthetic
  source 1..45: mol_type = other RNA
gggtaggaatagttataatttccctttcccattgttattagggag

SEQ ID NO: 90 - RNA, 12 nt, synthetic construct
  misc_feature 1..12: note = Synthetic
  misc_feature 12: note = /3IAbRQSp/ is an Iowa black quencher at the 3' terminus
  source 1..12: mol_type = other RNA
  misc_feature 1: note = /5Biosg/ is a 5'-biotin modification tag
tctcgtacgttc

SEQ ID NO: 91 - RNA, 24 nt, synthetic construct
  source 1..24: mol_type = other RNA
  misc_feature 24: note = /3IAbRQSp/ is an Iowa black quencher at the 3' terminus
  misc_feature 1..24: note = Synthetic
  misc_feature 1: note = /5Biosg/ is a 5'-biotin modification tag
tctcgtacgttctctcgtacgttc

SEQ ID NO: 92 - DNA, 60 bp, synthetic construct
  misc_feature 1..60: note = Synthetic
  source 1..60: mol_type = other DNA
tgtggttggtgtggttggttcatggtcatattggtttttttttttttttccaaccacagt

SEQ ID NO: 93 - DNA, 35 bp, synthetic construct
  misc_feature 1..35: note = Synthetic
  source 1..35: mol_type = other DNA
ggttggtagtctcgaattgctctctttcactggcc

SEQ ID NO: 94 - DNA, 48 bp, synthetic construct
  misc_feature 1..48: note = Synthetic
  source 1..48: mol_type = other DNA
gaaattaatacgactcactatagggggttggttcatggtcatattggt

SEQ ID NO: 95 - DNA, 57 bp, synthetic construct
  misc_feature 1..57: note = Synthetic
  source 1..57: mol_type = other DNA
gaaattaatacgactcactatagggggttggtgtggttggttcatggtcatattggt

SEQ ID NO: 96 - DNA, 31 bp, synthetic construct
  misc_feature 1..31: note = Synthetic
  source 1..31: mol_type = other DNA
ggccagtgaaagagagcaattcgagactacc

SEQ ID NO: 97 - RNA, 64 nt, synthetic construct
  misc_feature 1..64: note = Synthetic
  source 1..64: mol_type = other RNA
gatttagactaccccaaaaacgaaggggactaaaacccagtgaaagagagcaattcgagactac

SEQ ID NO: 98 - RNA, 64 nt, synthetic construct
  misc_feature 1..64: note = Synthetic
  source 1..64: mol_type = other RNA
gatttagactaccccaaaaacgaaggggactaaaacaaagagagcaattcgagactaccaacca

SEQ ID NO: 99 - RNA, 64 nt, synthetic construct
  source 1..64: mol_type = other RNA
  misc_feature 1..64: note = Synthetic
gatttagactaccccaaaaacgaaggggactaaaacagactaccaaccacagagactgtggttg

SEQ ID NO: 100 - DNA, 106 bp, synthetic construct
  source 1..106: mol_type = other DNA
  misc_feature 1..106: note = Synthetic
gttagatcgcaagcatatcattgcgcttgcgatctaactgctgcgccgccgggaaaatactgtacggttagatcgcatagtctcgaattgctctctttcactggcc

SEQ ID NO: 101 - DNA, 71 bp, synthetic construct
  source 1..71: mol_type = other DNA
  misc_feature 1..71: note = Synthetic
gttagatcgcaagcatatcattgcgcttgcgatctaactgctgcgccgccgggaaaatactgtacggttag

SEQ ID NO: 102 - DNA, 35 bp, synthetic construct
  misc_feature 1..35: note = Synthetic
  source 1..35: mol_type = other DNA
atcgcatagtctcgaattgctctctttcactggcc

SEQ ID NO: 103 - DNA, 50 bp, synthetic construct
  source 1..50: mol_type = other DNA
  misc_feature 1..50: note = Synthetic
gaaattaatacgactcactatagggatcgcaagcatatcattgcgcttgc

SEQ ID NO: 104 - DNA, 31 bp, synthetic construct
  source 1..31: mol_type = other DNA
  misc_feature 1..31: note = Synthetic
ggccagtgaaagagagcaattcgagactatg

SEQ ID NO: 105 - RNA, 64 nt, synthetic construct
  misc_feature 1..64: note = Synthetic
  source 1..64: mol_type = other RNA
gatttagactaccccaaaaacgaaggggactaaaacccagtgaaagagagcaattcgagactat

SEQ ID NO: 106 - RNA, 64 nt, synthetic construct
  source 1..64: mol_type = other RNA
  misc_feature 1..64: note = Synthetic
gatttagactaccccaaaaacgaaggggactaaaacagagcaattcgagactatgcgatctaac

SEQ ID NO: 107 - RNA, 64 nt, synthetic construct
  source 1..64: mol_type = other RNA
  misc_feature 1..64: note = Synthetic
gatttagactaccccaaaaacgaaggggactaaaacactatgcgatctaaccgtacagtatttt

SEQ ID NO: 108 - DNA, 23843 bp, synthetic construct
  source 1..23843: mol_type = other DNA
  misc_feature 1..23843: note = Synthetic
ctctcttatctctcttactcgtgcagtgcttccggtgctaaaaagtggtggttctatcttgactcttagctatcttggcggggctaaatttgtcccacattataatgtaatgggtgtagcaaaagcagctcttgagagttctgtgcgctacttagctcatgaccttggccaaaaagatatccgtgtcaatgctattagtgctggacctatcaaaactctagcagctagtggaattggtgattttaaaatgatcttgcattggaatgagtgcaacgctccactaaaacgcaatgtaacaatagaagatgtaggtaaaagcggtatgtatctactaagcgaccttgcaagtggtgtaactggtgaagtgcattatgtagatgctggatataatatcatgggtatgggtgatgttttaagtgatgcctttggcaatacagtcttagcctgggatgctaaataaccttagagccacataaggctctaatattcatcatattgataaactaatataaaaatagttttaatcttttaaattgacttatattatttgcgagatagcactaagaataaatagcaattagattactatttttgagtaatcatatgcttttttatcttatcttgtttggctctttttaactctttttggtataaatagcaaaaaagataataaaaaaagtaataaaaaaccatcaagcatacagctatatattgtgctaaatctatatctatcataaaaattttatttaaaatagctactagtaacaataaaaaaatagtaatttgaatataaatatcataatttactcctttgtttattatatcgcaacaatgattaatataagtttcaatcccctaaatcgggtcatattgtttgtaatcatatcatcaatctgatgatagtacataacccatttcaatcccctaaatcgggtcatatcgtttgtaatttaaatcaattttaaccccttaggtatatcttataagcctaagggttctttagtaattttagagctctttaaggcttgttaatagcttattctctattcctaataactcttctctaactctaaatagttcattacgaatagaacagtataagtctgttatatcttcctcatcattttcatcatctataaatcctgggtcgttaagaccctcccagtctttaatacacatatcaaacataagtgttagtttcttgtatctattgtgtaacctttcctttgtatctattagtcttttaaccttagggtctaatggtataacctttccatttactattttcataaatatctcctttgtgttgatttagaattgcaatattatcaattccaatcccctaaatcgggtcatattgtttgtaatatagacaggggcgacgctgtagagcctataaattagtttcaatcccctaaaatcgggtcatattgtttgtaattcaaccaaccacttaatagctggaatgtttctaatgtatttcaatcccctaaaatcgggtcatattgtttgtaatttggcgatagaccatctgggcatactatgattatgtttcaatcccctaaatcgggtcatattgtttgtaataaggtatagagtttagcacaaaatcaaaattaaatcggtttcaatcccctaaatcgggtcatattgtttgtaatcaaatgtggtatatatctaaatgctggagaaattttagtttcaatcccctaaatcgggtcatattgtttgtaataaatgtttatttaaatgatagctttaaagtggtaaaagtttcaatcccctaaatcgggtcatattgtttgtaattattattggcataatgattggctcacagcccataggtttcaatcccctaaatcgggtcatattgtttgtaattggttgtagtgggagtctttactcacctgtggcttttgagtttcaatcccctaaatcgggtcatattgtttgtaatatcattgtgtctatctaaaaatggtgttgatattgtttcaatcccctaaatcgggtcatattgtttgtaataaaaaattagatatagattgcatttgggaaaaggagtttcaatcccctaaatcgggtcatattgtttgtaatttttaatttttgtttgtaaattctaactcttagaagtttcaatcccctaaatcgggtcatattgtttgtaatagacaaaaattcatcatttgagtctatatagtcaattatacaaatcaataaatagccataaaaccacactttgaaattttcacacaatcaaaatataaaataaaaagttaaaaaacattgaatctaccatataaatcaagataagcaaattcaaattaaagcaatattttatatataaataaccaaattttggctgaaaatttctacaaattcacataaatttagatcttttttttaaaagtggaaaaatatttatgataactctaggtaaatttaattgctatattcacaaaagagcttatataatataccaacaaaatagcttgtgatggctttaagtctttaaaatcagctgcttatagctattttggtggtttttgatatttgatttagcatttgcaatagagtcgcctgagttggcgtgggctaggttgtttcttaatttatctaatcttttatatagtttatttatcttatctatttgcatgatgttgctatatgacgcacatagactctcatactcgctatggcttaaatttatggatttttctcttttttttaacctatcatagcctttggattttgataaattcatacaaaatgattttatcaaatatgaatcgtctcgctgatatttttctttgtagtaatgctctatttgggatattaaatttggatttttaagttttatagtggtgtatatatactcttgaaccccttcataaagcaagataagtcctaataaaatgtaatttttgcttattaaatcatcggctaaatggtagtaaaattcatacgcaggcttggcgttatatatcttttgtaaatttgaaattttctcctttagctcattggcataatcatatatagctggatttgttaataaatttgagtctagttcagctataagtctagaggcaaaactagaaaataactccttaatattaagcgccataatattatcgctaaagccttttaatgcgctaaaaagctctttatatttcgtgcctattgggatatgatttgctactgtgtagttatcatcaaatgtagatagtagatatgagatattggctaaatctagatactctttaagattgataatctcatagcttttgccttgttctaactctttagcaaataaaattgcacagattttgcgactattttgtaaattagtgataattaactgagtaagcaccagcataggcaagtgcctaaatccatgcgatacatctactataacctcattatagtcttttataatctcatttatgatattaaaaatctcagcaaaatcccctacatcatcaatttgtctagccttgtcaaatgcattatcgcagtttatatttgccttggataaggcttttaaatttgctattttagaatcttttgtataaagtgggataatatcatagcctttacataaatttagcaatgtaaatgtatttatagagttgttttcttttaaatttggaagtagatttaatatctctgtatcattacagatatatctagcatttgtgctattgcttaggcctaggattgtgattatacatctcatattttttcctatttaatctctgcaaaactacataatacccagcctaatggtttgccatttgcaagccagatagttgtctcttgatcggcgatttttgatctgtttttaccttgaataattttgattttgcgttcgccttttatggtgacagcacgagcgccactatgcttgccaatgcgaagcaaaaattcattatctttgattgttaaattattaaatatatctttaaatttatcattaagttggctatatatcgcatcattttcaatagagtcaaaaatctctaaataatggtcattgcatgcttgtgcgatatcagatatatttagcttgttttcgtctttaattattagactaaactcaagctcctttgtagcgcttaatagctcaagtctaatagatagcccctctttatttatatttcttttgagattttggactttaaatatctttgtagcagtttgagtgctatctgagattaatagatttttaaaaatattactatcagtcggggctagcattaaatttttaaccttgtcgtaatctttatatttattatataaaaactcttgataagctgtagagatggcaccttttatagagctacctggaattaaggctttgtgagtgtttgggtcggtgtaggttttagatattgctaggttatttatcacatttttattgcctttttctttatttgctatcttgccgattcgtttattatactcatcatatacagctttatcaacggcaattttgtgataatgggattttttggctgtgactttatatttatttataaatttataaatttttaaaagcccattttcatctatagcacttgcaagatttaaaaactcatcctttgcactctcatctaaatttgcataaaaatccatctcatcaaactcataaagagcgtatctaataaccgttttatcatctgtagttttagctttatagctatctattatgtagtttatcggctcaaattcccttccagatccaatatgcaaatgcgtaagtggttgaactttaatcagatattttttcatcctatccccttggctactgatattattatggcgtatccttgagagtaggcatttggctgagttgatgagatattagctactgctttgccgatgtagcctttggattttatgctatttaactcactaatttttggagttataagcgcagcagtatcagccattaaaattggatttttaaatggatttttgactgctaattgagcaccatgtttgccaaatctagtaaatggctcatagtagcactcatcataatctccttctataacgcacggactaagagtcataaagctacttgaatttgtaataaatggctctaagactggagataactcttggattatttcaaatctacctttgcctatgctagattttttgccataacccatttgtgagacaaactctaatgtttgagctagttttttagcgctaaattgattaatatcaagcaaaaaatagatctgcgtaataggtatattaaattccattaatgcatacgggctaaatccatcgccagtagtgttagataaatagttgatagagttttttattgtagcgttagcgactattttatagtttgcttcatcgttgcttttagcgtggctaaacttagcactttgtaaagatgtaatatctagccagattttatctctgttttgctttttagttagcatatcttcgcctaaaatatagcttggagcttttggctttggcaaaaaaccaggtgcaaatccatctgatactatcaaaaatggcctattttcatagttatttagcaaattttctagctcatctttgccatatttgtatgcaattgcccagcaaatttgaccaaagattgtatcgcctttgagtttagtagcaaatggggcaattggctttatttgacactgatatagattcatcttagcaccaatttgtcttattactaaactcaactctgccataacctcttgagccgctaccacctagataatctctttcaattagctccaatccacaagttactaatccttttaaagcactctcatcatcgctatctaaaatcttgattctaatatcataatcaaatttaataccagctggaacacgctcaatttggcgtggatgttgagcttttccattaattctattgattacattttcatatttagcttcacttaatgttagctcacaacattcgctacttacaaagcaatctccaatgctaattctagtaaagccaaatttagactcactagcactatcgccaaatagtttaattaaattttgtgctttttccatatcattttgtggaattaaatttaagcaatttgaaccaaatggatttccattattatacccagctactttactatcccactctaataaacttcttaatttacccttaatagaactaccagggatatatggtttatttgttagtgtgtcttttattacttgattatctataccgccaatcttcataacatcatcgccaccacctatatgcagacctgttattagacttatttgaccttttagtgatactattttcatatttttctcctatcgtttagcaaaacctaaaactgcttcaaaaaataacttaaaaatcataagcttttctttgctatctacctgtgcaacgcaagtttctatcatatttttaaaatcgatagttgcatgctttctagcgtatgcataagctacttttgaatttaacatttttataaatggcaaaatctcgctaaaatctttctcatcagcttttactaatagatcaattaaataatcataaaaccttctcatctgagtagagctcatttctaaagattcagccgttttctttgcaacactatcaaataaatttggctcttttatataatcaagcacgattttatccattttctctccttttatatattaattctgatactaccattttgactgcttttggtgatttagcaatatttttatttagactttgcagtagattttcatctttggattttatatttctattataactataatttagctttgaacgccatagcgcatcttgtgggctaaatttgctttgcaatctgctactcatatcgcaaatatctaaaattctataaaaaaacgccatcttatcatcatcacctaaatcctccataagcgttgataactcatcaaaaatttctatatattcactccatttaacgctactattaaaaagcgttatagagttcttaccatctatatttttagaattttttaataactcctctaaatgataagctagataattaaccggcctactaggcttaaaaagtgcaatcccaaaagatatgctaagctcttttgattttacaaaatcaataaattcagccctaattcgtctagctaaatcaagcgtgctttgccactgtccaatgataaaaagatcatctccaccagcaaataccacatagctatctttaaattcattttggataatttgaggaatatagagtgaaaagaataaatcaatatttttagcaaacatattaaaatttaaatagctatcttttatgctactattttggataaaagcacccattccatcaacatcagccttaaaacctccaatagcgttaaaatcattactacaaagctcttcaaagcttttaataactccatctttgctagctacatatgaacggattttatcatctaaatctatactgatatcgcctacgaaatttatgtgaagtttttttgcgcttatgcttttagtatttttatctgttaatactttacctaaatttataaatgcatcacaaatatagcattggtgattatttatagcgatttttcgagtattgcatattgggcaaagagtttgattggttatagagttatcatagtttaatactactttagagcgagtttgaagggtaaatttattaaatttctttttttcaatctctttggctatattgcttcgcatttcttgatattttataggagatttaaaatcatcttctttgcaactaaatgctactaaattcataccactaagcccataaaaattatctataaaaaactcatctatttgggattgtatatactttatttgatctttaatatgctctaacttcttatggattaaaatctcaaatttaccagcatttgttgataatatcaaaccgccatctctagcgatatactcagcaataatctgcgtaaaaatctgcacaaaagctgactttgcacggattaccttggctgcatttttagccccaagtccatcaaatataaaactttgaattccataaaaatcaccacaaacaatactcatctcatcacttaaaatagtattgatatccaaatttcttagctcattatttaaatttgcaaaaattggattttgtaaaaatttggtattaaaaatatcgctaaattccatctatatcctccacttcaatcttacctaaaccaaaaacacactgctttcctacgcctaaaatctctgctagttttaatgcttgatagctttgcaaatctagattttctatccttatattgccaattaatccgcctaaattcatactaactttttgcctattactatgtcttcttagctcgcaatatcgtatatttttattagtaatttgtgctgaagtttgtatatcatatctgctatttagatgttgaattttttggattttatcataaatagagattaaaatatctcgcagttctaagctatcatctcttataaaacgatttaattttttaatgcgtaatggtgtgatgagtttaagattaaccacgttactaaaattatcaaatttagccacttttactagctcattaggcaagattatagctccattttctagtacattatgcccattaacgaagatattaaaatcgctaaatttacaccctccaagaccatattggctaaacataatatatagagctgataccatatatgctacgctattacatgcatcttcaaatagatacaatctaaactcatacccagcctgccctagcctaaaatctagcctataattacgataactattttttaactcataaaactcataatacaagcactctttagatccaaaacagctatcacaagtaaatttaggatttatgcatgtaactctttttagcgcatatcctaatgcacctctaatctgcgaacctataaaaaatggcgccttgctattaggaattgatactaaaataacgctatatctcagcccagctgaatttatcatctgtttcaagccttatagtgatctcatcacttttacccttttgcacctgcaaaacatcatcaaaaaattctggcgtagatgtatatttaatattaaagcttccttccttatcaattgctcttaaaattccaaataactcagaacgggtaaaattacgcctagtaatatgatatggcactagccttgtggagttatctggaaatttgatataaattttgattagcttagagtctttacggcggtaaaaaaaattaacaaaagtcccaatcatcgcaaaaaatgcaaacacaatcgtaatataatctaaaaactctataaactcaatagtctcttttaaaatctccatcaatactccctaaatctaatatgtttaaatatggaaatttttttagtcattccatcttgaattagctctttagaatccttagcagtagtagcgtatattggctttaatcctatacttttggcataatttaccatatgatatgtagcgccaaattccccttgtattaagataaaatccccagctttacatgataataaagcttctctaaactcagctaaatactcgctcaaatcactaatcttgggcggaatattcatccatttagccattagctctttgtcaaatttgataatctcgctaatcccaaggctaattctagcatcattaatctgctcaggtgataatgtatgtgaaattaataaaaatagcctagccaaatcccatcctaaaaacaatcaaaaatattatcaaatattatgttaaaaataatttaaaaattaaattttattaataattttatttttatgttataaagcttatttggctactatttttattgcattagttataatctaaatctattaatttttctttaaattgataagcttatttaatgatttaaatctttgtaagttaaattttattaaaatctaaatagtttatatcgttggagttgtttatgaatgagttatctataaatatcgatatgggtgctgcaaataatggcgtatttatcgctatcacaaatgaggattctatagtttataaaaatgcgtttaatatatattttgataaaaatttaacattttctaaaaacgatagaaccgctcgtcgccatgctaggcgtagttatgatagagatagatttatcttaagattacttaatgagattttgcctataaatagcttgagtcaaagtcaaaaagagatgatttatggactttttaaaaatcgtggctttaactatcacaatatcgaatttaatgaaagcctagatgatgatgtggttaaatttttaaatagtttagatggatatatatttggacttagtaaaaataaagatgagtttgaacaagttctaaatgagatagttgtaggtcactcaaatgatgaaattaaagagatactagaaactcaaagtcaaattctaagcaatatagataaaaagaataaagaagctataaaagctagtaaaaatatacaaagcctacttcaaagcattcgcaatgaaattgataaaaataacaaacatagaattagctacttaaaagatataaaagaattaatttataaagattgcgaatttataattcaaaaatctgataaatttgataatttagatgaattttataattttgttggaaatattgcaaatttccaaactcgaattttaagaaggtattttaataataaatatctagataatataaattttgatgatgcaaaactaaagaaaaatataataagaaatatcaactatatggagtatataactgatatacaaaaaagtaataaactaaatatgttaaattctttaaagacaaaatcagctttagagtatctaaaaagcattgacccagtaattactatcccgccatacgaaaatcgtaaaaataaaaatccacaaaaatgcaatactttaatactaaatattgacaaaattactccaagtctagtaaattcaacttataaaattttaaatagtgatgattttacgcatataagaagagatgaaaatggtcagttaattagcattaatgatatagatgaaaataatatcgctaaatatttacaaagagtattagatatctcaaaagagagcctaatggatacagctttatatccaagaactcttgataataatagcaaaatatttgctgatacttttaggttaaatagtgatgaaattagagaatttaaagagtttgctaggagatactataacgaagtagatagtgcaaaaaaaggaataataactaatgatttattaattccgtgtggcaaaaatacaccacataaaaatagaaataaaaatgagcttatatcagctctttttggtaaaaatattactaaagatgatgtaattagccttgaagaatttatgctaaaaaataagataaaaggcaataggggctataaagggttttttgagaatttaaacgaattaaaaaagagttatcaaaatagcttttatcacaatctaaataatgatgaaattaacgataaagatatccaagcaatcctagagctatatccaaaagtcgctcaaaatatcagtaatcacaatagtatatttgagtttaagctcccatttgataaaagcaatttaaatacaaatatcaactatctaagccagttaggagatataatctacgatgagaaaaatcgtggatttttaaagacttgcaaatgtcatactttagaaaatttaattcgttctggctcgcaaaatgctatttgcactagactaccatctaactcagctaggcttatcaatggcaaaatagagatgtatctaaatcgtctagcgtatgaaattagcaccgctcttaagccagaaatcttgcaagatatctcatatatatctataaatgtagagatgaataaatttagttttgaaaatagtgctagcaacttaaatttaataagcaaacgccaaaaagctaaagagataatttgcccatactcaggccaaaaaatagatgaaagcaattgcgagtatgatcatatcttgcctcgttctaaaggcttatataattctagagcaaatttaatcccagctagctccactgccaatctacaaaagagcaatcaaagttatactttagaaaatttagatcaaaaatatctagactcaatctatgaaaaaataaaggtagaaaatcttgatgaatttaaaaattttatagatacacagatggcaaagataaatattaataaatttacaaattttgataatcttagtaacctagaacagatcgcacttcgacacgctctattttataaagattcaaatagttttgccaaagcacttgaaattctaaaactagatagaatcaagacccactccaatggaactcaaaagcgttttgtaaatcttttaatacaaaagataaaagatagattaaatagttcaaatcaaaatcttgaatttagcgttaatttcatcaatgcagaactagtaagtgcaattagaaatgaattaagcaaagaagataaagagctacaaaaagccaaaattcaagatagccatagccactgcattgatgctagtatagtattttattacactaatagcaaacttataaataactcaaaaggtcagcgtgaatttaagtatgattatagttatattaagccagagtatagcaataagataactatgcaaagtaaaaaatatctagagttaaactctaataaaatagctcgtaaaaagctatttgatgatagtgtgtattcgctagtttatgaaaatgccaatatattaaaagataaagaagttaataccttgcttgaccttgggcttttgcatactaaagaaaatggcaaaaaggttgcaataactagtgattttaaatcaagtaaattttatataagcacacataaagtctttgatctattatttaaagcctttaatgatggcgatattaaattattaaataaactcaaatttctagataatcatctatctttttatatacgaaaagatatatttgctattataaaagacaaagataaaagtagtatgttttttaccaataaaaatgagctaaaaactctagatgaaatagatgaaaaaataaaaacaaaaaatattgataaattctaccatatcttaaaagcaaatgaaagcaagattatagagataaaagatggtaaaaacatattaaaacatcaagagataaaagagctgtttaaagagtgtttttatactaaacaagccaaaagaagtagaaacagatctcgcgtaatctactctttacctataaaagcaagttcgaaatatattataaggaaaaatagcggatatgctggacttagcaattcagatatagctactaaaacatatatagatttagatagtaaaaatataatcaaaattccattttttagcaaaaatatactgccttgtaaaatagcagatataataaatataattaaattaaaatctaaaaatataaagcaaatttacaaacttctagtaaccaaaaatctcccatcagctattacaaaacttgagtttataatctctcaagccaatagacacgatatagaggttgaatttgataaaagcaaaattggagattataatttacttgaccaaactagtcgtgatgagtttatagataaatatttaagtggtgaatttaaagagctactaggagagccaagagataagaaaataactataatcaaagatacaaaagatagtctaataatcgcatactgtgtaaaacaaacatcggctatgaataaaaaaataatgatagataatttaatcgatgaaacatctagttcttaatagttttgggctatttttaggattaaagtctcaaaggatagtagtatatcaaaataaagagataataaaagagatagcccttaaatcattaaaaaccatatctataaattcaaatggtataacaatttctagcgatttaatttttgcttgcagtgtgcgtggaataaagattttttatcaaaactttaacacatttagcgctacgcatacactttatgaacataaaggagtaaatgtattaaaacagcaattttcatctaaagataatgccaaaggattaatactagctaaagagttaataatcggcaagattaaaaatcaacgctccacaattttatacttttctagaaatcaaaataacgaacaaaaaaatgcaacattaataagtatgcaaaaagcaatcaatacactaaaaagctcaaaaatcatagatacaaatgatatatttagcattgaggctaatgctgctcataaatattttgaatttcttaaatttaactctcttttaccatctagttttgaacaccgcactaaaagggcaagcagcgaaatatcaaaccaagctttaaattacggctatgctatactattaaacataatctataaaagcattataaatgccggattaaatccatattttggagttttgcatactatgcgaagtgctaagccatctttggctttagatattatggaggagtatagaagctttatagtagatagaaatattattaaaattcgctcatctctcaaaggcgaattaaatacagaattaaaaaaagtaatagcttcaaatatactaaattcattaaataaaaaacttacctataatcacaaaaagtttaccctagaaagtattatccaacgccaagtatataaaatttcagcatttttttgcggtgatagcaagtataaatcatatatatttaggtggtaaatgcaatatttaatttgttacgatatagaagataataaaaatagaaccaagctatttgaaaggctaaaagattttgggcttttagctgtgcaaaaatcagtattttatggggagctaagcaaagctgaaaaactcgctattaaagagcttttatctaaatattgcactaaagaagataaagctattatcacatctataaatttagattttaatgatactttaggctataccaaagagtattttgagagtaaaacatatgagattatttagatgattttagttagtcatattagacagtttgtattttgtcctaggattttatatttttatacattttgcgatatcaaaccagtatatccagagtatgtaaattcaggctcacagtatcataataaacaaaatgagctatttaaaaatagaaaatttattaaatttaaactaccaattataaaagcacatagtaatctatatctacaagatttatctatgcaaggagtagcagatttggtgctagagtgtcaaaatgaaataatcgtagctgagtttaaaaatcaaaccaagccaatactaaataaagggactaaaatgcaacttatagcctactcaaaactagcaagcaaacattttaataagccattttttaagataatgctaatttgcggtaataatcttaaatttaagatatttgatataaaaaacgatgatttagctcaatttaatagcacgatagataagattaataaaatgttaaatcaagagttatttccacaaagttgcgctagtatagctgcttgtatgcagtgtgaatttaaaaactactgtgatgatagagaataataccgggggtgccaaaggcagttgccccgatctgttaacacctttaggtgatttcaaacgctaaagagttaatctgtagtataatttgcatttgtattataactaaatttttccacaaatttgctatttttagcattttttttcaaagtggaaaaattaatacctctaaaccatagccaaacgcccataaaataggctaaatttggctcaggttgcaaattataccacaaaccaactcggtttgaaacatattctatttatttttttatatatgcctatttttgttgcaaattataccacaaaccaactcggtttgaaacatactgtggctggatggatttgtaacgtgtctaagttgcaaattataccacaaaccaactcggtttgaaacttcatttgacttaaagcatatcttatttccccatttggttgcaaattataccacaaaccaactcggtttgaaactttcttaaagctaatgatgaactcttaagatgcttaagttgcaaattataccacaaaccaactcggtttgaaactttgatgagctagagcgaattaaagaaagttttgcgttgcaaattataccacaaaccaacttggtttgaaacctatgttaaacgctactcattataatatccaatttcaagttgcaaattataccacaaaccaactcggtttgaaacctgtatctgcaaggctccgcaagtgcctaaacctagttgcaaattataccacaaaccaactcggtttgaaacttataaataaatgccgatgatgttgttgatataaagttgcaaattataccacaaaccaactcggtttgaaaacaaatctaaacatctaatcaaatttaaatattatctactattatattaaatttattatcaaaatagattagctagttaaagatataattttataaatttatttttgcaataatattaaaatccctcaagaaggataaaatatagctctttaatctgcgaatcactcaaatgagcagtcgaagaagtactaagaaatcgaataatgctatctttatttaatgcatttttgccaatacaagcaggatgagcgatcaaaaacgccctacctacaccaatctcatcacctagctttccatcacaaataaaacaactcatatctaaatgcaatcgcccttcaaactgcaaaatcatagcataagcctcaagcacgactctaataggattttggcggtgaaattttttcgcacaattttctaataagttataataaaactcatcgctatcttctacatctcgcaaatgatcagctaaaagacgcataaaattttgccaaatcaataacttatccctatcaataagccagctaaatcctaaatgcatagtagagcgaagatgtggtaaaaatgtcttactctctactagctcaaagtctagcttaaaaccttgcgttattataggatggcgagcgccatagaatctatagcattttatctgcttatttggtgagagaatcgtaaccaaacaatcctcatctctaaccttttgaacctttaagatatagccctgcatgggtcaaaaaaataatcaatctgctctctcataatttcagctgaatgaatttgatttaccatacatctaaactcactagctccactaattcccttagaatactcatgtaaatgcttacgaaatatcccaatagcatgatctccataagtcttaagcattagctcaaaatgctctttgattatctgctttttctcatctggatttatactttgattctctttaatctctttaaatatccatggagaaccaatactagcacgcccaatcatcaagccatcacaaccagtaatcttaaaaacctcttgataattattaatatctatattgccattagctacaacaggaatagtagtagctgatttaactcttgctattgcttcataatccactggtgcgctatatccgccagctctagtgcgaccatgcacgcagataaaatcagccccagcattagctagatcacgcgcaatctcgtgagccattttggtattaaatcctaagcgaattttaactgaagtatagcgtttatttgatctatttttaatagtctctataagtgtgcaaagcaactttggatcatttaaaagagctgagccggcattttgctttatgacttttggaactggacagccgcaatttagatctattccatctattccatcaaattgatttaaaatatctacagctttagcgattatatctttattactaccagcaatctgaactatataaggggtctctagtggagatttttcaatcattgataaagttttatcatgctcatacacaaaggcatttgagctaatcatctcactaacagtacaatcacacccaaatctcttagctaaagtgcgaagtggcagatcagaaaagcccgctaatggggctaaaaatagtggcttagagctaaaatctatcattaataaaatagatccgctctagcgattttgccatgatctcttaaaaatagcaaggtttcaatgcgttcaaatttgctattttcattcattattttctctcttaattgctcaatcatttgaaaatcatacagtagatataaataggcctcaaatgctagtgattcttcatttcttaagcgatcaaacattgatataagtagatctggttcgattttagtttttaaaattttagctatttgaatatactcatcttgagtaaatttaaccttgctaataatattaaaaatatcattggtgctaatctcaaatttatcctgagcatatctatttattaaaacaaaaacatccttaactgtgtatattggattaaatttagataattccaaaaatgagccattttctactaatgcattagatgccaaagcctttaactcttcgtttatatcactatttgataaaactgtaatagcatatttataatcagccattatcttatttttttcattttggatatatagtggatttgtttttaaaagtttaaatctttttaaatcacacactttgccgctttttacatcactgcataactcatatgctgctcttaaatcatcattttgcaaggttggtttgcctaaatttaaccacggagatagcgatttagttacttcgctagatgcggtaaatagatcggttttaaaatctttatttgattctaaaccaagataaatctccttagctaaaacattataaatttgagcatcgcttctcatagctctaccctctaaatatatcttaaatccgtagtagctcatatgaaaaatagctaagataacaaacataatcaaaggcaatataacccatgtagcaataggaaaatctatattatacccaaaaatattaacagcataattttgattagcaaaagagaaaatccctaaccaaacaagaccgatgtaaataatagaatatagaaaaaatcttctagttttcatcttatccttcctattttattatagttttttctgcaatttcacgacatgtaatgcaatatcttgcatgaggcttaacctttaaacgctcaatatcaatatcatcttcacacatatcgcaaatgccataaataccagattctatcttttttaaagattgatcaatttcattaagctcttgttgttgtttagccgatatagagtgttctagttcttcatctgcactaatactagcaaaatcaaactcatcagtagctccactttgtctaaggccatctatttcatttgctgcatcattaatatttctttgaatttgttcttttctttctaaaagtaactctttaaaatagtccaattcgctttgtttcatataactcctttttatttatgataagggtgatttgcatttatgcaaagagcgcgaaaaatctgctcatataagacaagcttagcaattttatgcgcaaaagttagccttgataggctcactagcttatccattctccctcgtaaattatcacctaaaccataagccccgcctataaaaaatgaaatttgcgttttatcttttaataacttagcaaactcaaaactatcaagcatatcgccacgctcatcaagtccaatacaaaaaccatttaaacaaggcttatatgcctcctcatatgctctatgcgatgcggcttggccttgaatttgagctttagcaatttgtgggctaaatttattaatctctttaatgctagcccatttactactcatctttatatactcttttagctctttatcatcgctaagtttttgtaggcaatggactaaaatttgcactaaatagcctcattaattgggctgtaaaaattatcatttttcataaaaaatcttatcatatcgctaagatattttttatgctcatctcttgggactatagcatctattaatccatgctccagtaagaactcagctctttgaaaaccctctggcaagcttgctttaatagtttgttcaataactctttgacctgcaaaacctattaaagcctttggttcagcaataatcaaatctcctaaccacgcaaatgaagctgaaactccacccatcgtaggatcagtaagaactgagatatatggcaatctattatcacttaaaagctttaaagcagcactagttttgctcatctgcataaggctaaaagtactctcttgcattcttgcgccaccacttgcgcttactataataagtggatttctcttttctattgctctgcgaactgcacgagttatcttttcaccttcaactgaacttaaacttccgcccataaagctaaaatcaaaaaccactagctgaataggttggccatcaattgttgcttctcctgagattactgagcttgttttgccatttttactttgactctcttcaattctttttttatatgattttttatctacgaaatttaatggatctattggtcttaaatttgcatcaaactcaacaaagcttccaacatcgctaattaattctattcttttttgagcgctaagtctcatatgatatccacattttggacagacattatagcatgcttcaacctctttaaaatacatcaaagagctacaactattacattttacccagtggcttggggcttcacttgggtgagattgctttttgcgtatttttgaaaaaaaatcacctagcatttttttcctttaataaaaaattgggcgattatatcaaatttttctttaaattcatatttttattacttttaaatttattttatagattgttttatctgtgtttaattatagttaaatttacatagatacaatttcgcaattcataaaaattattaaggagatttagtatgatagttactaataaagcaccacaactaagtggcgtagcagttctaggcaatggtcaaattgaagaaaattttgatctatataaaaacattggaccaaaaggtgcagtagtatttttctatccaaaagattttacatttgtttgcccaagcgaaattatcgcttttgacaaaagatatcaagagttcaaagatagaggcattgaagttatcggcgttagcacagataatgaatactgccactttgcatggagagaaacagatattaaacaaggcggtatcggtagagtacaattccctctagtagctgaccttaaaaaagagtgggcaagaggatttgatgtactatttgatgaagcagtagctctaagaggtagcttcctactagataaagatggtacagttcgccacgcagtaatcaatgatttaccacttggtagaaatattgatgaaatggtaagaatggttgatacaatgctatttacaaatgagcatggtgaagtttgcccagctggctggaacaaaggtgataaaggtatgaaacctacaactgaaggtgtagcaagctacctatcaactgatggtgacaaactataattttaccttttaattaatttggctgcgactcgcaagggtcgtagcctttttttatgcctgatttttatttacaatcaaattttataatttaaatgtttaaagccctctaaatagcatagctacctaaaaggcttaaaaattatccatgtgttctttggaattccttcataaattcacatagagtttgcacgctttgttgtgttacagcattatatatagaagctcttaaaccacctaagattctatgaccttttaatcctatcattccattttgttcagctaatttaacaaaagctccatcaagttcagcacttggagtagcaaaactaacattcatcaaacttcttgaaccaggctttgcaaatgctttgtaaaaatctgaattatctataagctcatataaagcagctgctttttgctcatttatagcattgatagcgtttaaaccaccttgatctttgatccaatcaagaactaaatcaaacatataaattccaaatgttggaggcgtattagctagtgaattagcttctatttgcgttgtataacgaagcggagtaggaacgctatctttaactcttgcggctaaatcttttttaactataacaatagttataccagctggaccagcatttttttgcgctccaccataaaatagtccaatattatgtgctttaaaatcaatttcacggcttaaaagatcagaactactatctactactagtgggcattttgggcttggaagggttgagtattgagttccataaattgtattattagaacagatatatccataatctgcattatcgctaaattctaccttaggaatatggtcaaacttcacatcctcgctactagcaacaactttataattgatattttggatttttgcttctttaattgctttttgtgtccaaactccagtatttgcatactcagctacgccgccagcatagatatttaatggaatttgggcaaactgtaaagttgctccaccttgtaaaaataaaactgcataatcatcgccaatattataaaattcacgaaccttagcaattgcattattatgcaactcttcaaataccttaccacgatggctaacctccataatactaaaaccaagaccgtgataatcagtaaattcagcctgtgcgcgctctaacactgctaatggaatcgcacttggaccagcactaaaatttaaaactctactcattttatccccttattttattattgcttgtttgcataaatcttgtgaactaatagtaatctcatctccactttttaactcagctaatgagataatttgtgaatcttttataatatgtgccatattttttgttaccttataaaagtactcttgtcttttaaaaactaactcaaatttatcaatttttgattgagctaaattaaattttttgtgtaaaaagttatctaaatttgacttaaaactatctaaagtaagagtagctaagttgattttttgttctattgctttagattttatctgcgctttggctaaatttaaatagctttcgcatttgttgaatttagatgatataatcgcttcaagagtattttgaataatatcgagtctttgatgaagttcattgctatcaggcaagagatcaaccatcgcagcagtaggcgtaagagatctatgatcggctacaaaatcactaatactataatcaatttcatgtcctacggctgagataataggtgtctttgcttcataaattgcataagctaaatcttcatcattaaaacaccacaaatcctctttagacccgccacctctagcaatgacaattacatctaactccatagaatcagcaagctttaacatcttaattaaatttgctggagcgctatttccttgaactaaggaattaaatagataaaacttaggcaaaacatacctattactaataaccttacacatatcagcaaatgctgctgagctagcacttgtaataatgcctattttgtttggatattttggtagaggttttttatgcattttatcaaataatccagcaagagctagacgctctttgagctgattaaatgcaagctcaagctcacctacaccaattggaataatgcgactagcgataaactgatagctaccatttgggctatagattgaaagcttgccaattagcgtaactttcataccatctttaacttcaaatttgatattttgattagcaaatttatacatagctacgctgatagcagatttctcatctttgagcgtaaagtaccagtgaccactactatgtttt

SEQ ID NO: 109 - DNA, 23822 bp, synthetic construct
  source 1..23822: mol_type = other DNA
  misc_feature 1..23822: note = Synthetic
attacaaattttctcctactaaatcaaacaaaagacgaaagccctaaaaaggcaaatttcgctccattccttacaaaactccaaaaaggctttgcgcttgataatagcgattatgagataatttgcaaagagatctataataaaaattatgatgaaattcagcttggtgctttgctagttttaataagcgaaaaatcactatatccagatagccttgctgcacttgtaaaaaatatactaaaatactcaactacatataatgataactcaccgatgatggatatagtgggcacaggtggcgatgctttaaaaaccattaatatctctacaacttcagctttcatactagcctctttaggcatcaaagtagctaaacatggcaacaaagccataacatctaaaagcggtagtagcgatgttttaagccaaattggcatagatttagatagtgatataaagcgtctaaaatctagactaaatagccaaaatttagcctttttccatgctccatactttcatcctattacagcttctgtgcgtgatgtaagattaaggcttggagtgggaactgtgtttaatatccttgggccacttcttaatccaaatttaagccttagcaatcaagtagtgggaaactatcttgaagaagttaatgggctaattgcggctactttattaaatttaggtcgcaaacacgctcttgtcgtgcatggcatggatggaatggacgagataagcctttgtgatgagacactaatacacgaagtaaaagatggcaaaatacttgagtataagatcactccagagcaatttggctttaatagagcatttcatgctgatattgctggtggagatgctagttataatgctgatattttaagagctacgctaaaaggagagcttggtggggctaaatttgatatagtgcttttaaatgcgatgtttgccctatatgctgcagatggtgctagctcaccactagaggctaaagatataatcttaaatgctataaaaagcggtaaagtttgggagttttataaaaactacaccggagataataggtgagcgaaaatacagagtatttgacaaatcaactaattagctatttgggtaataaaagatcgcttttaggctcgattgatagcgttgtatgcgatataaaaaaagagcttagaaaagataaaatcgcctttgctgatgtctttagtggaagtggagtggtcgcaagactggctaaaaagcactcaaatttgatattagcaaatgatttagaaaaatactcttttgttataaattcatgctatttagaaaattcagataatgagcttatatcaagcttaaagcaaattcacgataaaattttacaaaattacacaccgcaagagagcttcatcagtgaaatttacgccccaaaagatgataaaaatatccaaaaaggcgaaagagctttctactcaaggcaaaatgctttgattttaggcggtttaagagatgaaatatctaaaattccaactgaatttcaaaaatattttatagctccacttcttagccaggcctccattcactcaaacaccggtggcgtttttaagggcttttataaggataaagatggcattggaaaatttggcggtagcggggagaatgctttaaagagaattttaggcaaaatagagcttgaaatgccaattttttcaaattttaaaagcgaatttaaggtatttcaaaatgacgcttatgagtttgctaaactagccccaagcgtcgatatagcgtattttgatccaccttataatcagcacccttatggatcaaactactttatgctaaatttaatatgcgattttaaagcaccaaatatagagcaaatcagcaaagttagcggtatcccaaatgattggaaccgctcgaattataataaaaaagcaaaagcaggtagtgagtttttcactcttttaagcgagtttaaagcaaagtatttgataatctcatttaactcagatggatttatcaaagagagcgagtttttaacaaatttaaataaaataggcaaggttgaaaaagtaaagatcaaatacccaacctatagagcaagtagaaacttaaactcaagggatttatatgtaaccgagtatctttacatagtaaaaaaggttatataatgagccctttaattaaaatttgtggtatcaaaactttaagcgaagctaaaagcgtgtgcgagtgcgaatttaagggtaaaagagtggattttatcgggctaatttttgctgagagtaaaagaaaaattagcaaagaaatggctaaaaatatagcggatttggctcataaatttggtataaaagccgttggcgtttttgctaaaataccatttgatgaagtggcaaaaatagtgaaatttgcggatttagacaccattcaaatctatgaaaaagtagatgataaaactaaatttgattgtgaggtgtggcaagtttttagcgtaggagagagtttgccaaagcctgaagggagctatgataaaatattatttgatacaaaaggggataagattggtggaaatggggttaaatttaactgggatttgctaaaaaatttagatatcaaatttggtctagctggtggaatcggcgtagaaaatttaaaagaagcaataaagcttaaaccaaatttaattgatataaatagcaaaatagaagatgaatttggaataaaagatagcgataaagtaatggaaattttaaaaatagttagcttaggagatttaaaatgaacgcaaaagcatattttggcaaatatggcggacaattcgtccctgaaaccgtgatgagcgccctaatggagcttgaagaggcctatgaaaagatcgcaaagagcgatgaatttaaatctgaattaaacgcccttttaaaagattatgtcggcagaccaagccccatgtatcacgccaaaagattaagcgagcactatgggcataatatatatttaaaaagagaggatttaaaccacacaggagctcacaagataaataacgctctagcccaagcacttcttgctaaaaagatgggtaagacaaaggttttagctgaaacgggcgctggtcagcacggagtagccactgcaacagcagcggcacttctagggctagagtgcgatgtatatatggggcagtgcgataccaaaagacaagccttaaatgtatataaaatgcagcttttaggagccaatgtagtacctattagcgatgggcttggcacactaaaagaggccaccacagcagccattcaagcatgggtaaatgagatagagagtagattttatgttataggttcagccgttggccctcacccatacccaatgatagttagagatttccaaagcgtaatcggctctgaagccaaagcccaattagatgaaaaaggcgttaagccagattatatcatagcttgtgtgggtggtgggagcaatgctataggtatattttcagcatttttagatgatcctagcgtaaatatcataggcgttgaagctgcaggtcttggtatagagaccaaataccacgcagccactttaaccaaaggcaccaaagggataatccacggcatgaaaaccatagtattacaagatgaatttggaatgattttgccagttcatagcataagcgcaggacttgactatccaggggttggaccagagcatgcccacttacaagatataggcagagtaagctactacgccgtaagcgatgatgagtgcgtaaatgccctaagacttctttcaagattagaagggataataccagctattgagagctcacacgccctagcttaccttgataagctctgccctactctaaataaacgctcaaatatcgtagtaaatgtaagcggtcggggcgataaggatatgaataccataatggagtataaaaaaggaacaatctatggataagatacaaaaagcatttaatgataaaaaggcaaatataggctatatagtggctgggtatccaaatttagaatatacaaaagagtttttgaatttactagatgagagttgccttgatattttagagattggaattccatattctgatccgttagctgatggcaaactcatagcaaatgcggcttttgaggcttgccaaaatggagttactacaaatagcgtatttgatatattaaaagagattaaaaccaaaaaagctttagtatttttggtatattataatatcattttaagctacggcgaagatagatttttacaagatagcaaggagtgtggtatcagcggtattttagttcctgatatgccatatgaagagagcaaggaatttgctagtaaatgccaaaaacacggtatctcgctcataagattaatcgcccctacaagtgctaaccgcagtaaagagatcgctagtaatgcagatggctttatctatgctgtaggatctctaggcgtaactggcggagagcaaagctcaattgatagattaaaagatatgattaaatctataaaagatagtagtaaattgccagttgcaattggctttggggttaaaaattctcaagatgtcaaagcgatcaaagagtatgcagatggtgcgatcataggcacaaaaattgtagagataacaagcaaatttgacccacaaaccgctcataaaaagataaaagagttatttgaatagatagcaatttggctaaatttaataatcacaaatttagccaaaaaatttataaataatctcttttaaagttaaattttgtataatactacccaaaacttaaggagattataatgctaaatgctattaattacgctactaaacacttttgcactgatatctttggatataaattagaagagggaaaaagcctaggcaaagacctatatggtgctagtattcctatatacaaagatggcgaagagatccaattttatctatattttaaaaaagagactttagagctttttgtagataagctatttaataaagaagagggtaaaaaaacagatttaggtgatttaagcagagaagttgctaatcaaatcgtaggatatgcaaaaaatctactaaatgataacaataatggaacttataagcttggaacgcctgaatttctaggtaaagttgagagatttccagtcagacttgaaaaatctcaaatatttaaaatgaaaaataaaacatttaaaataggctataaaaaagcatgaatgatgaaggtctaagcccaaatgggctatttcacggctatgatgaactacttgatataggcgtggagtttataagcgatcttggcatgacgacaattagcgtaagggagcttttaaagctagaagttggctccgttatagacctagaaaaaccagccggagagagcgtggagctatttataaacaatagaatatttggtaaaggcgaggtaatggtatatgaaaaaaatctcgccattcgtataaatgagatcttagactcaaaatctgtaatccaatatttcaaaagagagcaattatgaaaatttggcttttaatagcattagcgttaccgctttgggctgtaaatttgcttactcataatatttatcaaagagatgagagaattgatattatgctaagctttgacgcgccatataatggcacgataaagcagcaaaacaacccccaaaccatcaatataatattaagcgatgtaaatacaaaagataaaataaataaagagataaaatccaatatcttacaaaatatcaatatctcttcaattaataacgctacaactctagagctaaaatctcaaaaaccaatatctataatagcctctaaaacaagtgataaatttggacttcgtatccgcataacacctaaggcaaatcagccacaaaactcagttaaaaacacgccaaaagagcagccatcgctatctaatataccgaccaaaaaggataatcaagatagcttatatacaaactatattatagtgattttagtgctttttgcgatgtttgtatttgctatgtatataaaaaccaaatacgctaagaaaaatttaaaatccactaaatcaaacaaagtagatcaaacagcaaagattgagccatttgagttatctactcccaaaaattcattaaatcaaagcggtaatttaagccggaatttagataatgagagcgtagatattatatatgaaaagccactagatacacaaaataaggtagttttactaaactatgaaaatcaaaaatatctagtattagtcggaagctcaaatgtgcttttggataaatttggtgaagagaaaataaagacaaaagatgattttgagctatttttcgaagagaataaacaaaagcttagtggctacttgcaagagcgtaaaaacgctataagtagatacaaagatatgatggataaagagtaaatttaaaataaaggaaaaaaatgagtatcaaaaatttagatgaattaaaaaaatttacaggtgagattcgctccaaagctgggtataaagacccaatggcatttgcaattggtagaagcattaaaggtaaatctggcaagacaattagcgtaaattacgcagttgtaaatatgaatgaaaactacgcaagtgcggctatattgagctgggcaattgagaaaaatgggataaaaatcgataatagcacaagcgaatttgtagcgccaattagctcagctattatagcagatgctctgggtatttttgattttttaattaatgagtgtgaaggcgataagcacaaaaatatccaaaatctactagttatagatgagattttaaatgatgacgaaatggacaatgatgctgagtttgtagttacatttttatatagcgatgaagcgcctaagagcgttgaagctgtctatttgaaactatatcttctatcattaaataaagctgaaattagaagtttaaatctaaatggagcctttgggttattaccaaatttagcttgggatagcgatggaaatccgcatgaattagaccatttaagagagaatgaaatttggcttaaaatgaaaggctggtatccaaatatcattagcgtagataaattcccacgctatctaaaccacataattccaagcgacaacactagaatactagatagctcaaaagttagaatgggagcagttttagcccctggtactaccataatgcctggtgcgtcttatgtcaatttcaactctggaaccactggtgcggtaatggtagagggtagaatatcaagctcggttaaggtaggcgatggaagcgatataggcggtggagctagtattttaggcgtattaagtgggacaaatggcaatccaattagcataggaaaaagatgtttattaggtgctaactcagtaacaggcgtgccacttggcgatgattgtatagtagatgctgggatagctattttagaaggcacaaaagtctatataaatgataaagaagcccttaaaaaggtaaatcctgaatttgagtttgataaagatatttataaagcacttgaactagctaatcttaatggaattcactaccgccaaaatagccaaacaggtcaaatcacggctaatattagcaaaagagctattaaattaaattccgatctacactaagggggcaaaatggttgaaatcaagggcttaactcatcgttttggctcgcaactgctctttgaagatgtgaatttaaagctaaattcgcacaacagatatggtctaatcggagctaatggcgctgggaaatctacatttttaaagattttaagcggtcaaatcgaacacactagcggtgaaatcatcatagaatctaataaaaaaattggcgtcttaggtcaagatcaatttgcttttgaagatttcaccttaaaagacgctgttttgtggggaaataagagattatatgatgcgataaaagagaaagagaagctctatttaagcgaagaattcacagatgagatcaatgaacgccttagcgaacttgagatcatcagtgctgaagaagatccaacctatgagtatgaaactagaatagaaaaaattttaagctcgcttggattgcatgagtatgataagctaatgagccaaatcgaaagtagcgataaagttaaggtattattagctcaagtgctatttcctagacctgatattttatttcttgatgagcctacaaataaccttgatatagatgctattgcttggttagaaagagagctaatcaaccatgaaggcacactagttgtaatcagccacgatagacactttttaaatagggtttgtactcatattttagatgtggattttaggcaaattagggaatttagtggtaactatgatgactggtatatcgcagcaaatttagtagctaaacaagcccagatggagcgtgataaaaagctaaaagagcgtgaagaactagagaaattcatagctagatttagtgccaatgcaagcaaagcaaagcaagccacaagtagagccaaacagcttgagaagctccaaattaatgagatcaaaacatctagtcgccgtgatcctagtattttatttcgaaccaatcgtgatataggcaatgagctaatcgagctaatctcagtaagcaaaaaatttgatgaaaatgtgattttagataattttaattttaaaatgaataagggggataaggtcgctatcatcggcacaaatggcgtaggcaaatccaccttatgtaaaatcataatgggccaactagaagcaagtagcggtaatgtccgtatcggtgctaccatagagctgggctattttgctcaagatagctcaagtaaaatcacaggcaacctaaaattatacgagtggctccaagactccaaaaataaagatctagatgagatacgcaaatgtctaggtagaatgctatttagtggcaccgagcaagaaaaggaagtaggcagtctaagtggtggggaaaagcaccgcttaatgctatcaaaacttatgctacaaagagcaaatttattaatattagatgagccaaataaccatcttgatcttgaagccatcatcgctttgggtgaggcactttataattttagcggtagctgtatctgcgtaagccacgatagagagcttatagatgcatttgctaatagaattttacacctaaaaggcaatgcagagatagtggatttcaaagggacttatgaggagtatagagcgtattgcggattggatgagaaatgatccaaatttggcttaattcaaatttaattagcattgatgatggctctaaccttgctaagcttataaaactacaaggctatgaagagagcagagtcgctgttgaagtagatatgcaaatagtcccaaggagtgcttggggcgaatttagcattaaagatggaatgaaaatcgagattgtagagtttgtcggcggtggctaaaatagcctaaatttatagatattatggtatttgcgatggctttttggggttggtttgtggtataatttgcaacggtcttgtgttgcttcttaatgatgggaatagataagtttcaaaccgagttggtttatggtataatttgcaactaaaactgctgggttactagctctttttacggctcaagtttcaaaccgagttggtttatggtataatttgcaactaatactcttaaaaaggtatcttaatactcttaaaagtttcaaaccgagttggtttatggtataatttgcaacacttccaaatttaacccattttatgggtatttggtagcggtaaaggggtttaaattttccacttttaaaaaaattgctaaaataggcaaatttgtggaaaaatttagatataattcgatttgcaaattatactacaaatcaactctttagcgtttgaaatcacctaaaggtattaatagacctgggcaactgcctttggcaccccaggtagtttatcaaatttatgaccttttagactaaatttatttaaagcatcataagtatttttaaaggttttaaatgcgtgaattatctataaatgtggatatgggagcagcaaataacggcgtatttatagtaaataccgatgaagattctatactttataaaaaagcatttaatctatattttgataaacaattacaattttctaaaagcgatagaacagcgcgccgccatactaggcgcagttatgatagggatagatttattcttaggcttattggcgagattttacctattaaaatgctaaataaagagcaaatagagatgatttatgggctttttaaaaatcgtggctttaattatcataatattgaatttgatgagaatttagatgatgaagtggcggaatttttaagcaaattagatggatatatatttggggctagtaagagcaaggatgaatttgaaaaaatattaaacgaggtggttgtagatcactcaaatagcgaaattttagagatattagatactcaaagctgtattctaaatagcatagataagagcaataaaaatgtattaaaggctagtaagagtatatttagcttaattcaaagtatccgcaatgaaatttctaaaaataataaacaccgcactagctatctaaaagatattaaagatataataaataataaatgcgaatttataactcaaaaaagcgataaatttgataatttaaatgaattttataattttgtaggaaatatctcaaatttgcaaactagagttttgcgaagatattttaactctaaatttaatgctgaatttgatgatgaaaaacttaagataaatttaataagaaatataaactatatggagtatatagataaaaagagcgataaagaaaaaatgctaaatactctaaatcaaaaatctgcattagagtatctaaagagcattgaccctataatcactattccaccatatgaaaatcgtaaaaacaaaaatccacaaaagtgtaatacgctacaaataaatagcgataaaatcactgctaatttgcttagtgctacttataaaattttaaaaagcgatgattttgtgcatatattgcgagatgaaaatggccagatagcaagcgttataaaagattgcgatatagccaaatatctccaaagaatattagatgtatcaaaagatagtctaatggatacaagtctatatccaagaactcttgataataatccaaaaatctttgctgatacatttaggctaaatagcgatgaattaagggaatttaaagattttgctaagcggtattatgatgaagtagataatgctaaaaaggggataatatctgctaatttactaatcccatgtggtaaaaatacacctcataaaaatggaaataagagtgagttagtttcggcactttttggtaggcatattactaatgatgatttggtgaatttagaaaaatttatgctagaaaataagattaagggaaataagagttataaaggattttttgaagatttaaatcaattaaaaaagagctatcaaaatggcttttatcataagctaaatagcgatgaaatcggcgataaagatataaaatccattttagaattatacccaaaagttatccaaaatataagcaatcataatcaaatttttgagtttaaaactccgcttgatcaaaataatctaaacacaaatataaattatttaagtcaattaggcgagataatatatgatgaaaaaaatcgtggttttttaaaaacttgcaaatgtcatacactagaaaatttaattcgctccggctcaaaaacggctatttgtacccgtttgccatctaattcagctaggcttataaatggcaaaattgagatgtatctaaatcgcttagcttacgagattagcactgcgatagagactgaaagcttaaaagatattaagcgtataaatattaatgtagagatgaataaatttagctttgaaaataacgcttatgatttaaaattaataagcaaacgccaaaaaccaaaggatctaatatgtccatattcaggtcaaaagatagatcttactaattgtgaatatgaccatattttaccacgatcaaaggcactatacaactctaaggcaaatcttatttgtagtagctctacagccaacttacaaaaaggcaatcaaaactacaccttagaaaatttacatcaagattacctagagtcaatctataaaattataaaaattaaaaatcttgatgagtttaagcattttatagatgataagataaaaaatatagatataaataaatttacaaattacgataatcttaatagctttgagcaaattgcccttagacatgctctattttacaagggttcaaatagttttaataaagcacttgaaattttaaaattagataggataaaaacgcattctaatggaactcaaaagagatttgtaaatatattaatacaaaagataaaagataggttagctaaactaaatttaagtagcgatatcgaatttagcgttaatttcatcaatgcagaactagtaagtgcaatcagaaatgaattaagcaaagaagataaagagctacaaaaagccaaaattcaagatagtcatagccactgcattgatgctagtatagtattttattacgctaatagcaaacttataaataactcaaaaggtcagcgtgaatttaagtatgattataatcatattaggccagagtatagcaataaaataactatgcaaagtaaaaaatatctagaattaaactctaataaaatagctcgtaaaaagctatttgatgatggtgtgtattcgctagtttatgaaaatactaatatattaaaagataaagaatttaatatcttgcttgatcttgggcttttgcatactaaagaaaatggcaaaaaggttgctataactagtgattttaaatcaggtaaattttatataagcacacataaagtttttgatttattatttaaagcctttaatgatggcgatattaaattattaaataaactcaaatttctagataatcatctatctttttatatacgaaaagatatatttgctattataaaagataaagataaaagtagtatgttttttaccaatgaaaataagctaaaaactccagatgaaaaaataaaaacaaaaaatattgataaattctaccatatcttacaagctaatgaaagcaagattatagagataaaagatggtaaaaacatattaaaacatcaagagataaaagagctgtttaaagagtgtttttataccaaacaagccaaaagaagtagaaacagatctcgtataatctactctttgcctataaaaacaagttctaaatatattataaggaaaaatggcggatatgctggacttagcaattcagatatagctactaaaacatatatagatttagataataaaaatataatcaaaattccattttttagcaaaaatatactgccttgtaaaatagcagatattataaatataattaaattaaaatctaaaaatataaagcaaatttataaacttccaataactaaaaatctcccatcagccatcacaaaacttgagtttataatctctcaagctaatagacacgatatagaggttgaatttgataaaagccaaattggagattataatttacttgaccaaactagtcgtgatgagtttatagataaatatttaaatggtgaatttaaagagctactaggagagccaagagataagaaaataactataattaaagatacaaaagatagtctaataatcgcatactgtgtaaaacaaacatcggctataaataaaaaaataatgatagataatttaatcgatgaaacatctagttcttaatagttttgggctatttttaggattaaaatctcaaagaattataatatatcaaaacaaagagattataaaagagatagcccttaaaacattaaaaactatatctataaattcaaatggcataactatttctagcgatttgatttttgcttgtagtatgcgtggaataaagatattttttcaaaatttcaacacatttagcgctacacatgctctatatgagcacaaaggggtaaatatcttaaagcaacaatttgcctctaaagaaaatgccaaggggttaagtttagccaaagaattaataattggtaagattaaaaatcaacgctcgactattttatatttttctagaaatcaagaatttaggtcaaaagatataactattcaaagcttggataaggcgatcaatatgctaagaaacttacaaataaaagatataaatgaaattttcaccatagaagcaaatgccgctagtagatattttgattttcttaagcttaactcatttttgcctgatagctttgagcatcgcactaaaaaagaaagcacagaaatcacaaatcaagcgttaaattacggctatgccatactgttaaatatagtttataagagtataataaatgctggattaaatccatattttggggttttacacactatgcgaagctccaaaccatctttagcactggatattatggaggagtatagaagttttgtcgtagatagaaatatcatcaaaattcgctcactattaaaaggcgaatttaatatgcaaataaaaaagttagtagcatcaaatatattaaattcactaaacaaaaaattgatatacaaccataaaaagctcaccttagagagcattatccagcgtcaaatttataaaatttcagcatatttttgcggcgatactaggtataaatcttatatatttaggtggtaaatgcgatatttaatctgctatgatatagaagataataaaaaccgaaccaagctttttgagagattaaaggattttaatcttttgcctgtgcaaaaatcagtcttttatggcgagttaagcaaagctgataaaatcgctattaaagcacttttgcatagacattgctcaaagagcgataaggctattataacttctgtaaatttagatatcgatgataccttaggttatagtaaagagtattttaagagtaaatcatatgagattatttagatgattttaataagtcatattcggcaatttatattttgccctagaattttatacttttatacattttgtgatattaagccactatatccagagtatgtcagcctaggcacacaataccataatagacaaaatgagctatttaaaagtagaaaatttcttaaatttaaactaccaattataaaagtatataataatttatatctacaagatttatctatgagcggtatagcagatttagtaatagagtgcaaagatgaaattatagtagcagaatataaaaatcaaaataaacccatattaagcactggagccaaaatgcagctcatagcatactcaatattagccagtaaatatcttaataagccgttttctaaaataatgttgatttgtagcaataatcttaaatttaaaatatttgatattacaaatgatgatttaatcaaatttgataaggttataaacagtattaaaaagatgatagatcaagagatttttccacatagtaatgctagtatagcagcgtgtatacagtgtgaatttaagaactattgcgatgatagagagtagatacctggggtgcagttgcccaggtctattaatacctttatgtgaacgctaaagagttggtttgtagtataatttgcaaagtaggatttatctaaatttttccacaaatttgcctattttagcaattttttaaaagtggagaaattaaacccctttaccgctaccaaatacccataaaataggctaaatttgattcttgccaattataccataaaccaactcggtttgaaactgttgattaataaatccttaaaaattatcaaatgagttttggattggatggtcttttttgataagttcttctatagttgcgtataacttatttgtaaaattatagctaacaaattttcctttggatcgtttttcaataaaatattttttgtattcatctgctgggatatatttgtcattttcatcttttttaactattttattttttactaaaaactcattaaattttttagtatttttcaaatttgggttatcaggatttgattgcctaagcaattcaataaatttttcttttttaattcctgtattctcggtgtatatattttcaatattatttttaaaattatcttcttttgaattacaatacttttgagattttgtcaaacatactttgacaaatttttttgcgtttaatgcacgcattatattttcataactgccgctactcttttcatcccatattacaaaagaataagtgcagtattctgtcatttttatatcttttcgtgttaatttttctatttctgttttatcttgttcttgaatatttactttttttgttttaaaatctggatctaccaaatttcttggttcatcacctatgtagcatactgtgatattatcataattttttctattacaatattcttgaattaatgtatctataccagcagcatctccaaccaaaatttcaaaattattataaattattttatctaaggtttctttagctatatcgggtaatttttttatagatattgacccagaaataaaaactttttcattattcatcttttgctcctagtttttgtaaagcataaagcatacacattattaacttcaccttgtgtataaagtgtttttgtaatttcgtttaaagtagcaccacttctaaacaaatcatcaattagtaaaatttttttatttttatatctcttatcgcatctaaaagcatcttttaaaattctagctctctcatctggatcatctatggattttaattcatcagtattttttatttttttaatatagtcaaaatcaatcgctttattaagcaaataagccactctatcagccaacaaatacaacggctgtatttctctatcttttgaagctggagctggtactataacccatatatatggagcaaccataatcttactatttaaaaaatcaacagcgatggttgctaacttttcagctaattttatcttgtcatcaagagagattaaattattgtattttaaatcgtaaatcatacgacctatttctgtatgtgtagtattataacgcccccccctaaaggctcactacttatagtgtgcaaatctaacgcccatccgcctttctaatttccatttaatgtataatactccataaaatccacccctatttttatgcattgctaatcaggctttattgcttaaaatcttaataatttctaaataaatttaactattttacaattctttaaagtagcaaattcagactattactttaaagaatatatccaacttagttttaaatttatatacaaatctaatttaaaaatttaactcaatatttttaaattcacttcttatcccacgcaagaatggtagcaccgttttgatctactgccacatcgcccattcccattatattatacccagcatctacatagtgaatttcgccagttacaccactagcaaggtcgcttaaaagatacattccacttttacccacatcatctatgctaacatttctttttaatggggcgttgcattcattccagtgtaaaatcatcttaaagtcgcctatcccactagctgctagagttttaatcggaccagctgagatggcatttactctaatatttttagctccaaggtcatgagctaggtagcgaactgaactctcaagagcggctttagctacacccattacattataatgcggcacaaatttagccccaccaagatagctaagagtcaagatagaaccaccctcttttagcaccggtaaaacagccctagtaagactaataagcgaatacacgctagtactcatagccacatcaaaggcctctttggaagtatcgataaactcaccttctaaagcctccttaggagcgtaagccacagcatgaacgataaagtcaatttcgccaaaatcagattttatcttatcagccaaagtatcaaggtgggattgattatttacatcaagctcatataaataagggttttcaagctcagctgcgataggctcaacacgctttttaatagcatcatttaaaaatgtaaatgccaaattcgccccctgatccttacacgcttttgcgataccataggctatactcatcttatttgctacgccaactatcaatccctttttgccttctaatatcattattaatcctttttgataatctctaaaaatttattagcgtcccagctagcagtcccaatcaaaacaccatcgcagttttttatagctttgatatcatctatatttgcgatatttacacttccgccatatagtagtggcgctgtcgttttagtagagataaaatccaaaatttcagctataaactcagccttagcactcttgccagtcccaatagcccaaataggctcataagctactactaaattttcatattctaaatcgatattttcaagctgatcgcataaaaattcttttgtgctaccattcatatgagttatatcatcttcaccaatgcagtagataatatcccagccattttgcttagcaaaatcaaattttgcttttaaaaatggctcatcttcccccaaagcccttctctcgctatgccctattaaaacggtagtgataccaaactcatctagcatatcgctaccgatttcaccggtaaatgagccacttttagctgggtagaaattttgcgctccttgagtgaatttaaacttagtttctaaaaacgcacttgaaggcggaaataccatcacgctttgatcgcttatatttctatctaatacccttgcatactccaaaaaaccacttcttgtgtagttgcattttaaatttgcagcataaatcatagaccatcttctcttaaaagcactctaactccaggcagctccttgccctctataagctcaagactagctccaccaccagtggagataaaggtcatctcatcagtatctccagctctctcgaccacatcggccgtatcgccaccacctactactgtggttgcaaagctctcgccaatagcgtggctcatttttatactacctttgctaaatttatccatctcaaagacccccataggcccattccaccatatggtttgagcatcagcaatagcttctttaaatagcttcacgctagctggcccaatatcaagccccatccagccatttggaatttcttggactgggacatacttgatcgcactatcattgctaaagctttgagctgccaccacatcaactggcaaataaattttaactcctagctcacgaccctttttaaggatatttgccgcttcttctacaagctcctcttccaaaagtgagtttccgatattctcacccaaagcctttaaaaatgtaaatgccataccgccgccgatgatgagcttatcaatgcgtggaagtagattagttagggcttgtagcttaccacttacctttgatccgcctgtaactgcgacaaatggccgacttggatggcggattagattttggccaaattcaatctctttaatcagcaaaaatccagccgctttatgctcgttatcaaaataattagtaatcgaatgcacgctagagtgcgctctgtgacacacgccaaacgcatcattaataaagtaatcagctaactcgctaagagatttagctaaatttgcatcatcttttgtctcgcccttttcaaagcgtaaattttctaataataatatctctccagcttgtaatttttctaccttttctttggcatcatgaccgattacatcatgagcaaatttaatctctctatccatcaatctaccaagtcttttagccactggtagaagtgaatatttctcttcgtagccattttttgggcgtcctaaatgacttgctaaaatcacagagcaaccctggtctagaatatatcttatagttgggataactgagcgaattctcctatcatctgtgatgttattaaattcatccataggagtgttaaaatcacaccttacaagaactttgctaccacttttaaaatcaatatcttttatagaaattatctcactcatatcacttctcacttataaatttagccatctctactaagcggttgctatagccccactcattatcataccacgccattacctttatcatatctccacaaattacttgagtaaggtcagctgcgactatacttgagtagctagaagtgataaaatctccactaaccctctcatcaaaatctactgccataatgccttttaaactacccttactagcctctacaaatgcactatttagctcatcttttgttacatttttctcaagcacagcggtcaaatccacaatcgatacatttggcacaggaactctaacgctttgtccgtgaagtttgccatctaggctaggcattactaacttcatagcctttgctgctcctgtgcttgtagggatcatatttaccgctgctgctctagagcgtctaaaatctctacattttacatctactagactttggccgtttgtgtaggcgtggattgtagtcattaagcccttttttatgccataaagatcttctaatactctagttactggaccaaggcagttggtggtgcaactagcatttgatatgatggtttgaccttcgtatttatctgaatttacacctaaaacaaatgttggagtatcatctttagcaggagcactcataactacttttttagcgcctcttgcgatgtaggcttggcacttctcttttgttagaaatttacctgtgcactctaatactacatctattccacttaaatccatatcatttatatctcgtgtgctataaactctaatttttttaccattaatagcgatatagtcatcatttaagacctctacatcttgattaaattcgccatgaacggtatcatactttagcaaatacctagtcattttacgctcagcagtgtcgttaataatagataattcatactctgctgggttattaagtataatcctagcagcacatctgccaattcttccaaagccattgattgctattttaagtgccatttttatccttttttgggtataattagggcttattttactaaaaaaaaggttaaaaaaaattgaatatagccatttttggtggaagtttcgacccaccgcattttggtcatgatatgattgtaaaatcagcgttaaatagtttaaatattgataaacttatcattattccaacatttctaagcccatttaagagtaaatttagtgcgccgccgcttctaaggcttgagtggtgtaaggatttgtggctaaatttagatagcaaaatcatagtaagcgactatgaaattcgtcaaaacaaagcagtttatactatagatagcgttaaatactttaaagataaattaaacgctaataaaatttatctaataatcggcgctgaccagctagaaaatctgcataaatggcataaatttgatgagcttgataaaattgtaagctttgtagtagctagcagagatgggattgaaattaagccaaatttgcaaaaactggatataaatgttaaaatctcatcttcaaagattaagtccaagctggatttcgaccaaattccaaatactattttagatagtgttaaaaaattttacaaggatacaaatgcaaaatagagtaaatagaattgttaaaatattagatgataaaaaggctgaaaatatcgaaattatagatatgcaaggtagagattatcttagtaaatttgtagttgtagcaaccactttagccccaaggcacggatttgccttgcttgatgatttaaaaagtgagctaaagccagttggggaggagttcttaggtgtagaaagtagcgatgactggatagtaatagacctaggagatataatgatccaccttatgagtgagacttatagagcaaaatacaatatcgaagagttcttaaaagagctaaatataaaatctaagtaaatctagcttaagccaaatagaaattaatctaatttggcttaaattcgcttaattttccattatatctttagcttttatccccattaaatttaacgccactttgatacttagcgctacaacgctaaatagctttaaaagctcattctcattttggctacctacaaccctattttcattatagaatttatgaaaactcgcactaaggaattttagataatctgggattttatgcaaacttctttggtttagtgcatcttctaaaatttcaggcataatcagtgcttcaaatagcagatttttaccctcatcgcttaaatttgctaaagatacattagctacatctgcaggggttttacccgcttttgtaaaaatctgatttattctagcgtgggcgtagttgatataaaatactggatttgagctatcttgcttttttaactcatcaatatcaaactcaaggcttgagctgttagccttagagataaatataaatctcaaagcatcactaccaatctcagctaaaatatcactcatcagcacagaagtcccagctctcttactcattttaaaaggcttaccatcttttaaaaggcttaccatctgcattaaaatcacttcaagcttactctcatcataaccaagaaaatgtatagcagcctttaatctagcgatatagccgtgatggtcagcaccccaaatatttatataagtatcatattcattagaaaatttaatattatgatagattatatcaccagctagatatgtagggcgaccatcacttcgcacgacaaccctatcactatcatcgccaagcttagtagaagcgatataggttgtttcatcttttttatatatttcaccgcttttttctaaacgcttaagagttggctctaactcactataataagatttctcactcgcccaattatcgatagtaatgccagcgtctgctagatctttttttataatctcaagtaccctatccttagcaaattcagctaattcaaggttgcgactggagtcaaaaatatccttaccaaatctctcataagcctccttagctaactcatcaatataatctcccctataatactttggcggatactctacactttcattaaacaaaatttcacgcgccctaagagagatagagataccaagtaggtctatttgattaccagcatcatttatataatactcagtatgcacgcccataccaatatgtctagccactctagctaatgtatcaccataaacagcaccacgcacatggcctatatgcaatggaccagtaggattagcactgatatactctaaaaatatgcttttaggatttttaatctctttagagccaaatttttctccactttgtagtgccttatcagctagggaatttaaaaattcgccacttaatttgaaatttatatatccatttacagcactcacctcataatttggcgaattaaattttttcgccatctcatcagctatagcaactggggactttcttaactcttttgctagactaaaagcaagtggcgtagcatagtgagctaacatcttatcttttggtttttctactataacttcacgccctaaaatggtgcttatctcgctttttagcgtatctttggcactcattaggcactcttttgagactcatcttttttggcttgagttgtctcttcgctcttttgaatttgctctaatggcgtatcatcttccatctcttttttgaagctttttatccctttacccatgccttttgctagttctggaattttctttgcaccaaataata

SEQ ID NO: 110 - DNA, 23747 bp, synthetic construct
  source 1..23747: mol_type = other DNA
  misc_feature 1..23747: note = Synthetic
ggaatttagctttttaggctttttgccaaatactagcagagatagggatttagccttacaaaatgctctaaattcgccatatccggtggtgatatatgagtctccaaagcgaattttgaatctaataaaagatatagcaaaattagaaccaactagagagatttttgctatcaaagaggcgacaaaaaaatttgaaaccaaatttaaaaatagcgcacaaaatttagttttgagcttacaaaatgcaaacttgaaaggcgagtggtgcgtagtagtcgctgctacaaataacataaaccaagaaaaaatcactatagatgatataaatgagttagatattgcgccaaagcaaaaggcgaaattgctaagcaaattaacaggcaaaagcgtaaaagagatatacaataaactaagtaatagagataaaaatatataaatttaataatgaaaattaattaaatttcaattttcttttcaaaaataagctaaaatttaagggcttttagataccataatcgctatgattgtctatggaaaacagctatttttacatttgttaaaacaccacaaagataagtttgaagagatatatctagcaaaagaggttaataaagatatatttcaccaaatagcaaaagttggcttgaaaattcaaaaagttgataaccaaaaagctcaagctctcgctcgtggcggtaatcatcaaggctttttagccaaggttaaggattatgaatttgccactttaagcgagattaaaaaggctgattatttggtgattttatatggtttaagcgatgtgggaaatatcggtgcgatagttagaactgcgtatgctttgggtgctggcggtgtggtcatagtgggtaaaaatgagaatttagcgatacaaggcatcatccgatctagcagcggtgcagcgtatgagttgccaatcgctctttgtagtgatgggctgggtttgataaatgagctaagacaagttggatttaaaatttatgctgcaaatgccggtggcaagagtgttaaggattttaaatttgatcctaagagcgttataattatgggtagcgaaggtgaaggaataccaaataaggtattacaaaagtgtgatgagatcctaggcgttaatatgcgtaaggattgggatagcttaaatgtcagcgtggcatttggaatattatttgataggattataaatggctaatggtatagaaaaacttttagaaatggatcttaaagaggtcacaaaacgcacacacatagagactgagtatttagagtatatgtgtgagaaaaattacgaaaaacttcgcaaattaaatgcttctggctttgctaagatcttaagccgtgagtatgatttggatcttcaaggatggatagatgagtataacgaatattgtaaggaaaatggcagttgcgataactcaaatttcacagtagcgcctaagatcccagcatatacaccaaaaagcgataatagcagggctttgagcgttatgttgatattagttttgatagtggtggctatcgtttgggttgttaaatttacagatatcttagactcgatagaattaccaaatttcgataaaaatcaaagcgtagcatactctagcgcttcagtggtggaatcagctaaggagaatttacagaccacagcaaatagtgtaactccgcttcaaatagatgaaaatatcagtagtgaaagcaatgaaaccacagctacaaaggaagataacgagacgctagagtcaaatttaaccatcgcaagcgtagagatccaagccccgataatgatagaaaatagcgataaaattgccaaaatcattccaaataaaaccatctggatagggataaaaaacctagatggcacaaacaaaaaatcatacaccacaaaaaacgccatagatctgaatttaagtatagaccaactcatccaaacaggccatggcgagatagttttagaacaatacggggagaaaaagaaatttgaatttcaaaagcctttgagatttgtagttgaaaatggagtgataaaagagattgattatgctgagtttgtcaaattaaacaagggtgctcaatggtaagggtaatcgctctttattttatccttattttaagctcttttggagccgatctacacagcaatatcaaaagcattatttcagagcaaatgtatgcccaaaatatagataaaatagagaatatatttgttaatcaatctgaatttatagacaataatggaaatttaaattatcctaaaatcataaatactctaagagtaaattcgcttttaaatcttacctactctatgcctgtaaatttagaaatttcattttatagcccaagctccgatattttgatgtttaagagcgtatctgaagctttaaaaagcattggttactcatattttttaagcaaatctttaaagagtgataccgaggggataatttggcaaatctctatgagctcacgatttgtccttgatccggggattttgtatagagaattgatgaaaaacaatatatttatcaaagatatcaagcgtgatgggcagtttagctttacttatagtatagatgcttcaagagctgtattatctacgcatagatatattagcgatgtagaatttgagttacctagaccattagagccatattttttaaatatcaacgacaagagccaagccttgataaaaagccacccatcagatagctggatatgctctataaaggtgcttgatagggatttgaatttaataacacagattaaatcagataaaccagaaaaggagatttatatcaaatttccaccaaattcatactatatgcttatagatgatgcttttagtttagaaaacattaaacgaggtttaaaaatatatatacaatcaaattaaggagttatttatgtttgatgagattagatttaataccatcgagagattgcctaattacgcctttgccgaggtaaatgcgatcaagatggcagcccgtagagatggtgctgatattatagatttttctatgggaaatccagatggtagaacaccacaacacataatagacaagctatgcgaaagtgcgatgaaagacaaaactcacggctatagcgtttctcaaggcatttataaacttcgtgttgccatttgtaattggtataaaagaaaatatggtgtaatcttagaccctgagacagaagccgtagccactatgggtagcaaagagggctttgtccatctagtacaagccatcacaaatcccggcgatgtcgctatagtgcctgatccggcttatcctatccatactcaagcatttatcatagcaggtggcaatgtaactaaaatgcctttaatctataatataaattatgaattagatgagaataaattttttgaaaatttagaaattgctataaaagacagcatcccaaaaccaaaatatgtagtggtaaatttcccgcataatccaactaccgtaacatgccaaaagagcttttatgaaagattagttgataccgcaaagcgtgagagattttatatcattagcgatatagcttatgccgagcttacatttgatggatataagaccccaagtatatttgaagtcgatggggccaaagatgtcgcagtagagtgctacacactatctaaatcatacaatatggccggttggcgtgtaggatttatatgtggtaataaaaaattagtagctgcactcaaaaagataaaatcgtggtttgactatggtatgtttaccccaatccaagtagcagccaccgtagcactagatggagatcaagattgcgttgagcagattagacagacttatgaaaaacgcagagatatactcatagaagcttttagtgcggctggttgggagatagcaaagccaagggctagtatgtttgcgtgggcgaagttgccaccacaagtaggaaatataggaagtaaagaattcgctaaacaactcctaaccaaagcctgtgtcgccgtgagccctggttctggatttggtgtggctggtgatgactatgtaagaatcgcattcatagaaaacgaaaatagaattcgccaagcagctagaaatattaaaaaatatttaaaagaaattcaatgagagtagcgattttaggttttgggacagtaggaagtgaagttgctaatgtccttatcaaaaatagcgatttgatcgcttctagggccggtgtaagcatagagcctgtaattggtgtagtaagagatttatccaaacacaaaaatcctataataccgctaagtgatgatatacaaagtgttattaatagagatgatattgatgtttttgtggaacttatgggcgggatcgataaaccttatgagataataagtcaaattctaaaacgcaaaaaagcagtagtaacggcaaataaagccctcttagcatatcacagaaatgagcttgaagccttagctggagatactgcatttggttatgaggctagtgtggctggcggaattccaataatcaaagctctaagagagggcttaagcgctaatcatattcaaaaaattatcgggataatgaacggcactagtaactatattttaagtagtatgatgagtagcggagctaaatttaacgaagtgctcaaaaaagcacaagatctaggatacgccgaggctgatccgacctttgatatcgggggatttgatacggctcataaattgctaattctagctagtatcgcttattgtgtgcatgccaaacctgaagatatcatgatagaaggcattagtcaaatcagtagcgaagatatatattttgctaatgaatttgagtattctattaaacttttagcgattgctaagcgtggcgagggaacactggagctaagagtccatccggcgtttattagcaaagataagatgttagcaaatgtaaatggcgttatgaatgctgtaagtgtagtaggtgatgctgtaggtgagagtttgttttatggggctggagccggtgggagcgccacggcaagtgctgttataagcgatcttatagatatcgctagagagattagaaatcctatgcttggctacaaaatgcctttggaatcggctagacttaggttattaaaaccaagcgagattaaaactaagtattatttaaggttaaaagtcgctgatgaggtgggagtactagccaaaattacaaatttaatgagccaaaataacctttctatagatagctttttacaaaaagcaaaaagcaaagatgaagagtatgctactttgttttttactactcatacttgcctagaggctgatatgctaagagttattagcgatttaaaaaatgagagttttatcaaagctgagccatttatgattagaattgagagctaatttgggcttaaaagagtatctctttgggcatgcagctgagaaaaaagcagccaaatatctagctaccaaaggctataaaattttaggattaaactacaaaaccaaatttggagagattgatatcattgctactagcagatcaactcttcattttatagaggtcaaagcctctgcaaaagattatgagaccatatatagagttacaaaatccaaattagaaaaaatcataaaagctattgatttttatattttaagcaccggtttggatatgccatatcagattgatttagtctgtataaatggcgatgagattgagctagtagaaaatatatcatattgataaatttttatattatgttatttaaaatttaacaattaataaaatttattaacttttatattttataatactcttgatttgatgaagtttgagttagataaaattataattgttagttttaatttaacttttttaatgtataattttattataaaccacaaaggagataaaatgggtaaatatattgaattaactgctgaaaatttcaatatcgctaaagagggtgttgctttagtagatttttgggcgccatggtgcggaccatgtagaatgctagctccagttattgatgagttggctgaagagttcgatggtaaagctaaaatctgtaaagtaaatacagatgaagttcaagatctagctgtagaatacggcgttcgctctattcctactttgctatttttcaaagacggcgagatcaaagagacattaataggcgctcaatctaaaactgcaatcgcagaaaaacttaactcacttttataattcaaacggggctttgccccgactcacttcatttcaaatcaatttttaagttaaatttatttttatgtaatatatctgtaatattgtatagatataaatttaaaattaggagactataatgttagatgtagctataataggtggtggtccagctggtcttagtgcggggctttatgctactcgtggcgggttaaaaaatgttgtaatgtttgaaaagggtatgcctggtggtcaaatcactagtagctctgaaatggagaattatcctggtgtcgctactgttatggatggtatgagttttatgagcccgtggcttgaacaatgcactagatttggtctaaaacacgaaatggcggccgtagaaaaagtatctaaaaatagcgatggcagctttactatcactttagaaggtggtaaaactgaacaagcaaaagctgtaattgtgtgtacaggctcaaccccaaaaagagctggctttaaaggtgaagatgaattcttcggtaaaggtgttagcacttgcgctacatgcgatggatttttttataaaaataaagaagtagctgttttaggtggtggtgatacggctatcgaagaggctgaatatctaactagaatttgctcaaaagtatatctaattcaccgccgtgatacatttagagctgctccaagctcggttgaaaaagttaagaaaaatgagaaaattgagctaattttaaatgctactatagatgaagtctatggtgatagcgctgctggtgtaaaaggggtgaaagtcaaattagcagatggaagcataagagatttagcagtgcctggtatatttacatttgtgggtctaaatgtaagaaacgaagtgctaaaagatggagataaattcatttgcgatatattgccatcaggtcaagtaaaagttgatttaaaaatgcaaacttcaactccaggtttatttgccgcaggagatttaagacaagatgcgcctaagcaagtagtcagtgccgccgcagatggcgctgtagccgcacttagtgcgatgagttatatcgagagcttacactaatattttagccacttgttaatccaagtggctctttaaattcacaatccaagattaattatcattgtaaaaagcaaatttatcgctataatgagtatggtgaaatattgattgtttaataaattatctttaaatataaattttggtttgaatttaataatacattcaaaccaaaattgtgaagtttagcttaattaggatttacagtatctttatacatagccttgccgctagcgatctcttttatgacgatagaacgctctgcgttgccctttttgtctatatttatgatacctgaaacgccctcaaaatttttagtgtttttaatctctttattaatgcactccttatcagtggcatcagcgcaacgattcattgcatctatcatcaaatagtatgaatccgctccaagagcgctaaatccaggtacattaccatttccgtttgctttggtgtatgcttctataaaggcttttgatttggctgttggtggatttgagctatcaaaagcatcagtatataaatatccattagatgcatctccggctagctctataaatgtatcattgctcacaccatcgccactagcaaattgcgatttaacgcctatttgcctagcttgacgcactaatagcgcagcctctggatgataaaacggcatatataccaaatcaggatttaggctattgatttgcgagactatagctttgaaatctttatcgccactacttatttttagctcttttagaattttgccaccttgtttttcaaactcttttttaaatgctctagctaggcctattgagtatgaagtggattgatctattatcaagatagcatttttcatatcttgttttattgcccacgaagcaaagcttgtcccttgaaatgaatccataaaagtaactctagcaccatattttgatctatctagtagcttatcagcagtggcggctggagcgatcgtcgggacctttttttcgtctgcgatttgtaatacttgttgagtatttccagttaccatagcgccgattaatccgcttactttatcttcgctaactaaccttgtagtggctgtggcggtttctaccttatcgcctttattatccactaataccaaactgattttatcgccatttttgagtgttggctctagttgattagctagtttgatcccagcccacgcagtctgaccatacgcagcgacagatccagtgataggcattatcacgccgattttgatctctttagcagccgctgagcttatagctattgccgcagccaaagcaattaatgaaatttttttcatctttatcctttgtgttgagtttattctaaataactaccttgtttagtcggagtggttctcatctcgccactatcactatcatcatctacgataaaagcgttatcgccttttaaatacgctattatgtgtcctagatctcttaaatttaattttgtggctatcggtgccattaggtattttaaattcccgccatattgggcatcacccctatatccagctatagaatcagctatctcatcgccactcatatcgcttaatctctcagagactcccatagcttttttacttcctttgtcgccgtggcaagacttacactgcttgtcatataactctttgcctttagagctattataattggctcttttatctacaccgatatttagaaatctaccggtttcataatcctctgttgaatctgatttttcgtatattttcacacttagattattatctttggcgtgtttttctactaaatttttcagctctttaccaaactcaccatcagcttctattatgtagctatcttgcccccaagctaacataggaatgatagatagatatattaaatttgaaatcttcatttatatccttattttaaatagacttaattatatataaaaatattttaatgcgagtttaaaaaatatagattgttataataaattattctgaaaaaataattataaaatagaataatattaataaatattctgaatatttaataatattatagattattattttttattgtcaaaactttaagctactttttatttaatgtttttctattttatatatcttatttaaaattttttaaaaaggatatataaaatgtatttaagtgaaatattagataaggattacggcacaaagctatagtagtggctatgagctcatatcgataaccaaagaagtgtatgataaattaaacccaaatgatagacactatgagacaaaaagctactcatatgagtgcggtggtgagagatcgagaacttgttatacgacagaagagtattattataaaaaaatagtaattccaaaaacttgttggagctactaaaatttaagataaaataatagaagccatagggggtgtatttccccactttcgtggggcaagacttaataagccttgacaacaattatacaaagtagtataattaccgtaaatacattaagcatttattctactctcctttctatggagacagaatttgccataggggtaccagccctatggcatatccccataacgaaattatatcattataaacttctaatttatcttaaatttttagtctattttaagccacaaaatatgattaatggatgaaaatatctaatcaaatttagtatatttttgataaaatagcaacaagagtgcttaattatttagtaaaataggtttaaaaaggggagagtatgaaatctttatcaataaatatagatatgggcgctataaataatggtatatttatagccacttgtcaagatgataaaataatagataaaaatgcttttgatataaaatttgataaaggcaaattaaacttttcaaaaatcgacagaacccttagaaggcacactaggcggtcatttgatagagatagatttgttttaaggcttttaggcgagattttgccgttagaacatttaagtaataaccaaaaagaaaagctatttgggctttttaaaaatcgtggatttaactatctaaatgtaaattttaacacagagattgatagtgatagcttagagattttaaatgccttggatggatattattttaaagattgtagtgttttgaatgattttgaaaatagtataagtaagatttttaacgagcttgaaaataatgaaattttagcttttttagatgatcaagtgcaaattctaaatcaagcaaaagagcataaaaataaaatcttaaataaaaatattaacgcaattttggagtttttagaaagtataaaaaatgaaagttttaaaaacaacaaacacagaaaaagctatctaaaagatattaaaaacgagatagaaaattcatttaaagatataattctaaaactaaaaatctttaaaaattctcaagaattctactattttataggcaatatagccaattttcaaactagaattttaaggcgatattttaatgctaaatttgatttagtctttgatgatgctaagctaaaaaagaatatattaagaaatataaattatttagattttataagcactgatgagaaggctaataaaagcaagattttagaaaatttaaatgctttttcggctttggaatttttaaaaaatacagagcctataataactatcccaccttatgaaaacgccaaaaacaaaaaacctcaatcttgccaagcccttgtaataaatgatgaaaaaatcaccccaagtctaaaggatatagcgcgcaaaattttatcaaatagcaatttcgaacgcttaaaaactgatgaaaatggcgttttagcagataatatcaaagataatgaaatagctaaatatttacagagaattttagatatttcaaagggaattttagatgataaagagctttatccaaggcttttaggaaaagatgaaaatgctaaaatttttgcccaagagattagactaaatagcacagagctaaaagagtttaaagattttgctaaaaaatattatgatgaagtaaatttagctaaaaagggcataataaaaaacgagcttttaaagccttgttgcttacacactccgcacaaaaataagaataaaaacgctctaatttcggctctatttctaaaatcaatcacgcaaaaagagatagaaaatttagaagattttttcgctaataataaaataagtggcaatcaaactttcaaaggattttttgagcgactaagcgaactaaaaaagagatatcaaaatagatttttccatattttagagcatgaaccaaccaaagagcttgaagggattttgaaaaattataaaaaagttatggaaaaaatagtagaacacaactcaaattttagctttaaagcgccttttgatactagcacgataagcacaaatttcaactacctaactcagcttggtgatataatatttgatgaaaaaagccgtggttttgctaaaacttgtaaatttcacacacttgaaaatctcatacgatcaagtgctaaatcagccatcgcatcacgcttagcttcaaattcagcaaggctaataaatggcaaaatagagatgtatttagatcgcttagctcatgaaattatcaaaaaaattgattttacagatatttataatatacagataaatgtagagatgaataaatttaactttgagtcaaacctaagcaaactaggacttgccaaggagagacaaaaggatgaagagagctttatttgcccatattctggtgctaaaatcagccaaacaaattgcgaatacgaccatattttgccacgctcaaaagggctatataactcactagcaaatttaatcccaacaagctctactagcaatcaaataaaaagcaacacaaaatatttattaagcaatttagatgaaaattatctaaaatatatttttgctaaaacacaaaccactgatttaaattcatttaaaacttttatcgatgaaaatatcagcaaaattgatgaaaatgactttacaaattttaaaaatcttagcttttttgagcaaatcgcatttagacatgcgctctttttagatacagatgataatagctttaaaaaagcgctaagacttttaaagctagataccataaaaacgcactcaaacggcactcaaaaacgatttataaatatattcattgaaaaaatttcaaagcttacacagagtggaatcgatctaaatttcatagactcaaagctagtaagctctactagaaaagatctagcacaaaatgatacaagcatagcaaaacaagagatccaagatagccatagccactgcgtggatgctagcattgttttttatctagcaaatagcaaaataattaaaggccaaatagagccagattatgattattttaaagatatttatccaaaagatagcgatataattttgccgcaaagtaagcaatatttagagcttaatcaaaaaagccaaaaaagcaaaaagctctttgatgatagtgtttattctttggtttatgagggtaaatttgatgaaaaacaaaagaaaattctaactcaatatgagcttttaaaagaaaatggctttgtagatactcacaaggtttttgagctgatttttaaatcttttaaagataaagatacaatcgttctaaaagatctaaaattcctagacaatcacttgaaaagttatatccgcaaggatatcttttctatattttttaacgaaaaaggtgagttaaaagaggcaaaagagcttaaatccgccaccaaaaatatagataaattttacaccattttatctcaaaatcaagataaaatctatacaatcaagttagatgaaaaagccaaagagaagaaaactctacaaagaaataaagtaatagagctctataaagagatattttatactaaaaacgccaagccaagggcaaggggcaaaaatagagttactttctcactacctgtttatgccaaagatgctaaatacgctattaagcgaaattctggttttgctggactaaaaaataaagatatagctacaaaaacttatatcgatattgatagtagagaaattttaaaaattccatattacagcacaaatgttttgccaattagaattagtgatattttggtaattttaagcctacaaagcaaaaacgccaagcaaatttataaaataaaaatccaagacaatctccctaaacaaatagtctcgctagattttatccttagccaagcaaacagacacgaagtgctagtaagctttgataaaagtaagctagaaattcaaaatatcaacgacgataatgatgaaaatgcctttatccaaaaatatttatgtgatgattttaaggagtttttaggcaaaccagaaaataataagattgaaattataaaaaatagcgatgatattttggctataaaataccgtgtagataggacttcaaaggcaaataaagagattatagtaaaagctctaagcgatgaagcacctagtgcttaatagctttgggctatttttggggctaaaatctcagcgtttagtagtttataaaaatagagaaatcatcaaagagatagccctaaaatcgctcaaaaccatttctataaactcaaatggaattaatatttcaagtgatttagtctttgcttgttctatccgtggtataaagatattttattctaattttactaatttttcagccactcatacactttatgagcataaaggtgtaaatgtgctaaaagagcagtttgctagtgcgacaaatggcaaagatatactcttagcaaaagagcttatcataggaaaaattaaaaatcaacgctctactattttatatttttctaggaattttaccgccaagcaaaaagaaaatatcttagcaaattttcaaaaagccctacaaatactaaaaaatgaaaatcttaataaagatgagatttttggtatagaaggcagcgtagcaaatgcgtattttgagtatctaaaacaaaatggattatttactgatagttttgagataagaaccaaaagaaatagtacagaaataaccaaccaagcgctaaattacggctatgctatattgctaaattttgtctataaaagcataatcaatgccgggcttaatccatattttggagtgcttcactctatgcgcagctcaaaaccatctttagcacttgatattatggaagaatatcgcagttttgtagtagatagaaatattatcaaacttcgctcatctctaaaaaatagcttagaacaagacgataagagactaattgcttcaaatattcttaacacaatgagaaaaaagcttatctataatcatagaaaacttacattagaaagcattatccaaaggcaaatttataaaatttcagctttcttttgtgataataaaaaatataaatcatatatttttaggtggtaaaatggattatttgatagcttatgatatagaagataataaaaatcgctcaaaagtttttgaaatgttgaaagattttgggctaagagctgttcaaaagtcagtatttttcggcgagcttagcaatgctgaaaaaattgaaataaaaatatttttatcaaaatattgtgataaaaatgataaagttattataactaaatttgatttaaaatttgaagatctaatcggctatgaaaaaagcgattttgaaaaactcgaattccatattatttaagcatccaaaatgattttagtaagtcatattagagaatttatattttgtccaagaattttttattattacaatttttgtaatattgtgccaaaatatcaagagtatgtaaaacatggtagcgagtttcacgcttatcaagatgagttatttaaaagcagaaaattccttaaattcagacttaattttaaaaaagctcataaaaatttatatttagaaaatgaaaaattttgcggagttttggatttggtctttgaatgtgacgatgagataatagtagtagagtttaaaaaccaatcaaagccaattttaagcaagggcgcaaaaatgcagcttatagcatattctaaacttgctagcaaatattttaaaaagccttttcatagggtgattttatgctactcaaataatctaaaatttaaaatctttgaaatttataaagaggatttagcttattttgataaaacactaacgcaaattcaagatctattaaaaaaaggatatttcccccaaagctcagctagcattacagcttgtgcgcaatgtgagtttaaaaattattgtgatgatagagaataaccgggggtgccaaaggcagttgccctgatatgaaaacaccttgtggtgatttcaaacgctataagctagattatggtataatttgcgcttgaattataacatatttttccacaaattcgccactttttgcgatttttttctaagtggaaaaaattttacaattaactaagcacaaaatccctaaaacagggcattttgtgcggagttgcaaattataccacaatccaacttggtttgaaacatatgataaaaaaatgtatagaagaagttgatgttgctgttgcaaattataccacaatccaacttggtttgaaactagtatatactaccaaatatctaagcattttttatacagttgcaaattataccacaatccaacttggtttgaaacttctgcccattgattataaggactgtattgagatgttgcaaattataccacaatccaacttggtttgaaacttcatagccatatgtagccacattagcacacatatgttgcaaattataccacaatccaacttggtttgaaacaaatcccaatgtatcacaaagagagacgctaatagctgttgcaaattataccacaatccaacttggtttgaaacgctcttcgccaccatctgcgaaagctcttatcatagttgcaaattataccacaatccaacttggtttgaaacatttggaaagtggcatgtctactggcgtggttaatctgttgcaaattataccacaatccaacttggtttgaaacaaccctaatttatttatacgcccagttgcggattttgttgcaaattataccacaatccaacttggtttgaaacagatgatttaaggtgctagagccaaaaaggctctgttgcaaattataccacaatccaacttggtttgaaacgtattttatcagcacttagcccgcaagttatagaagttgcaaattataccacaatccaacttggtttgaaactagccagatacatttcttccgcccactgattataagttgcaaattataccacaatccaacttggtttgaaacatctttatagctaaacttgcttaatttgctatctttggttgcaaattataccacaatccaacttggtttgaaactagaagtgtgggactatgtgctagaaaaatatgttgcaaattataccacaatccaacttggtttgaaacaagctaacacaataacgcaaatcgttactaatattgagttgcaaattataccacaatccaacttggtttgaaacatgttttgtaagatattttgagtatctcttgtgctgttgcaaattataccacaatccaacttggtttgaaacttggctctatatcttgctttaattcagataatagatgttgcaaattataccacaatccaacttggtttgaaacatacagccaaacgacttttaggagcgtgggtatcgttgttgcaaattataccacaatccaacttggtttgaaacaagaagccttaacgatttttaaaaatccagagctaaaggttgcaaattataccacaatccaacttggtttgaaacataacataaaaaagggctgtttattgtaacatttctgttgcaaattataccacaatccaacttggtttgaaactatgctccagtttttctaatgctcggtaatacttcagttgcaaattataccacaatccaacttggtttgaaacataaactatgacgagcttataaaagcgtttgaaaagttgcaaattataccacaatccaacttggtttgaaaccagagataaaagcattaaagcaagaaaacacgcaatgttgcaaattataccacaatccaacttggtttgaaacattccaaatccttctcgatctgggtcagttgcgatgttgcaaattataccacaatccaacttggtttgaaactacaaatatcgcttaaacaaaataaaggttcattatctgttgcaaattataccacaatccaacttggtttgaaacgcaaaatcagatattcgctctctagcttttgcggttgcaaattataccacaatccaacttggtttgaaacacaaatacaaaaattttacaaacactcaagactttataaatgcttttagaattgtgcttacaaaaaaggggagcaaatagagctattttatgatgagattgccccagaattaggtatagcggctaattttgatgatatagatttagtaaatgcttcgttatataaaatttatcaaagtgatgagctcgagctgataagtttaagagagagatgattttaatgcgtatctctacacaatattataaatattttgagcgtgataatgtagagaagtttttaaacaatttttaggagagtaaaatggaaatattaactcaagctataaataatagaattatttaaaaatatcaaaaattaaaaaaaatttttagatttataaataattattatgataatgtattattgctattaatcatctccccaaataaatctctttatctttaacttcattttctcttattttagatttagagtaagagaagttttctctctcttataacgctatctttatctagtaaatttacagcctttttatactctttatatatgaagctatctctatctatattgttacctttttcttttactattttttcaatgcttttcaaatctttcatctattaaattggataaaaattctttatttttttctaattgttttagatagttagagtattcttcaaaattcatatccgattgttttaatatgtgtatgcttttatctaagctatcaagctttttagatagattaaatatattgtttttatcattgccaaataccttggcataagctaaagagctatctatactaattttagcattttcatcaagcagttttttagtaacttcaatggagtttttaactctaatgtatgtctcataatcgcctttgctagttaatccttttgagtggagttttttaaagttgtaaaaatgccttttggatttgggtgaaattggttaaatttggtattgagttaaatgctgattagatagttggtattttatatcgcataatttggctatatctttatcgtgcgttactaagaccaaagcagcgttattggttttgacatagtcaaagattacgctcatgacctctttagcagtgatttgatctaggtttccagtcggctcatcagcaaaaataattttaggatttttggctaatactctagctatactaactctttgctgttggccgccgctaagttcgccgattttttgatttattacattgtcgatttttaatgctttaaggaggtttaaattaattttttgaccgcttaatatagtggcgagttcgatattttcaaagccattaaatcctttaaatagataatgtgcttgaaaaataatcccaaaatcatatctgcgaatttttaaaagttcatcactatttagcttataaagtgatttatcattatatataacttcgccatcagtaggcgataaaagtgtagataaaatgtgtaaaattgtggattttccgctaccactaacacccataatagcagtagtagtagcgggtctgatatctaaatttatatcgttaaagagcaaatagtcaaatttatgagataaatttaacgcctttaacattattaagccatttgagcagctacttcagcagcaaaatcctcagtctttttctctaagccttcgccaacttcgaatcttacatagcttacaatttctatttcgccaccaagttttttagcctcttcagctattacttgctcaatagtttttttgtcatccattacatagaattgccctaaaagagtaagtcgttggtcaagttgagtattgtcagctatgtatctctctatttgacctggaaggattttatcccatatagcttcaggtttgccttgttttcttagctcctcttttaatttttcagttgctttggctatcacttcatcacttaattgtgctctactagcaaattcaggcattttgtgaagtggttttttaaggcggactagctcttcattctctttttcaagctcacctttaagagctagatactctttttctacaaaatctgggctaaactctttatagcttataacttgaggtttcatagccgctgcgtgcatacaaagatttcttaaaaaatcgccaattttgctagctgtcgcttcagagtcgcaagcagcaccgatcaaaacaccaacacggctatttgagtgaatatatccagctacaattccatttttgctagctttaatggtttcaaatcttcttacaactaaattttcaccaatagtagcgatttggctttggaaaaactcttcaaatttaaccccgccaatgcttgactctttaagctcatcaattgtggtgattgcgttagtttggacatgtagagttgtatttttaaccaaatcaacaaatgtagcatttttagccacaaaatcagtttcagagttaatttctgttatggtagctgttttattatcgctacttacaactacgcttacaagaccttcgctagctaagcgatcagcttttttagcagctttgccaagacctttttctcttagtatatcaactgctttttgcatatctccattagcttcttgaagagcctttttacaatccatcattccagctccagtgttttcacggagctcttttaccatatttgcgctaatttccattactcttcctcgccttcagccatagcttcttctaatatttcatctttttcttcttgagttggagcttctatctcttcgcttatttcgccatcttgatctctcaaagctttgccctcattgatcgcttcagccatctcttggcagaatagctgaacgcttctgatagcgtcatcattgcctggaattgggtagtcaatgatatctggatcgcagtttgtatctataggagccactactggtattttaagtttgttagcttctgctactgcgattctctcttttactgtgtcaattacaaatatcatatcagggagtgtttttatatttctgataccgcctagagttgctattaacttctcttttttgcgtcttagcattaaagcttcttttttggtaagtaaatttatagagccgtcttcttccatagcttctataacttcaagttttctaattgattgtctaatagtcccaaaattcgtcatcataccgccaagccatctgtgatttacatatggcataccgcatttttctgcgtactctttgatagctacgccggcttgttttttagtaccgacaaatagtattgttttgccttcagctgcggcgtctcttactatattataagtatatctgaaatatctaatagttttttgtaaatctattatataaataccttttctctcaccaaaaatgaattttttcatctttggattccagcgtcttgtttggtgaccaaaatgcacaccgcactctagtaaatctctcatagtaaccatgagtttctccttaaaaaattttgattagtttattcctctatgctccttaacagcgacattaactgcaactaaacaaggattagcatatgtgaaatgaagtgcgaattgtagctaaatttaacttattttttgctttatttgctaagttgaaatttctctttaatactttgaagtgaagagaaaatttctgcgattttttctaggtcgctactttctatttcaaatttttttgggcgaaaaaatagctccaaaagtgtcaaattctctccaaattccaatccataattcctagcattttgtgagatttttaaaagctcgatatcggtgaatttctcatacataatttatccttttaacattataaaaccagtaaatctaccagttaaaccgctcttgcgatatgagtaaaatctatcatcgcagtggctacaaatatcgctaaattcataatctttgacaccgataccatcaagctcaaatcgcaaagccccatctaaatcaaatttaaaaccatctttaaatttattaaattcccccaaattcaaatccccaatttcgtagcaatcttttttgatatttgggccaattatagccttgatattttcaggatttgagcccattttatctattgttttggttatgatttttgagatcgctccggctctaccagcatggataactgatattaaatttagctttttatcatataaaagcacaggcgaacaatcagctaccataacacatagcccaacttgggttaaattagtaaaaatcgcatcgcaaggctctaaaatttggttaatattgcttaaattttggactatattagagtgaatttgttccatgaaaattaattttttggctttgattttgtgagctaaaatttctctattttgctctacttttagcttatcatcacccacatgataggctaaattcaagctctcataaacacccttgctcacaccaccaaatttggttgtaaaaccagcaataaccttatcattatcaatagatactagcataaaaatcagcctgttgccaagtgagagtttggttttttgagtttaaaattttatcaatataacgagccaaaatatcgctttctatatggactcttctgcctatttgaaactcaccaaatagcgtgtctttcatgcttataggtatcaaggttagacgcattaaatttgagttgatatcattgattgttaggctcacgccctcaactgcgatggcaccttttttggctattagatgtaaaatttcatttggtaattctatgataaaatccaccccacttgctagtctcttaatatctctaataaccccaatagcatctatatgcccttgaatcaaatgcccatctatcctatcgccaattttcatagctggttctatatggactctgtttttgtaattttccaaagccaatatctggctactttcgctgcttaattctactacaaatccatctttatcaatctttgttacgctcaaacaagccccatttaccgctatgctatcacctaaatttggcttatgagtagccttgatacttagatttttaccatcaaaactacgcacaacaccaatctcacgaatcagtccattaaacataatcacctcaaattcgaattgagaaattataatctaaatttataaatcttttactataaattagataaaatcgcccctaaaaatcacaaggcaaattatggaatatgatgttatcgtagttggtggcgggcatgccgggatcgaggcctcactcgcagcagctaaaatgggagccaaaactctattaatcacaattttagccgagcaaatcggtgcagctagctgtaatcccgcaattggcggattagccaaggggcatttagtcaaggagattgacgctttaggtggtcaaatggggcttacgactgatgagtgcgggatacagtttcgcctcttaaatgagagtaaaggcccagcagtgcgtggtagtagggctcaaatagatatggatagatatcgaatttatatgcgaaatttgcttttaaacacacccaatttacagatcactcaagagatcgctactgaaattttaacgcaaaataacaaaataataggggtaaaaacccatttagacaacacttatcacacgcaaaaactcatcataacaacgggtacatttctcaatggcttaatccatgtaggaaccaataagctagaagccggccgtgtcggtgagctaagctcaaaagagctatcaagctcgctaaaaagcctgaatttagaaatgggtagattaaagactggcacctgccctagagtactagcaagctcaattgattttagtgttttagaaattcaaaatggtgatatcgatccacagccttttagctttagaagtaaaaattggagcaaagagcaacttccatgctatatagcttataccaatgaaaccacccacgatattatcagatcaaatttcgatagagcgccgctatttacaggtcagatagaaggagtagggccaaggtattgtccaagtatcgaagataagataaaccgctttggagatagggagcgccatcatctatttatagagcctcaaaccttagaagcgactgaatactatataaatggattttcaacttcactcccttatgatgcgcaagtagcaatgctaaggtctattaagggctttgaaaatgcgattatcgtg

SEQ ID NO: 111 - DNA, 22874 bp, synthetic construct
  source 1..22874: mol_type = other DNA
  misc_feature 1..22874: note = Synthetic
aatgagaatttagcgatacaaggcatcatcagatctagcagcggtgcagcgtatgagttgccaatcgctctttgtagtgatgggctgggttttataaatgagctaagacaaattggatttaaaatttatgccgcaaatgccggtggcaagagtgttaaggattttaaatttgatcctaagagcgttataattatgggtagcgaaggcgaaggaataccaaataaggtattacaaaagtgtgatgagatcctaggcgttaatatgcgtaaggattgggatagcttaaatgtcagcgtggcatttggaatattatttgataggattataaatggctaatggtatagaaaaacttttggaaatggatcttaaagaggtcacaaaacgcacacacatagagactgagtatttagagtatatgtgtgagaaaaattacgaaaaacttcgcaaattaaatgcttctggctttgctaagatcttaagtcgtgagtatgatttggatcttcaaggatggatagatgagtataacgaatattgtaaggaaaatggcagttgcgataactcaaatttcacagtagcgcctaagatcccagcatatacaccaaaaagcgataatagcagggctttgagcgttatgttgatattagttttgatagtagtggctatcgtttgggttgttaaatttacagatatcttagactcgatagaattaccaaatttcgataaaaatcaaagcgtagcatactctagtgcttcagtggtggaatcagctaaggagaatttacagaccacagcaaatagtgtaactccgcttcaaatagatgaaaatatcagtagtgaaagcaatgaaaccacagctacaaaggaagataacgagacgctagagtcaaatttaaccatcgcaagcgtagagatccaagccccgataatgatagaaaatagcgataaaattgccaaaatcatcccaaataaaaccatctggatagggataaaaaacctagatggcacaaacaaaaaatcatacaccacaaaaaacgccatagatctgaatttaagtatagaccaactcatccaaacaggccatggcgagataattttagaacaagacggggagaaaaagaaatttgaatttcaaaagcctttgagatttgtagttgaaaatggagtgataaaagagattgattatgctgagtttgtcaaattaaacaaaggtgcccaatggtaaggggaatcgctctttattttatccttattttaagctcttttggagccgatctacacagcaatatcaaaagcattatttcagagcaaatgtatgcccaaaatatagataaaatagagaatatatttgttaatcaatctgaatttatagacaataatggaaatttaaattatcctaaaatcataaatactctaagagtaaattcgcttttaaatcttacctactctatgcctgtaaatttagaaatttcattttatagcccaagctccgatattttgatgtttaagagcgtatctgaagctttaaaaagcattggctactcatattttttaagcaaatctttaaagagtgataccgaggggataatttggcaaatctctatgagctcacgatttgtccttgatccggggattttgtatagagaattgatgaaaaacaatatatttatcaaagatatcaagcgtgatgggcagtttagctttacttatagtatagatgcttcaagagctgtattatctacgcatagatatattagcgatgtagaatttgagttgcctagaccattagagccatattttttaaatatcaacgacaagagccaagccttgataaaaagccacccatcagatagctggatatgctctataaaggtgcttgatagggatttgaatttaataacacagattaaatcagatagaccagaaaaggagatttatatcaaatttccaccaaattcatactatatgattatagatgatgcttttagtttagaaaacattaaacgaggtttaaaaatatatatacaatcaaattaaggagttatttatgtttgatgagattagatttaataccatcgagagattgcctaattacgcctttgccgaggtaaatgcgatcaagatggcagcccgtagagatggtgctgatattatagatttttctatgggaaatccagatggtagaacaccacaacacataatagacaagctatgcgaaagtgcgatgaaagacaaaactcacggctatagcgtctctcaaggcatttataaacttcgtgttgccatttgtaattggtataaaagaaaatatggtgtaatcttagaccctgagacagaagccgtagccactatgggtagcaaagagggctttgtccatctagtacaagccatcacaaatcccggcgatgtcgctatagtgcctgatccggcttatcctatccatactcaagcatttatcatagcaggtggcaatgtaactaaaatgcctttaatctataatataaattatgaattagatgagaataaattttttgaaaatttagaaattgctataaaagatagcatcccaaaaccaaaatatgtagtggtaaatttcccgcataatccaactaccgtaacatgccaaaagagcttttatgaaagattagttgataccgcaaagcgtgagagattttatatcattagcgatatagcttatgccgagattacatttgatggatataagactccaagtatatttgaagtcgatggagccaaagatgtcgcagtagagtgctacacactatctaaatcatacaatatggccggttggcgtgtaggatttatatgtggtaataaaaaattagtagctgcactcaaaaagataaaatcgtggtttgactatggtatgtttaccccaatccaagtagcggccaccgtagcactagatggagatcaagattgcgttgagcagattagacagacttatgaaaaacgcagagatacactcatagaagcttttagtgcggctggttgggatatagcaaaaccaagagctagtatgtttgcgtgggcgaagttgccaccacaagtaggcaatataggaagtaaagaattcgctaaacaactcctaaccaaagcctgtgtcgcagtaagccctggttctggatttggtgtggccggtgatgactatgtaagaatcgcattcatagaaaacgaaaatagaattcgccaagcagctagaaatattaaaaaatatttaaaagaaattcaatgagagtagcgattttaggttttgggacagtaggaagtgaagttgctaatgtccttatcaaaaatagcgatttgatcgcttctagggccggtgtaagcatagagcctgtaattggtgtagtaagagatttatccaaacacaaaaatcctataataccgctaagtgatgatatacaaagtgttattaatagagatgatattgatgtttttgtagaacttatgggcgggatcgatagaccttatgagataataagtcaaattctaaaacgcaaaaaagcagtagtaacggcaaataaagccctcttagcatatcacagaaatgagcttgaagccttagctggagatactgcatttggttatgaggctagtgtggctggcggaattccaataatcaaagctctaagagagggcttaagcgctaatcatattcaaaaaatcatcgggataatgaacggcactagtaactatattttaagtagcatgatgagtagcggagctaaatttaacgaagtgctcaaaaaagcacaagatctaggatacgccgaggctgatccgacctttgatattgggggatttgatacggctcataaattgctaattctagctagtatcgcttattgtgtgcatgctaagcccgaagatatcatgatagaaggtattagtcaaatcagtagcgaagatatatattttgctaatgaatttgagtattctattaaacttttagcgattgctaagcgtggcgagggaacattggagctaagagtccatccggcgtttattagcaaagataagatgttggcaaatgtaaatggcgttatgaatgctgtgagtgtagtaggtgatgctgtaggtgagagtttgttttatggggctggagccggtgggagcgccacggcaagtgctgtcataagtgatcttatagatatcgctagagagattagaaatcctatgcttggctacaaaatgcctttggaatcggctagacttaggttattaaaaccaagcgagattaaaactaagtattatttaaggttaaaagtcgctgatgaggtgggagtactagccaaaattacaaatttaatgagccaaaataacctttctatagatagctttttacaaaaagcaaaaagcaaagatgaagagtatgctactttgttttttactactcatacttgtttggaggctgatatgctaagagttattagtggtttaaaaaatgagagttttatcaaagctgagccatttatgattagaattgagagctaatttgggcttaaaagagtatctctttgggcatgcagctgagaaaaaagcagccaaatatctagctaccaaaggctataaaattttaggattaaactacaaaaccaaatttggagagattgatatcattgctactagcagatcaactcttcattttatagaggtcaaagcctctgcaaaagattatgagaccatatatagagtcacaaaatccaaattagaaaaaatcataaaagctattgatttttatattttaagcaacggtttggatatgccatatcagattgatttagtctgtataaatggcgatgagattgagctagtagaaaatatatcatattgataaatttttatattatgttatttaaaatttaacaattaataaaatttattaacttttatattttataatactcttgatttgatgaagtttgagttagataaaattataattgttagttttaatttaacttttttaatgtataattttattataaaccacaaaggagataaaatgggtaaatatattgaattaactgctgaaaatttcaatatcgctaaagagggtgttgctttagtagatttttgggcgccatggtgcggaccatgtagaatgttagctccagttattgatgagttggctgaagagttcgatggtaaagctaaaatctgtaaagtaaatacagatgaagttcaagatctagctgtagaatacggcgttcgctctattcctactttgctatttttcaaagacggcgagatcaaagagacattaataggcgctcaatctaaaactgcaatcgcagaaaaacttaactcacttttataattcaaacggggctttgccccgactcacttcatttcaaatcaatttttaagttaaatttatttttatgtaatatatctgtagtattgtatagatataaatttaaaattaggagactataatgttagatgtagctataattggtggtggtccagctggtcttagtgcagggctttatgctactcgtggtgggttaaaaaatgttgtaatgtttgaaaagggtatgcctggtggtcaaatcactagtagctctgaaatggagaattatcctggtgtcgctactgttatggatggtatgagttttatgagcccgtggcttgaacaatgcactagatttggtctaaaacacgaaatggcggccgtagaaaaagtatctaaaaatagcgatggcagctttactatcactttagaaggtggtaaaactgaacaagcaaaagctgtaattgtgtgtacaggctcaaccccaaaaagagccggctttaaaggcgaggatgaattcttcggtaaaggtgttagcacttgcgctacatgcgatggatttttttataaaaataaagaagtagctgttttaggtggtggtgatacggctatcgaagaggctgaatatctaactagaatttgctcaaaagtatatctaattcaccgccgtgatacatttagagctgctccaagctcggttgaaaaagttaagaaaaatgagaaaattgagctaattttaaatgctactatagatgaagtctatggtgatagcgctgctggtgtaaaaggggtgaaagtcaaactagcagatggaagcataagagatttagcagtgcctggcatatttacctttgtgggtctaaatgtaagaaacgaagtgctaaaagatggagataaattcatttgcgatatattgccatcaggtcaagtaaaagttgatttaaaaatgcaaacttcaactccaggtttatttgccgcaggagatttaagacaagatgcgcctaagcaagtagtcagtgccgccgcagatggtgccgtagccgcacttagtgcgatgagttatatcgagagcttacactaatattttagccacttgttaatccaagtggctctttaaattcacaatccaagattaattatcattgtaaaaagcaaatttatcgctattgagtatggtgaaatattaattatttaataaattatctttgaatataaattttggtttgaatttaataatacattcaaaccaaaattgtgaaatttagcttaattaggatttacagtatctttatacatagccttgccgctagcgatctcttttatgacgatagaacgctctgcgttgccctttttgtctatatttatgatacctgaaacgccctcaaaatttttagtgtttttaatctctttattaatgcactccttatcagtggcatcagcgcaacgattcattgcatctatcatcaaatagtatgaatccgctccaagagcgctaaatccaggcacattgccatttccgtttgctttggtgtatgcttctataaaggcttttgatttggctgttggtggatttgagctatcaaaagcatcagtatataaatatccattagacgcatctccggctagctctataaatgtatcattgctcacaccatcgccactagcaaattgcgatttaacgcctatttgtctagcttgacgcactaatagcgcagcctctggatgataaaacggcatatataccaaatcaggatttaggctattgatttgtgagactatagctttgaaatctttatcgccactacttatttttagctcttttagaattttgccaccttgtttttcaaactcttttttaaatgctctagctaggcctattgagtatgaagtggattgatctgttatcaagatagcatttttcatatcttgttttattgcccacgaagcaaagcttgtcccttgaaatgaatccataaaagtaactctagcaccatattttgatctatctagtagcttatcagcagtggcggctggagcgatcatcgggacctttttttcgtctgcgatttgtaatacttgttgagtatttccagttaccatagcgccgattaatccgcttactttatcttcgctaactaaccttgtagtggccgtggcggtctctaccttatcgcctttattatccactaataccaaactaattttatcaccatttttgagtgttggctctagttgattagctagtttgatcccagcccacgcagtctgaccatacgcagcgacagatcccgtgataggcattatcacgccgattttgatctctttagcagccgctgagcttatagctattgccgcagccaaagcaattaatgaaagctttttcatctttatcctttgtgttgagtttattctaaataactaccttgtttagtcggagtggttctcatctcgccactatcactatcatcatctacgataaaagcgttatcgccttttaaatacgctattatgtgtcctagatctcttaaatttaattttgtggctatcggtgccattaggtattttaaattcccgccatattgggcatcacccctatatccagctatagaatcagctatctcatcgccactcatatcgcttaatctctcagagactcccatagcttttttgcttcctttgccgccgtggcaagacttacactgcttgtcatataactctttgcctttagagctattataattggctcttttatccacgccgatatttagaaatctaccggtttcataatcctctgttgaatctgatttttcgtatattttcacacttagattattatctttggcgtgtttttctactaaatttttcagctctttgccaaactcaccatcagcttctattatgtagctatcttgcccccaagctaacataggaatgatagatagatatattaaatttgaaatcttcatttatatccttattttaaatagacttaattatatataaaaatattttaatgcgagtttaaaaaatatagattgttataataaattattctgaaaaaataattataaaatagaataatattaataaatattctgaatatttaataatattatagattattattttttattgtcaaaactttaagctactttttatttaatgtttttctgttctatatatcttatttgaaattttttaaaaaggatatataaaatgtatttaagtgaaatattagataaggatatacggcacaaagctatagtcgtggctatgagctcatatcgataaccaaagaagagtatgataaattaaacccaaatgatagacactatgagacaaaaagctactcatatgagtgcggtggtgagagatcgagaacttgttatacgacagaagagtattattataaaaaaatagcaattccaaaaacttgttggagctactaaaatttaagataaaataatagaagccataggggggtgtatttccccactttcgtggggcaagacttaataagccttgacaacaattatacaaagtagtataattacgataaatacatatttcaaatttcttctcctttctatggagacagaatttgccataggggtaccagccctatggcatatccccataacaaaattatatcattataaacttctaatgtatcttaaattttagcctattttaagtcataaaggatgattaatggatgaaaatatctaatcaaatttagtatattttttgatacaatagcgacaagagtgcttaattatttagtaaaataggtttaaaaaggggagagtatgaaatctttatcaataaatatagatatgggcgctataaataatggtatatttatagccacttgtcaagatgataaaataatagataaaaatgcttttgatataaaatttgataaaggcaaattaaacttttcaaaaatcgacagaactcttagaaggcacactaggcggtcatttgatagagatagatttgttttaaggcttttaggcgagattttgccgttagaaaatttaagtaataaccaaaaagaaaagctatttgggctttttaaaaatcgtggatttaactatctaaatgtaaattttaacgcagagattgatagtgatagcttagagattttaaatgccttggatggatattattttaaagattgtagtgttttgagtgattttgaaaatagtataagtaagatttttaacgagcttgaaaataatgaaattttagcttttttagatgatcaagcgcaaattctaaatcaaacaaaagagcaaaaaaataaaatcttaaataaaaatattaacgcaattttggagtttttagaaagtataaaaaatgaaagttttaaaaacaacaaacacagaaaaagctatctaaaagatattaaaaacgagatagaaaattcatttaaggatataattttaaaactaaaaatatttaaaaattctcaagaattctactattttataggcaatatagccaattttcaaactagaattttaaggcgatattttaatgctaaatttgatttagtctttgatgatgctaagctaaaaaaagaatatattaagaaatataaattatttagattttataagcactgatgaaaaggctaataaaaacaagattttagaaaatttaaatgctttttcgactttggaatttttaaaaaatacagagcctataataactatcccaccttatgaaaacgccaaaaacaaaaaacctcaatcttgccaagcccttgtaataaatgatgaaaaaatcaccccaagtctaaaggatataacacgcaaaattttatcaaatagcaattttgaacgcttaaaaaccgatgaaaatggcgttttagcagataatatcaaagataatgaaatagctaaatatttacagagaattttagatatttcaaagggaattttagatgataaagagctttatccaaggcttttagaaaaagatgaaaatgctaaaatttttgcccaagagattagactaaatagcgtggagttaaaagagtttaaagattttgctaaaaaatattatgatgaagtaaatttagctaaaaagggcataataaaaaatgagcttttaaagccttgttgcttacacactccgcacaaaaataagaataaaaacgctctaatttcggctctatttctaaaatcaatcacgcaaaaagagatagaaaatttagaagattttttcgctaataataaaataagtggcaatcaaactttcaaaggattttttgagcgactaagcgaattaaaaaagagatatcaaaatagattttaccatattttagagcatgaaccaaccaaagagcttgaagggattttgaaaaattataaaaaagttatggaaaaaatagtagaacacaactcaaattttaactttaaagcgccttttgatactagcacgataagcacaaatttcaactacctaactcagcttggtgatataatatttgatgaaaaaagccgtggttttgctaaaacttgtaaatttcacacacttgaaaatctcatacgatcaagtgctaaatcagccatcgcatcacgcttagcttcaaattcagcaaggctaataaatggcaaaatagagatgtatttagatcgcttagctcatgaaattatcaaaaaaattgattttacagatatttataatatacaaataaatgtagagatgaataaatttaactttgagtcaaacctaagcaaactaggacttgccaaggagagacaaaaggatgaagagagctttatttgcccatattctggtgctaaaatcagccaaacaaattgcgaatatgaccatattttgccacgctcaaaagggctatataactcactagcaaatttaatcccaacaagctctactagtaatcaaataaaaagcaacacaaaatatctattaagcaatttagatgaaaattatctaaaatatatttttgctaaaacacaaaccactgatttaaactcatttaaagcttttattgatgaaaatatcagcaaaattgatgaaaacgactttacaaattttaaaaatcttagcttttttgagcaaatagcatttaggcatgcgctctttttagatacagatgataatagctttaaaaaagcgctaagacttttaaagctagatactataaaaacgcactcaaacggcactcaaaaacgattcataaacatattaattgaaaaaatttcaaagcttacaaagagtggaatcgatctaaatttcatagactcaaagctagtaagctctactagaaaagatctagcacaaaatgatataaacatagcaaaacaagagatccaagatagccatagccactgcgtggatgctagtattgttttttatctagcaaatagcaaaataattaaaggccaaatagagccagattatgattattttaaagatatttatccaaaaaatagcgatataattttgccgcaaagtaagcaatatttagagcttaatcaaaaaagccaaaaaagcaaaaagctctttgatgatagtgtttattctttggtttatgagggtaaatttgatgaaaaacaaaagaaaattctaactcaatatgagcttttaaaagaaaatggctttgtagatactcacaaggtttttgagctgatttttaaatcttttaaagataaagatagaagcactctaaaagatctaaaattcctagataatcacttgaaaagctatatccgcaaggatatcttttctatattttttaacgaaaaaggtgagttaaaagaggcaaaagagcttaaatccgccaccaaaaatatagataaattttacaccattttatctcaaaaccaagataaaatctatacaatcaagctagatgaaaaagccaaagagaagaaaactctacaaagaaataaagtaatagagctctataaagagatattttatactaaaaacgccaagccaagggcaagaggtaaaaatagagttactttctcactacctgtttatgccaaagatgctaaatacgctattaggcgaaattctggttttgctggactaaaaaataaagatatagctacaaaaacttatatcgatattgatagtagagaaattttaaaaattccatattacagcacaaatgttttgccaattagaattagtgatattttggaaattttaagcctacaaagcaaaaatgccaagcaaatttataaaataaaaatccaagacaatctccctaaacaaataatctcgctagattttatccttagccaagcaaacagacacgaagtgctagtaagctttgataaaagtaagctagaaattcaaaatccaagcgacgataatgacaaaaacgcctttatccaaaaatatttatgtgatgattttaaggagtttttaggcaaaccagaaaataataagattgaaattataaaaaatagcgatgatattttggctataaaataccgtgtagataggacttcaaaggcaaataaagagattatagtaaaagctctaagcgatgaagcacctagtgcttaatagctttgggctatttttggggctaaaatctcagcgtttagtagtttataaaaatagagaaatcatcaaagaaatagccctaaaatcgctcaaaactatttctataaactcaaatggaattaatatttcaagtgatttagtctttgcttgttctatccgtggtataaagatattttatgttaattttactaatttttcagccactcatacactttatgagcataaaggtgtaaatgtgctaaaagagcagtttgctagtgcgacaaatggcaaagatataattttagcaaaagaacttatcataggaaaaattaaaaatcaacgctctactattttatatttttctaggaattttaccgccaagcaaaaagaaaatatcttagcaaattttcaaaaagccctacaaatactaaaaaatgaaaatcttaataaagacgagattttggtatagaaggtagcgtggcaaatgtgtattttgagtatttaaagcaaaatggattatttgctaatagttttgagataagaaccaaaagaaatagcacagaaataacaaatcaagcgctaaattacggctatgctatattgctaaattttgtctataaaagcataatcaatgccgggcttaatccatattttggagtacttcactctatgcgcagctcaaaaccatctttagcacttgatattatggaagaatatcgcagttttgtagtagatagaaatattatcaaacttcgctcatctctaaaaaatagcttagaacaagacgataagagactaattgcttcaaatattcttaacacaatgagaaaaaagcttatctataatcatagaaaacttacattagaaagcattattcaaaggcaaatttataaaatttcagctttcttttgtgataataaaaaatataaatcatatatttttaggtggtaaaatggattatttgatagcttatgatatagaagataataaaaatcgctcaaaagtttttgaaatgttaaaagattttgggctaagagctgttcaaaagtcagtatttttcggtgagcttagcaatgctgaaaaaattgaaataaaaatatttttatcaagatattgtgataaaaatgataaagttattataactaaatttgatttaaaatttgaagttctaatcggctatgaaaaaagcgattttgaaaaactcgaattccatattatttaagtatataaaatgattttagtaagccatattagacaatttatattctgcccaagaatattttatttttataatttttgtcatttttcgtccaaatatccagagtatgtaaaacatggtagcgagtttcacgcttatcaagatgagttatttaaaagcagaaaattccttaaattcagacttaattttaaaaaagctcataaaaatttatatttagaaaatgaaaaatttggcggagttttggatttagtctttgaatgtgacgatgagataatagtagtagagtttaaaaatcaatcaaagccaattttaagcaagggcgcaaaaatgcagcttatagcatactctaaacttgctagcaaacattttaaaaagccttttcatagggtgattttatgctactcaaataatctaaaatttaaaatctttgaaatttataaagaggatttagcttattttgataaaacactaacgcaaattcaagatctattagaaaaaggatatttcccccaaagctcagctagcattacagcttgtgcgcaatgtgagtttaaaaattattgtgatgatagagaataaccgggggtgccaaaggcagttgccccgatatgaaaacaccttgtggtgatttcaaacgctataagctagattatggtataatttgcgcttggattataacatatttttccacaaattcgccactttttgcgatttttttctaagtggaaaaaattttacaattaactccgcacaaaatccctaaaacagggcattttgtgcggagttgcaaattataccacaatccaacttggtttgaaacataataagtccaagacggtaaatttatttcttgaactgttgcaaattataccacaatccaacttggtttgaaactttggttaaacccaaaagcatatttagataatttagttgcaaattataccacaatccaacttggtttgaaactctttttctatagcatatcttgctttgccatctttatcggttgcaaattataccacaatccaacttggtttgaaacataacattcttaagccaacaataagggcggagaattgttgcaaattataccacaatccaacttggtttgaaactaaaatttatataagtgaatatcaaatgccgagcgagttgcaaattataccacaatccaacttggtttgaaacgaccaagttggtcaaatattattgaataaagataagttgcaaattataccacaatccaacttggtttgaaacaagcaaccgcccaacctatgatataaggttttaaagttgcaaattataccacaatccaacttggtttgaaacttaaatatgctcttagccgtgaagcgttaaatttcgttgcaaattataccacaatccaacttggtttgaaacccgcttgagaaaatgctaaaaattccgccgtgctaaagttgcaaattataccacaatccaacttggtttgaaacttaactaaatctttgtttaaaaattcactactaaagttgcaaattataccacaatccaacttggtttgaaacacaaatacaaaattttacaaacactcaagactttataaatgcttttagaattgtgcttacaaaaggggagtaaatagagctattttatgatgaaattgccccagaattaggtatagcggctaattttgatgatatagatttagtaaatgcttcgttatataaaatttatcaaagtgatgagctcgagctgataagtttaagagagagatgattttaatgcgtatctctacacaatattataaatattttgagcgtgataatgtagagaagtttttaaacaatttttaggagagtaaaatggaaatattaactcaagctataaataatagaattatttaaaaatatcaacaatttaaaaaattttagatttataaataattatttaccaaaaatttattaaaatagttgaactttaaacaaaggaagaaaaatgaaaaaaagtttagtgattggtgttttagtagttggatttttaatggatgtgctacgcttacagaagcttattctgacacagtaaatagcatcaatgagacagcaagagaaatcaatgctaagaatgagcaaaatagaaataaaaataataaaagcacaaatacaaataataaatatgaagcattaagtgaagatggagatactggatttggaacagtgtattaatattttataatataaaattttaagtatttaaaggcaaaaaatgatagaattatttaaaaatatcggacttggtatttttataaatggtgcttttgcttggcagtttggtgaagcaacagttaaaggctttttagctattattgaaggaatagcaataatggcaatagcgatatacatagaaaaaaggagtaaataatgagcggacttgattatatcttaatcgcaggtgctttcattttggtttatttaagcattaaagcatatcaaattttcaaaaaaccacaacactaagctaactcaaacatatcgcttttaaaaaataaaaatttaaggcgatattagcctacaccaaaatcatctccccaaataaatctctttatctttaacttcattttctcttattttagatttagagtaagagaagttttttttctctctcttataatgctatctttatctagtaaatttacagcctttttatactctttatatatgaaactatctctatctatgttattaccttttccttttactattttttcaatcttttcaaatctttcatctattaaatcggatagaaattctttatttttttctaattgttttagatagttagagtattcttcaaaattcatatctgattgttttaatatgtgtatgcttttatctaagctatcaagctttttagataagctaaatatgttgtttttatcattgccaaataccttggcataagctaaagagctatctatactaattttagcattttcatcaagcagttttttagtaacttcaatggagtttttaactctaatgtatgtctcataatcgcttttgctagttaatccttttgagtggagttttttaaagttgtaaaaatgccttttggatttgggtgaaatcggttaaatttggtattgagttaaatgctgattagatagttggtattttatatcgcataatttggctatatctttatcgtgcgttactaagaccaaagcggcgttattggttttgacatagtcaaagattacgctcatgacctctttagcagtggtttgatctaggtttccagttggctcatcagcaaaaataattttaggatttttagctagtactctagcgatactaactctttgctgttggccgccgctaagttcgccgattttttgatttattacattgtcgatttttaatgctttaaggaggtttaaattaattttttgaccgcttaatatagtggcgagttcgatattttcaaaaccattaaatcctttaaatagataatgtgcttgaaaaataatcccaaaatcatatctgcgaatttttaaaagttcatcactactcagcttataaagtgatttatcattatatataacttcaccatcagtaggcgataaaagtgtagataaaatgtgtaaaattgtggattttccgctaccactaacacccataatagcagtagtagtagcgggtctgatatctaaatttatatcgttaaagagcaaatagtcaaatttatgagataaatttaacgcctttaacattattaagccatttgagcagctacttcagcagcaaaatcctcagtctttttctccaagccttcgccaacttcgaatcttacatagcttacaatttctatttcgccaccaagttttttagcctcttcagctattacttgttcaatagtttttttgtcatccattacatagaattgccctaaaagagtaagtcgttggtcaagttgagtattgtcagctatgtatctctctatttgacctggaaggattttatcccatatagcttcaggtttgccttgttttcttaactcttcttttaatttttcagttgctttggctatcacttcatcgcttaattgtgctctactagcaaattcaggtattttgtgaagtggttttttaaggcggactagctcttcattctctttttcaagctcacctttaagagctagatactctttttctacaaaatccgggctaaactctttatagcttataacttgaggtttcatagccgctgcatgcatacaaagatttcttaaaaaatcgccaattttgctagctgtcgcttcagagtcgcaagcagcgccgattaaaacaccaacacggctatttgagtggatatatccagctacaattccattcttgctagctttaatggtttcaaatcttcttacaactaaattttcaccaatagtagcgatttggctttggaaaaactcttcaaatttaaccccgccaatgcttgactctttaagctcatcaattgtggtgattgcgttagtttggacatgtagagttgtatttttaactaaatcaacaaatgtagcatttttagccacaaaatcagtttcagagttaatttctgttatggtagctgttttattatcgctacttacaactacgcttacaagaccctcgctagctaagcgatcagcttttttagcagctttgccaagacctttttctcttagtatatcaactgctttttgcatatctccattagcttcttgaagagcctttttacaatccatcattccagctccggtgctttcacggagctcttttaccatatttgcgctaatttccattactcttcctcgccttcagccatagcttcttctaatatttcatctttttcttcttgagttggagcttctatctcttcgctgatttcgccatcttgatctcttaaagctttaccctcattgatcgcttcagccatctcttggcagaatagctgaacgcttctgatagcgtcatcattgcctggaattgggtagtcaatgatatctggatcgcagtttgtatctataggagctactactggtattttaagtttgttagcttctgctactgctattctctcttttactgtgtcaattacaaatatcatatcagggagtgtttttatatttctgataccgcctagagttgctattaacttctcttttttgcgtcttagcattaaagcttcttttttggtaagtaaatttatagagccatcttcttccatagcttctataacttcaagttttctaattgattgtctaatagtcccaaaattcgtcatcataccgccaagccatctgtgatttacatatggcataccgcatttttctgcgtactctttgatagctacgccggcttgttttttagtaccgacaaatagtattgttttgccttcagctgcggcgtctcttactatattataagtatatctgaaatatctaatagttttttgtaaatctattatataaatgccttttctctcaccaaaaatgaattttttcatctttggattccagcgtcttgtttggtgaccaaaatgtacaccgcactctagtaaatctctcatagtaaccatgagtttctccttaaaaaattttgattagtttattcctctatgctccttaacagcgacattaactgcaactaaacaaggattagcatatgtgaaatgaagtgcgaattgtagctaaatttaacttattttttgctttatttgctaagttgaaatttctctttaatactttgaagtgaagagaaaatttctgcgattttttctaggtcactactttctatttcaaatttttttgggcgaaaaaatagctccaaaagtgtcaaattctctccaaattccaatccataattcctagcattttgtgagatttttaaaagctcgatatcggtgaatttttcatacataatttatccttttaacattataaaaccagcaaatctaccagttgaaccgctcttgcgatatgagtaaaatctatcatcgcagtggctgcaaatatcgctaaattcataatctttaacaccgataccatcaagctcaaatcgcaaagccccatctaaatcaaatttaaaaccatctttaaatttattaaattcccccaaatttaaatccccaatttcatagcaattttttttgatatttgggcctattattgctttgatattttcaggatttgagcccattttagctattgttttggttatgatttttgagatgactccggctctaccggcatggatagctgagattaaatttagctttttatcatataaaagcacaggcgaacaatcagccaccataacacatagcccaacttgggttaaattagtaaaaatcgcatcgcaaggctctaaaatttggttaatatcgcttaaattttggactatatcagagtgaatttgctccatgaaaattaatttcttggctttgattttgtgagctaaaatctctctattttgctctacttttagcttatcatcacccacatgatgggctaagtttaatctctcataaacacccttgctcacaccgccaaatttggttgtaaaaccagcaataactttatcattatcaatagatactagcataaaaatcagcctgttgccaagtgagagtttggttttttgagtttaaaattttatcgatataacgagccaaaatatcgctttctatatggactcttctgcctatttgaaactcaccaaatagcgtgtctttcatgcttataggtatcaaggttagacgcattaaatttgagttgatatcattgattgttaggctcacgccctcaactgcgatggcaccttttttggctattagatgtaaaatttcatttggtaattctatgataaaatccaccccacttgctagtctcttaatatctctaataaccccaatagcatctatatgcccttgaatcaaatgcccatctatcctatcgccaattttcatagctggttctatatggactctgtttttgtaattttccaaagccaatatattagcgctttcgctacttaattctaccacaaatccattcttatcaatctttgttacgctcaaacaagccccatttaccgctatgctatcacctaaatttggcttatgagtagccttgatacttagatttttaccatcaaaactacgcacaacaccaatctcacgaatcagtccattaaacataatcacctcaaatttaaatatttaaattatagcagtttttcataaatatacataagatattataaatatgaaaatattttagaatgatataaaaaccataaatatttaagcgatatgtatataaaatataaaaaatatataagtgtaaagtattcaaacatgcaataaacaatacaaaaattaaataaattttactaattctaaaaataattttaaatttaaaactaaattcatttacttttaaaatatctaaacataaattaaaatatattttatatacttaatacataaattatattttatatttaaatagtatattttattgatttttaatatatatataattatcaatactttaaattattaaaaggagattatatgaatgagcaaacacaaaaaatatttaataatccacaattgttgcgtaataagttggcagaatttttacgaacacctgaaaaagttgaaatatacgcacaagctgccgaaaaattttatattgcaggcaataaaaagagatatcatttaatataacttggtcttggtggggatttttctttgcgaatgggtttttattttacagaaaagcttataagagtgccataattatttcaataataacaataattataggagcagttttcccaccactttgtctatttattaatctatatgtggctatacaaggaaagtttatagttattaaaagatttgaacaagcattagatgttggtgaagagacatttattcaaatgtctggctatgcaaaatgggttttatatttagcgttaattccaattatttttataatgttattttgtataacagcgctttttggaatgccagcagatattgcatctgcatctcactatatcttaattttattatgtttaggtatgggagtaatatcaataaaatatatattaaaaaatataaaatactaattcatcttatattctcaacctaagttgagaatattctttatttttgtatccttttgcgtgttcttaagccttaagtagtgtgttactttgatagtaaaacactatattaatacttacaaattttatacacagtttctatgttatatttaaattgtatatctatacatactaactatctaccataactttaaaaaattatagtttcttaaattttgtaaatttcgattcatctgattcatctgactttgctgatttaattgatttaatgtattcatgttttgttgctctcgtatcatttctcgatgctgaatataattgagctctgcctgacttaatggatttgaacatccagctaaatttttagaaaatatatcgcgcaattcatcatcagtaattgaatttttatctatactagcatcgtgccataaaacttgacctgcagggcagtttatgcctatagataacaaatattcagctagattagaatctatatatctgtacctagagttatatggtatatgatatgcttcaccatttgtaaagaaaacaactccacgatttgatggatcaaagccacatcctactaaaatagtaagaattccgaacataaaactaaaattaattattgaatttttcat

SEQ ID NO: 112 - DNA, 22199 bp, synthetic construct
  source 1..22199: mol_type = other DNA
  misc_feature 1..22199: note = Synthetic
ttttgatagtggtggctatcgtttgggttgttaaatttacagatatcttagactcgatagaattaccaaatttcgataaaaatcaaagcgtagcatactctagtgcttcagtggtggaatcagctaaggagaatttacagaccacagcaaatagtgtaactccgcttcaaatagatgaaaatatcagtagtgaaagcaatgaaaccacagctacaaaggaagataacgagacgctagagtcaaatttaaccatcgcaagcgtagagatccaagccccgataatgatagagaatagcgataaaattgccaaaatcatcccaaataaaaccatctggatagggataaaaaacctagatggcacaaacaaaaaatcatacaccacaaaaaacgccatagatctgaatttaagtatagaccaactcatccaaacaggccatggcgagatagttttagaacaagacggggagaaaaagaaatttgaatttcaaaagcctttgagatttgtagttgaaaatggagcgataaaagagattgattatgctgagtttgtcaaattaaacaaaggtgcccaatggtaaggggaatcgctctttattttatccttattttaagctcttttggagccgatctacacagcaatatcaaaagcattatttcagagcaaatgtatgcccaaaatatagataaaatagagaatatatttgttaatcaatctgaatttatagacaataatggaaatttaaattatcctaaaatcataaatactctaagagtaaattcgcttttaaatcttacctactctatgcctgtaaatttagaaatttcattttatagcccaagctccgatattttgatgtttaagagcgtatctgaagctttaaaaagcattggctactcatattttttaagcaaatctttaaagagtgataccgaggggataatttggcaaatctctatgagctcacgatttgtccttgatccggggattttgtatagagaattgatgaaaaacaatatatttatcaaagatattaagcgtgatgggcagtttagctttacttatagtatagatgcttcaagagctgtattatctacgcatagatatattagcgatgtagaatttgagttgcctagaccattagagccatattttttaaatatcaacgacaagagccaagccttgataaaaagccacccatcagatagctggatatgctctataaaggtgcttgatagggatttgaatttgataacacagattaaatcagataagccagaaaaggagatttatatcaaatttccaccaaattcatactatatgcttatagatgatgcttttagtttagaaaacattaaacgaggtttaaaaatatatatacaatcaaattaaggagttatttatgtttgatgagattagatttaataccatcgagaggttgcctaattacgcctttgccgaggtaaatgcgatcaagatggcagcccgtagagatggtgctgatattatagatttttctatgggaaatccagatggtagaacaccacaacacataatagacaagctatgcgaaagtgcaatgaaagacaaaactcacggctatagcgtctctcaaggcatttataaacttcgtgttgccatttgtaattggtataaaagaaaatatggtgtaatcttagaccctgagacagaagccgtagccactatgggtagcaaagagggctttgtccatctagtacaagccatcacaaatcccggcgatgtcgctatagtgcctgatccggcttatcctatccatactcaagcatttatcatagcaggtggcaatgtaactaaaatgcctttaatctataatataaattatgaattagatgagaataaattttttgaaaatttagaaattgctataaaagatagcatcccaaaaccaaaatatgtagtggtaaatttcccgcataatccaactaccgtaacatgccaaaagagcttttatgaaagattagttgataccgcaaagcgtgagagattttatatcattagcgatatagcttatgccgagcttacatttgatggatataagaccccaagtatatttgaagtcgatggggccaaagatgtcgcagtagagtgctacacactatctaaatcatacaatatggccggttggcgtgtaggatttatatgtggtaataaaaaattagtagccgcactcaaaaagataaaatcgtggtttgactatggtatgtttaccccaatccaagtagcggccaccgtagcactagatggagatcaagattgcgttgagcagattagacagacttatgaaaaacgcagagatatactcatagaagcttttagtgcggctggttgggagatagcaaagccaagggctagtatgtttgcgtgggcgaagttgccaccacaagtaggaaatataggaagtaaagaatttgctaaacaactcctaaccaaagcctgtgtcgcagtaagccctggttctggatttggtgtggctggtgatgactatgtaagaatcgcattcatagaaaacgaaaatagaattcgccaagcagctagaaatattaaaaaatatttaaaagaaattcaatgagagtagcgatgttaggttttgggacagtaggaagtgaagttgctaatgtccttatcaaaaatagcgatttgatcgcttctagggccggtgtaagcatagagcctgtaattggtgtagtaagagatttatccaaacataaaaatcctataataccgctaagtgatgatatacaaagtgttattaatagagatgatattgatgtttttgtagaacttatgggcgggatcgatagaccttatgagataataagtcaaattctaaaacgcaaaaaagcagtagtaacggcaaataaagccctcttagcatatcacagaaatgagcttgaagccttagctggagatactgcatttggttatgaggctagtgtggctggcggaattccaataatcaaagctctaagagagggcttaagcgctaatcatattcaaaaaatcatcgggataatgaacggcactagtaactatattttaagtagtatgatgagtagcggagctaaatttaacgaagtgctcaaaaaagcacaagatctaggatacgccgaggctgatccgacctttgatatcgggggatttgatacggctcataaattgctaattctagctagtatcgcttattgtgtgcatgccaaacctgaagatatcatgatagaaggcattagtcaaatcagtagcgaagatatatattttgctaatgaatttgagtattctattaaacttttagcgattgctaagcgtggcgagggaacattggagctaagagtccatccggcgtttattagcaaagataagatgttggcaaatgtaaatggcgttatgaatgctgtaagtgtcgtaggtgatgctgtaggtgagagtttgttttatggggctggagccggtggaagtgccacagcaagtgctgtcataagcgatcttatagatatcgctagagagattagaaatcctatgcttggctacaaaatgcctttggaatcggctagacttaggttattaaaaccaagcgagattaaaactaagtattatttaaggttaaaagtcgctgatgaggtgggagtactagccaaaattacaaatttaatgagccaaaataacctttctatagatagctttttacaaaaagcaaaaagcaaagatgaagagtatgctactttgttttttactactcatacttgcctagaggctgatatgctaagagttattagtggtttaaaaaatgagagttttatcaaagctgagccatttatgattagaattgagagctaatttgggcttaaaagagtatctctttgggcatgaagctgagaaaaaagcagccaaatatctagctaccaaaggctataaaattttaggattaaactacaaaaccaaatttggagagattgatatcattgctactagcagatcaactcttcattttatagaggtcaaagcctctgcaaaagattatgagaccatatatagagtcacaaaatccaaattagaaaaaattataaaagctattgatttttatattttaagcaccggtttggatatgccatatcagattgatttagtctgtataaatggcgatgagattgagctagtagaaaatatatcatattgataaatttttatattatgttatttaaaatttaacaattaataaaatttattaacttttatattttataatactcttgatttgatgaagtttgagttagataaaattataattgttagttttaatttaacttttttaatgtataattttattataaaccacaaaggagataaaatgggtaaatatattgaattaactgctgaaaatttcaatatcgctaaagagggtgttgctttagtagatttttgggcaccatggtgcggaccatgtagaatgctagctccagttgttgatgagttggctgaagagttcgatggtaaagctaaaatctgtaaagtaaatacagatgaagttcaagatctagctgtagaatacggcgttcgctctattcctactttgctatttttcaaagacggcgagatcaaagagacattaataggcgctcaatctaaaactgcaatcgcagaaaaacttaactcacttttataattcaaacggggctttgccccgactcacttcatttcaaatcaatttttaagttaaatttatttttatgtaatatatctgtaatattgtatagatataaatttaaaattaggagactataatgttagatgtagctataataggtggtggtccagctggtcttagtgcggggctttatgctactcgtggtgggttaaaaaatgttgtaatgtttgaaaagggtatgcctggtggtcaaatcactagtagctctgaaatggagaattatcctggtgtcgctactgttatggatggtatgagttttatgagcccgtggcttgaacaatgcactagatttggtctaaaacacgaaatggcggccgtagaaaaagtatctaaaaatagcgatggcatctttactatcactttagaaggcggtaaaactgaacaagcaaaagctgtaattgtatgtacaggctcaaccccaaaaagagctggctttaaaggtgaagatgaattcttcggtaaaggtgttagcacttgcgctacatgcgatggatttttttataaaaataaagaagtagctgttttaggtggtggtgatacggctatcgaagaggctgaatatctaactagaatttgctcaaaagtatatctaattcaccgccgtgatacatttagagctgctccaagctcagttgaaaaagttaagaaaaatgagaaaattgagctaattttaaatgctactatagatgaagtctatggtgatagcgccgctggtgtaaaaggggtaaaagtcaaactagcagatggaagcataagagatttagcagtgcctggtatatttacatttgtgggtctaaatgtaagaaacgaagtgctaaaagatggagataaattcatttgtgatatattgccatcaggtcaagtaaaagtggatttaaaaatgcaaacttcaactccaggtttatttgccgcaggagatttaagacaagatgcgcctaagcaagtagtcagtgccgccgcagatggcgctgtagccgcacttagtgcgatgagttatattgagagcttacactaatattttagccacttgttaatccaagtggctctttaaattcacaatccaagattaattatcattgtaaaaagcaaatttatcgctattgagtatggtgaaatattaattatttaataaattatttttgaatataaattttggtttgaatttaataatacattcaaaccaaaattgtgaaatttagcttaattaggatttacagtatctttatacatagccttgccgctagcgatctcttttataacgatagaacgctctgcgttgccctttttgtctatatttatgatacctgaaacgccctcaaaatttttagtgtttttaatctctttattaatgcactccttatcagtggcatcagcgcaacgattcattgcatctatcatcaaatagtatgaatccgctccaagagcgctaaatccaggcacattgccatttccgtttgctttggtgtatgcttctataaaggcttttgatttggctgttggtggatttgagctatcaaacgcatcagtatataaatatccattagatgcatctccggctagctctataaatgtatcattgctcacaccatcgccactagcaaattgcgatttaacgcctatttgtctagcttgacgcactaatagcgcagcttcaggatgataaaacggcatatataccaaatcaggacttaggctattgatttgtgagactatagctttgaaatctttatcgccactacttatttttagctcttttagaattttgccaccttgtttttcaaactcttttttaaatgctctagctaggcctattgagtatgaagtggattgatctattatcaagatagcatttttcatatcttgttttatcgcccacgaagcaaagcttgtcccttgaaatgaatccataaaagtaactctagcaccatattttgatctatctagtagcttatcagcagtggcggctggagcgatcatcgggacctttttttcgtctgcgatttgtaatacttgttgagtatttccagttaccatagcgccgattaatccgcttactttatcttcgctaactaaccttgtagtggctgtggcggtctctaccttatcgcctttattatccactaataccaaactaattttatcgccatttttgagtgttggctctagttgattagctagtttgatcccagcccacgcagtctgaccatacgcagcgacagatcccgtgataggcattatcacgccgattttgatctctttagcagccgctgagcttatagctattgccgcagccaaagcaattaatgaaagctttttcatctttatcctttgtgttgagtttattctaaataactaccttgtttagtcggagtggttctcatctcgccactatcactatcatcatctacgataaaagcgttatctccttttaaatacgctattatgtgtcctagatctcttaaatttaattttgtggctatcggtgccattaggtattttaaattcccgccatattgggcatcacccctatatccagctatagaatcagctatctcatcgccactcatatcgcttaatctctcagagactcccatagcttttttacttcctttgtcgccgtggcaagacttacactgcttgtcatataactctttgcctttagagctattataattggctcttttatccacgccgatatttagaaatctaccggtttcataatcctctgttgaatctgatttttcgtatattttcacacttagattattatctttggcgtgtttttctactaaatttttcagctctttgccaaactcaccatcagcttctattatgtagctatcttgcccccaagctaacataggaatgatggatagatatattaaatttgaaatcttcatttatatccttattttaaatagacttaattatatataaaaatattttaatgcgagtttaaaaaatatagattgttataataaattattctgaaaaaataattataaaatagaataatattaataaatattctgaatatttaataatattatagattattattttttattgtcaaaactttaagctactttttatttaatgtttttctattttatatatcttatttaaaattttttaaaaaggatatataaaatgtatttaagtgaaatattagataaggattacggcacaaagctatagtcgtggctatgaactcatatcgataaccaaagaagagtatgataaattaagcccaaatgatagacgctatgagacaaaaagctactcatatgagtgcggtggtgagagatcgagaacttgttatacgacagaagagtattattataaaaaatagcaattccaaaaacttgttggagctactaaaatttaagataaaataatagaagccatagggggtgtatttccccactttcgtggggcaagacttaataagccttgacaacaatatacaaagtagtataattacgataaatacatatttcaaatttcttctcctttctatggagacaaaatttgccataggggtaccagccctatggcatatccccataacgaaattatatcattataaacttctaatgtatcttaaattttactctatatttaagtcacaaaatatgattaattgatgaaaatatctaatcaaatttagtatatttttgataaaataggtttaaaaaggagagggtatgaaatctttatcaataaatatagatatgggtgctataaataatggtatatttatagccacttgtcaagatgataaaataatagataaaaatgcttttgatataaaatttgataaaggcaaattaaacttttcaaaaatcgacagaactcttagaaggcacactagacggtcatttgatagagatagatttgttttaaggcttttaggcgagattttgccgttagaaaatttaagtaataaccaaaaagaaaagctatttgggctttttaaaaatcgtggatttaactatctaaatgtaaattttaacgcagagattgatagtgatagcttagagattttaaatgccttggatggatattattttaaagattgtagagttttgagtgattttgaaaatagtataagtaagatttttaacgagcttgaaaatgatgaaattttagcttttttagatgatcaagtgcaaattctaaatcaagcaaaagagcaaaaaaataaaatcttaaataaaaatattaacgcaattttggagtttttagaaagtataaaaaatgaaagttttaaaaacaacaaacacagaaaaagctatctaaaagatattaaaaacgagatagaaaattcatttaaggatataattttaaaactaaaaatatttaaaaattctcaagaattctactattttataggcaatatagccaattttcaaactagaattttaaggcgatattttaatgctaaatttgatttagtctttgatgatgctaagctaaaaaagaatatattaagaaatataaattatttagattttataagcactgatgaaaaggctaataaaagcaggattttagaaaatttaaatgctttttcgactttggaatttttaaaaaatacagagcctataataactatcccaccttatgaaaacgccaaaaacaaaaaacctcaatcttgccaagcccttgtaataaatgatgaaaataaccccaagtctaaaggatatagcgcacaaaattttatcaaatagcaattttgaacgcttaaaaaccgatgaaaatggcgttttagcagataatatcaaagataatgaaatagctaaatatttacagagaattttagatatttcaaagggaattttagatgataaagagctttatccaaggcttttagaaaaagatgaaaatgctaaaatttttgcccaagagattagactaaatagcacagagctaaaagagtttaaagattttgctaaaaatattatgatgaagtaaatttagctaaaaagggcataataaaaaacgagcttttaaagccttgttgcttacacactccgcacaaaaataagaataaaaacgctctaatttcggctctatttctaaaatcaatcacgcaaaaagagatagaaaatttagaagatttttttgccaataataaaataagtggcaatcaaactttcaaaggattttttgagcgactaagcgaattaaaaaagagatatcaaaatagatttttctatattttagggcatgaaccaaccaaagagcttgaagggattttgaaaaattataaaaaagttatggaaaaaatagtagaacacaactctaattttaactttaaagcgccttttgatactagcacgataagcacaaatttcaactacctaactcagcttggtgatataatatttgatgaaaaaagctgtggttttgctaaaacttgtaaatttcacacacttgaaaatctcatacgatcaagtgctaaatcagccatcgcatcacgcttagcttcaaattcagcaaggctaatcaatggcaaaatagagatgtatttagatcgcttagctcatgaaattatcaaaaaaattgattttacagatatttataatatacaaataaatgtggagatgaataaatttaactttgagtcaaacctaagcaaattaggacttgccaaggagagacaaaaggatgaagagagctttatttgcccatattctggtgctaaaatcagccaaacaaattgcgaatacgaccatattttgccacgctcaaaagggctatataactcactagcaaatctaatcccaacaagctctactagcaatcaaataaaaagcaacacaaaatatctattaagcaatttagatgaaaattatctaaaatatatttttgctaaaacacaaaccactgatttaaactcatttaaagcttttattgatgaaaatatcagcaaaattgatgaaaacgactttacaaattttaaaaatcttagcttttttgagcaaatcgcatttagacatgcgctctttttagacacagatgataatagctttaaaaaagcgctaagacttttaaagctagatactataaaaacgcactcaaacggcactcaaaaacgatttataaatatattaattgaaaaaatttcaaagcttacaaagagtgaaatcgatataaatttcatagattcaaagctagtaagctctactagaaaagatctagcacaaaatgatataagcatagcaaaacaagagatccaagatagccatagccactgtgtggatgctagcattgttttttatctagcaaatagcaaaataattaaaggccaaatagagccagattatgattattttaaagatatttatccaaaaaatagcgatataattttgccgcaaagtaagcaatatttagagcttaatcaaaaaagccaaaaaagcaaaaagctctttgatgatagtgtttattctttggtttatgagggtaaatttgatgaaaaacaaaagaaaattctaactcaatatgagcttttaaaagaaaatggctttgtagatactcacaaggtttttgagctgatttttaaatcttttaaagataaagatacaagcgttctaaaagatataaaattcctagacaattacttaaaaagctatatccgcaaggatatcttttctatattttttaacgaaaaaggtgagttaaaagaggcaaaagagcttaaatccgccaccaaaaatatagataaattttacaccattttatctcaaaaccaagataaaatctatacaatcaagttagatgaaaaagccaaagagaagaaaactctacaaagaaataaagtaatagagctttacaaagagatattttatactaaaaacgccaagccaagggcaaggggcaaaaatagagttactttctcactacctgtttatgccaaagatgctaaatacgctattaagcgaaattctggttttgctggactaaaaaataaagatatagctacaaaaacttatatcgatattgatagtagagaaattttaaaaatcccatattatagcactaatgttttgccaattagaattagtgatattttggaaattttagactttccaaacaaaaatgctaaacaaatttataaggtaaaaattaaagatgatttaccagatgaaattatattattagaatttgtaatttcagaaaaagaaagacacaatgtctgtgttggctttgataaaagcaaccttgaattttgtgatatttcaagcaaagaaagtaaagataaatttataaaaatatacttagaagaaaaatttaaatctatactaggaacgccaagaaaagacaaaggagtcattgggattactattttaaaagacactagtaaaattttgcttatcaaatacacagcagggacaacggaaagtgttaaagaaattatagttaaatctcttaaagatgaaacacctagtgcttaatagctttgggctattcttagggctaaaatctcagcgtttagtagtttataaaaatagagaaatcatcaaagaaatagccctaaaatcgctcaaaactatttctataaactcaaatggaattaatatttcaagtgatttagtctttgcttgttctatccgtggtataaagatattttatgctaattttactaatttttcagccactcatacactttatgagcataaaggtgtaaatgtattaaaagagcagtttgctagtgcgacaaatggcaaagatataatcttagcaaaagagcttatcataggaaaaatcaaaaatcaacgctctactattttatatttttctaggaattttaccgccaagcaaaaagaaaatatcttagcaaattttcaaaaagccctacaaatactaaaaaatgaaaatcttaataaagacgagatttttggtatagagggtagcgtagcaaatgcgtattttgagtatttaaagcaaaatggattatttgctgatagttttgagataagaaccaaaagaaatagcacagaaataacaaatcaagcgctaaattacggctatgctatattgctaaattttgtctataaaagcataatcaatgccgggcttaacccatattttggagtgcttcactctatgcgcagctcaaaaccatctttagcgcttgatattatggaagaatatcgcagttttgtagtagatagaaatattatcaaacttcgctcatctctaaaaaatagcttagaacaagacgataagagactaattgcttcaaatattcttaacacaatgagaaaaaagcttatctataatcatagaaaacttacattagaaagcattatccaaaggcaaatttataaaatttcagctttcttttgtgataataaaaaatataaatcatatatttttaggtggtaaaatggattatttgatagcttatgatatagaagataataaaaatcgctcaaaagtttttgaaatgttaaaagattttgggttaagagctgttcaaaagtcagtgtttttcggtgagcttagcaatgctgaaaaaattgaaataaaaatatttttatcaaaatattgcgataaaaatgataaagttatcataactaaatttgatttaaaatttgaagatttaatcggctacgaaaaaagcgattttgaaaaattcgaattccatattatttaagcatccaaaatgattttagtaagccatattagagaatttatattttgtccaagaattttttattattacaatttttgtaatattgtgccaaaatatcaagagtatgtaaaacatggtagcgagtttcacgcttatcaagatgagttatttaaaagcagaaaattctttaaattcagacttaattttaaaaaagctcataaaaatttatatttagaaaatgaaaaattttgcggagttttggatttagtctttgaatgtgacgatgagataatagtagtagagtttaaaaaccaatcaaagccaattttaagcaagggcgcaaaaatgcagcttatagcatattctaaacttgctagtaagcgctttaaaaagccttttcatagggtgattttatgctactcaaataatctaaaatttaaaatctttgaaatttataaagaggatttagcttattttgataaaacactaacacaaattcaagatctattagaaaaaggatatttcccacaaagttcagctagcattacagcttgcgcgcaatgtgagtttaaaaattattgcgatgatagagaataaccgggggtgccaaaggcagttgccccgatatgaaaacaccttgtggtgatttcaaacgctataagctagattatggtataatttgcgcttgaattataacatatttttccacaaattcgccattttttgcgatttttttctaagtggaaaaatttttacaattaactaagcgcaaaatccctaaaatagggcattttgtgcggagttgcaaattataccacaatccaacttggtttgaaacaacaaccctacccaattattgcttatgctattgtcgatgttgcaaattataccacaatccaacttggtttgaaactcccaaatatgattatataattctataggcattgttgttgcaaattataccacaatccaacttggtttgaaacttcaacttcttttttaattaaaagctccacagcttccagttgcaaattataccacaatccaacttggtttgaaacaagagttagcagatattaccaaaagtttaaagagcagttgcaaattataccacaatccaacttggtttgaaacatcgtcatcgccaccagtactaaaacggctcccatagttgcaaattataccacaatccaacttggtttgaaactaatcgctttggacgacattgcccataagagctaagttgcaaattataccacaatccaacttggtttgaaacagcatatagaacaggtgatgaagccttgggtaagcggttgcaaattataccacaatccaacttggtttgaaacacaaatacaaaaattttacaaacactcaagactttataaatgcttttagaattgtgcttacaaaaaaaggggagcaaatagagctatttaatgatgagattgtcccagaattaggtatagcggctaattttgatgatatagatttagtaaatgcttcgttatataaaatttatcaaagtgatgagctcgagctgataagtttaagagagagatgattttaatgcgtatctctacacaatattataaatattttgagcgtgataatgtagagaagtttttaaacaatttttaggagagtaaaatggaaatattaactcaagctataaataatagaattatttaaaaatatcaacaatttaaaaaattttagatttataaataattattatgataatgtattattgctattaatcatctccccaaataaatctctttatctttaacttcattttctcttattttagatttagagtaagagaagttttctctcttataacgctatctttatctagtaaatttacagcctttttatactctttatatatgaagctatctctatctatgttattacctttttcttttactattttttcaatcttttcaaatctttcatctattaaattagatagaaattctttattttttctaattgttttagatagttagagtattcttcaaaattcatatccgattgttttaatatgtgtatgcttttatctaagctatcaagctttttagatagattaaatatattgtttttatcattgccaaataccttggcataagctaaagagctatctatactaattttagcattttcatcaagcagttttttagtaacttcaatggagtttttaactctaatgtatgtctcataatcgcctttgctagttaatccttttgagtggagttttttaaagttgtaaaaatgccttttggatttgggtgaaattggttaaatttggtattgagttaaatgctgattagatagttggtattttatatcgcataatttggctatatctttatcgtgcgttactaagaccaaagcagcgttattggttttgacatagtcaaagattacgctcatgacctctttagcagtggtttgatctaggtttccagtcggctcatcagcaaaaataattttaggatttttggctaatactctagcgatactaactctttgctgttggccgccgctaagttcgccgattttttgatttattactttatcgatttttaatgctttaaggaggtttaaatcaattttttgaccgcttaatatagtggcgagttcgatattttcaaagccattaaatcctttaaatagataatgtgcttgaaaaataatcccaaaatcatatctgcgaatttttaagagttcatcactacttagcttataaagcgatttatcattatatataacttcgccatcagtaggcgataaaagtgtagataaaatgtgtaaaattgtggattttccgctaccactaacacccataatagcagtagtagtagcgggtctgatatctaaatttatatcgttaaagagcaaatagtcaaatttatgagataaatttaacgcctttaacattattaagccatttgagcagctacttcagcagcaaaatcctcagtctttttctctaagccttcgccaacttcgaatcttacatagcttacaatttctatttcaccaccaagttttttagcctcttcagctattacttgctcaatagtttttttgtcatccattacatagaattgccctaaaagagtaagtcgttggtcaagttgagtattgtcagctatgtatctctctatttgacctggaaggattttatcccatatagcttcaggtttgccttgttttcttagctcttcttttaatttttcagttgctttggctatcacttcatcgcttaattgtgctctactagcaaattcaggtattttgtgaagtggttttttaaggcggaccagctcttcattctctttttcaagctcacctttaagagctagatactctttttctacaaaatctgagctaaactctttatagcttataacttgaggtttcatagccgctgcatgcatacaaagatttcttaaaaaatcgccaattttgctagctgtcgcttcagagtcgcaagcagcgccaatcaaaacaccaacacggctatttgagtggatatatccagctacaattccatttttgctagctttaatggtttcaaatcttcttacaactaaattttcaccaatagtagcgatttggctttggaaaaactcttcaaatttaaccccgccaatgcttgactctttaagctcatcaattgtggtgattgcgttagtttggacatgtagagttgtatttttaactaaatcaacaaatgtagcatttttagccacaaaatcagtttcagagttaatttctgttatagtagctgttttattatcactgcttacaactacgcttacaagaccctcgctagctaagcgatcagcttttttagcagctttgccaagacctttttctcttagtatatcaactgctttttgcatatctccattagcttcttgaagagcctttttacaatccatcattccagctccggtgctttcacggagctcttttaccatatttgcgctaatttccattactcttcctcgccttcagccatagcttcttctaatatttcatctttttcttcttgagttggagcttctatctcttcgctgatttcgccatcttgatctctcaaagctttgccctcattgatcgcttcagccatctcttggcagaatagctgaacgcttctgatagcgtcatcattgcctggaattggatagtcaatgatatctggatcgcagtttgtatctataggagccactactggtattttaagtttgttagcttctgctactgctattctctcttttactgtgtcaattacaaatatcatatcagggagtgtttttatatttctgataccgcctagagttgctattaacttctcttttttgcgtcttagcattaaagcttcttttttagtaagtaaatttatagagccatcttcttccatagcttctataacttcaagttttctaattgattgtctaatagtcccaaaattcgtcatcataccgccaagccatctgtgatttacatatggcataccgcatttttctgcgtactctttgatagctacgccggcttgttttttagtaccgacaaatagtattgttttgccttcagctgcggcgtctcttactatattataagtatatctgaaatatctaatagttttttgtaaatctattatataaatgccttttctctcgccaaaaatgaattttttcatctttggattccagcgtcttgtttggtgaccaaaatgcacaccgcactctagtaaatctctcatagtaaccatgagtttctccttaaaaaaatttgattagtttattcctctatgctccttaacagcgacattaactgcaactaaacaaggattagcatatgtgaaatgaagtgcgaattgtagctaaatttaacttattttttgctttatttgctaagttgaaatttctctttaatactttgaagtgaagagaaaatttctgcgattttttctaggtcgctactttctatttcaaatttttttgggcgaaaaaatagctccaaaagtgtcaaattctctccaaattccaatccataattcctagcattttgtgagatttttaaaagctcgatatcggtgaatttttcatacataatttatccttttaacattataaaaccagcaaatctaccagttaaaccgctcttgcgatatgagtaaaatctatcatcgcagtggctacaaatatcgctaaattcataatctttgacaccgatgccatcaagctcaaatcgcaaagccccatctagatcaaatttaaaaccatctttaaatttattaaattcccctaaattcaaatccccaatttcgtagcaattttttttgatatttggaccaattattgctttgatatttttaggatttgagcccattttagctattgttttggttatgatttttgagatggctccagctcttccagcatggatagctgagattaaatttagctttttatcatataaaagcacaggcgaacaatcagctaccataacacatagcccaacttgggttaaattagtaaaaatcgcatcgcaaggctctaaaatttggttaatatcgcttaaattttggactatatcagagtgaatttgctccatgaaaattaattttttggctttgattttgtgagctaaaatctctctattttgctctacttttagcttatcatcacccacatgataggctaaattcaaactctcataaacacccttgctcacaccgccaaatttggttgtaaaaccagcaataaccttatcattatcaatagatactagcataaaaatcagcctgttgccaagtgagagtttggttttttgagtttaaaattctatcaatataacgagccaaaatatcgctttctatatggactcttctgcctatttggaactcaccaaatagcgtatctttcatgcttataggtatcaaggttagacgcattaaatttgagttaatatcattgattgttaggctcacgccctcaactgcgatagcaccttttttggctattagatgtaaaatttcatttggtaattctatgataaaatccaccccacttgatagtctcttaatatctctaataaccccaatagcatctatatgcccttgaatcaaatgcccatctatcctatcgccaattttcatagctggttctatatggactctgtttttgtaattttccaaagccaatatattagcgctttcgctgcttaattctactacaaatccatctttatcaatctttgttacgctcaaacaagccccatttaccgctatgctatcacctaaatttggcttatgagtagccttgatacttagatttttaccatcaaaaccacgcacaacaccaatctcacgaatcagtccattaaacataatcacctcaaattcgaattgagaaattataatctaaatttataaatcttttactataaattagataaaatcgcccctaaaaatcacaaggcaaattatggaatatgatgttatcgtagttggtggcgggcatgccgggatcgaggcctcactcgcagcagctaaaatgggagccaaaactctattaatcacaattttagccgagcaaatcggcgcagctagctgtaatcccgcaattggcggattagccaaggggcatttagtcaaggagattgacgctttaggtggtcaaatggggcttacgactgatgagtgcgggatacagtttcgcctcttaaatgagagcaaaggcccagcagtgcgtggtagtagggctcaaatagatatggatagatatcgaatttatatgcgaaatttgcttttaaacacaccaaatttacagatcactcaagagatcgctactgaaattttaacgcaaaataacaaaataataggggtaaaaacccatttagacaacacttataacacgcaaaaactcatcataacaacgggtacatttctcaatggtttaatccatgttggcacaaataaactccaagctggccgtgtcggtgagctaagctcaaaagagctatcaagctcgctaaaaagcctgaatttagaaatgggtagattaaagactggcacctgcccaagagtactagcgagctcaattgattttagtgttttagaaattcaaaatggcgatatcaatccacagccttttagctttagaagtaaaaattggagcaaagagcaacttccatgctatatagcttataccaatgaaaccacccacgatatcatcagatcaaatttcgatagagcgccgctatttacaggtcagatagaaggagtagggccaaggtattgtccaagtatcgaagataagataaaccgctttggagatagggagcgccatcatctatttatagagcctcaaaccttagaagcgactgaatactatataaatggattttcaacttcactcccttatgatgcgcaagtagcaatgctaaggtctattaagggctttgaaaatgcgattatcgtgcgacatggatatgctatagagtatgattatgtcaatccaaccgagcttaaacataccttagaaactaaaaagattagtgggttatatctagcagggcagataaatggcaccacaggatatgaagaggctgccgctcaagggttgatggctggtataaatgctgcgttgaatttacaaaataaagagcctttgattttacgcagagatgagagctatataggggttttgatcgatgatctagtcacaaaagggacaaaagagccttatagaatgtttactagcagggcggaatttagattacttttaagagaggataatgcgaatttaaggcttagtaaatatggatttgagataggtttgctcgcaaaagaggcttatgatgaggttgaggctttaagggatgaattacaaaaagctatggaaattttgcttacaaaagagataacgcccaataaagaaactttggaatttttagccgccatcggtgaagagccaataagtgagaagatagcgctacaaaaattggtcgctagaaagagctttgatgaaaataagcttagaaagcttgagccgttttttgagaatttaagcaaaaattcaataaaccaaattctcacagaagcgaagtattatcactatatcgcacaacagcatatagaagttgagaagatgaaagggcttttaaatatcaaaattccaaatgatttagattttaagacaattagtggcttgagtaatgaagtggtcgagaagttaatcaaatttgctccatcgaccttagcggccgcatcaaatctcagcggaatcaccccagcggcgatagatatccttcatatcgctattaaaaggcacaaatctacacttagctaagccaatgagcttggctacttttgtttataaaaacaattctaattaaataaaattttaactttaaaatggtagaattgtagctttagtttcacttttatattataaaagttagcttaatttcaatgctaataattaaatcaatagaaaggaaagaaatgtctgttcaaaagcaagaaagacgagatttcatcggaatggcatttggcgctgtcgcagctgtgggtggtgcttttgctttggttggaatgaaaaagtcttgggatccacttcctagcgttaaagcagcaggttttaccacagtagatctaagccctatgcagcctggcgaattccgccaagtagagtggcgtaaaaagcctatttttatcattaaaaaagatgagaatatgaaggctaatccttcaagagatgtagtggtaggtaatgagaattatatagtta

SEQ ID NO: 113 - DNA, 24317 bp, synthetic construct
  source 1..24317: mol_type = other DNA
  misc_feature 1..24317: note = Synthetic
gacggaatgttgaggcgcgccgcggccatcaaaaggcccggaacgtttttgtcgcaggcggcgacgagcaccaacccgtcaaagggatgggccatcgacatcgcttccgtgctgtcggcgatcaattctcgggagacgagcgaatacttcatcccggtgtgccccatggcaaggccgtcgcagaccgcaatcgccgggaaaacgatgggaacgccgcctgcgagtgcgacgccctgcttcacggcgtccacaatcttgtcaagattcatgtggcccggaacgatgtcgtttttggaactcacgacgccgatcaggggtttgccgatttcggcgtcgcaaaggccgagcgccttcagaagggagcgctgcggggcggcgttgatgccttgggttaacggatcactgcgcatgatgatattttctccgaacggggtttgtagtgtgaagtatcagaaataaactgagggaacgggccggcagatgtccgcgtcggctcattccctttattttgcaggatttaccgaggttcaggcggtcttcttatcctgcatacgggcgtaaatgttggcgatgacggcgcccgaaacgttgtgccagaagctgaagatcgccgaggggagcgctgccaagggcatcgcagcaaagtgagcgttcgcaagcgctacgccgaggccggaattctgcatgccgatttcaatcgaaaggcacttgcactttgccacgtcaaggtgaaagagtttcccgagcaggaacccgaaggcaagacccagcgaattgtgcagcaccacgacggcgaagacctgcaggcccgtcgtcgcgagtttggcgtggctcgcagcgacgacggcggcgagaatgaggacgatcgcaacggcgcttaccaaggggagaacggtggtggcggccttgaccttatccttcaaaaggctcttcacgacgacgcccgcgatgatggggagcagcacgatctggcagatggaccagaacatggcagtggggttgatgctgatccactgattggcaaaaagataaatgaggaacggggtgacgatgggggcgagaagcgtcgtgcagctcgtgatcgtcaccgacaaagccacgtcgccgcgtgcgaggaacgtcatcacgttgctcgcggtgccgcccgggcagcagcccaccaaaatgacgcccaaggcaatgtcggcgggaagcaccagaatcaggcagaggaggtacgccgacaggggcatgatgacgaattgaccgacgacgccgatcagcacttccaagggacgcgtaaagacttccttaaagtcggcgacggaaagcgtgagtcccatgccgaacatcacaatgccgagcagaatcgaaacgtagggcaggaaaataataaacgtactcggggaaaggtacgcaagcaatgcaaagagaagaacccagaaggcaaaggttttgccgacgaatcggctgacggaagctaaagcattcatgtttagagttttgtacaacaagttatagacattgacttctcgggactcggatgcttggggtaaaagtctccggtgagaagcggcagtcacgcagaacagcggggtaaatgctgcgcccgaggggcttgagggtgtcatctgcgcgtccgatgcggcttttatccggcaccggaactcacccgtcgtcgccttgtgagctagacggtaagctggaaaaaatggtaacgcgaaagcgttccggcggcataagtattaattcctagtgtcttcgggagctattgaatttcagacaacaaaaaagcctcggcgacgacgctgaggcttcttttcggaattctggctccccgagttgggctcgaaccaacgacccacggattaacagtccgttgctctaccgactgagctatcggggaatgcagggcgcgaactatacagaggaaatgtagggaggtcaagcttttttggtgagttaaacggcagcggcaaactatttaattgaaaataaacgaaaaacaattggttcggtatcgaagttttctgcagcggtgaaaatttgcgttcagattacgggaaagaatgcgcgataatcaccgatcggcggtcgttttcagggcggcgttttttagtttttctccgatttttagtgttatggcgacgaaggtacttacgtttcccgattctccttttaagcttcatgcgccttacgatccggcaggggatcaggaagaagcgatcaaaaaactcaccgaggggttggaagcgggcctcgccggtcagacgcttttgggggtaacgggatccgggaagacttttacgatggccaacgtcatcgcctgcatcggcaaacccgccctggtgatggccccaaacaaaacgctggcggcgcagctttacagcgaaatgcgggagttttttccggaaaacgccgtggagtatttcgtttcctattacgactactatcagccggaagcttatgtccccgcccgcgaccttttcattgaaaaagattcggcggtgaacgaacacattgaacagatgcgtttggctgcgacgaaaagtattttggaacggcacgataccatcatcgtcgcgacggtctcatcgatttacggtatcggcaaaccggaaagctacacgctgatgcgcctcattctgcgtcagggggacacgaaaactcgggaagacttcattcatcagctcgttgtgatgcaatataaacgcaacgacatggatttcttgcgcggcactttccgcgtgagaggcgacacgatcgacatcttccccgcggaacacgccgaaattgccgtgcgcatcgaactttttgacgacgaagtcgatgccgtggtgctctttgatcccttgaccggacgcattctgcagaaagtgccgcgctttgtggtgtatccggcgagccactatgtgacgccgcgcagcgaaatcgtgcgggccatgacgacgatcaaagaagaattaaaggagcgtttgacgcaactgcatgccgaaggcaaggaagtcgaagcggcgcgcctgcagcagcgaaccctttttgatcttgagatgctcgatcaggtggggttctgcaaaggaatcgaaaactactcccggcatttgacgggacttgccccgggggaagcgcctccctgtctgatcgactacctccccaaggacgccgtcatgttctttgacgaaagtcacgtcatgatggggcagttgggcgggatgtacaagggcgaccattcccgcaaggaaacgctggtgatgtatggattccggttgccgtcggcgcttgataaccgaccgctccggtttgatgaattcgaacgcaagatgcgccggtcggtctttgtgtccgcgacgcccgcggcgtgggaattgtccaagagttcgcagatcgtggaacaggtggtacgtcccacggggctcgtggatccggaagtggaagtgcggccggcaacgacgcaggtcgatgacgtcttgagcgaaattattgaacgtaccaaggccggcgatcgggtattggtgacgacgctcaccaaacgcatggctgaagagctcaccgaatttttaagtgaacacaacgtcaaggtgcggtacctgcattccgacatcgacacggtggaacgcgtggaaatcattcgggatcttcgaaacggcgtttttgacgtgttggtggggatcaacctcttgcgagaaggcttagacatccccgaagtgtcgctcgttgccattctcgacgcggacaaagaagggttcctgcgatcggaacgttcccttattcagacgatcgggcgcgccgcccgcaacgtgcgcggtaaggcaattctttatgccgacaagatgacggactcgatgaaggccgccatcggcgaaaccgaacgtcgccgcgaaaaacagatggccttcaataaggcgcacgggattacgcccaagagcgtcgtaaaggccgtcaaagacatcatcgacggggtttacaagggaccggacgcagcgaaaaaagaattggcagtgccggaaaatctggacgttaccgacgaaaaaagcgtggcgcgcgaaattcgcgaaaccgaaaagaagatgctcgattatgcgaaaaatctggatttcgagcaggcggccgtttgccgcgaccgtttggaagcgctgaagaaattggtattcggcgcttcgaacgacggtctcagttaaatttatcgttgagcggcttaaggtgtcgttcgatcgagggcagcacgttcatgtcgataggtttggtgacgtactcgttcatgacgacttcgggcgccttgcagcagtcttcggcgaaggcgttcgcggtcgtcgcgatggtggggaggtaagcttttgccgcatcgtgtagccaccgaatctttggggcggcgtagtggccgtccgtgatcggcagctgagtgtctatcgacgcaggcgacgccgtcggcggcccgctccgcttcggtgagaagtttgtggcgatttctgcgttgaagtcgttgtcttccgcgagaagacacgcggcggccgatgaggctctcccgttttttcagaagagtcggcgcttggatggttgcgtcagaaaaagcgctctgtaatttcgtcggccgacgttattaagaagtcggccccccaggccgagggaggtcgcagtccgcccgcgatatacccccaggtgagcgccagagttttgagtcccgcggctcgaccggcgcggatgtcgcgttcgtcgtccccggcgtaaattgttttctgcggcgtgagatgaaggcgctttaccccttcgagaacggggagcggggagggtttcatttcgggtgtggtgtcgccccccacgaggcaccgggcgtgtcgaagcactgggtgactcgcgacgacgagctgcgccaagcgttccggtttgttcgtcacgatgccccagggtacgttgttttccgtgaggcgggtaagaagcgtctcaatgccggaaaagagaacggccggcgttgtgagacgtgcttcgtagtcagtgaggaaagcttttttgagtgacgcaaaatgcggcgcatcaggcgttatgcgcagcgcgcgccacagaagcccccgcgcccccgctccggcagcgttgcggatggcgggataaacgagcgggggcagtcccagtttcatacgcagagcgttcgcggacgccgttaattggggcgccgagtcgacgagggtgccgtcgaggtcaaaaagaattccgtcaacggccggcatcattgcggtttccccggggttaagtgcaacgctttcaggaggctcgaagccgagcgtttgggcgccggtgcaatcgggggctcaaggacggctttggccttttcgtgcgcgagttcttcagcatttttgtcacagagatcgtttaattcctgctgcagcacggcgacgatggcgtagcggttcacgagttcgcgcgccgtctgcaggaaggtgaggtaaagctcgcagccgcgcatcgagagattttcgtgcgaaatggaggtgaggagctttgcctgcatgtcgtcaatctcattgatgatgttgttggcgttgagactcacggattcgagagaatgccgtccctcgcgggattgactcagtttctgcaggtcgtgcgcgagcgtgaggagccgcttcttgggttcgccgtgataaacgcggtgacggttcgcgatgtgttcttttacgacggtcgtgaggcgctgtaggttgcggcctacttcgcgcatgttggtgtaagcacggtaaaagcagtaacgggcatcctgatcgagtttggtgtccgcggcccccgacccctgcgccatggaatagtaggcgcttcgctgttgcgagagagcgtcaaaaagctgcgtggcgtccgtctttaagcggcgcagaccgctttcgttgtcgtccaagaacgtggtgacggtcttttcaaagagatcgatcgtcttcgcaaggtacgtccccaccatcttattcaaagcttcgcgcacggagttgctgtcgcttgccttggggaaaaattcgtcgcccgtttcctttttctttgcgaggaagttggagcgcacgaggagcgtgacgacgagaagaatcaggccgcagcacatccagttgccgccgagcatgacgagggtgcagatgaacccggcgcaggttgcggcggaaagcgccgtcaggaaccagccggaaatgacggtgagtacccctgaaatgcggtatacggcgctttcgcggtcccaggcgccgtccgcaaaggacgaccccatcgccaccatgaaggtgacgtaggtggtggagagcgggagcttgaggctcgttgccgatgcaatcagaatggaactcaagactaggttcaccgatgccctcacgtagtcaaaggggagagcggcttcgccgcgctcgagtttgcggggtttgaagcgcgagtgcagcgcaatctgcatgggagcggggagaatctgacggacgaggttccccatcgtgagcgaactgcggacgatcatgcgcccgggaagcgatgagccgaattgctcgtgggtgccggactggctggaactcaggttgatcgacgtctgcaccacctgacgcgctttcttggagaaccagagcgtcatcaccatgatgaggccggaaaaaagaaggaagaacgtgggcgtgcccggatcatccaacagcgaactcatcatgtagacgccgggttcggaaccgtgagccatgaagtccatgacgctgtccagggcggccaaggggacgcctacgaagttcaccaagtcgtttccggcaaaggcaaacgccagtgagaacgtgcccgacaaaatgatgatgcggaaaacgttgaggttgaaggcgaggatgcagagctggaaaacggctgaaaagccgatcagcatcgtaagaaggatcgtatccgtgttgccgttgatccaggcaagccactcgggacgcatgaagcttgcgccagcagcgcccttcatgatgaggaagtaaaagatcgcggtaatcgaaatgccgccgaaaatgccgcccaaacggcggtacatgcgttcgaaatggaaggtgaagacgaggcggacgaggtactggacgacggaaccggcgatgaaggcgacgacgacggaaacgaggatgccggtgatgatggtgagggctttggaggtgttgatgaaatcgacgacttccgccagcgaagcttccgcgacccagagtttgtacatcgccgccgccatggcgctccctaagagttcaaagacgatggacaccgtggtggacgtgggaagccccagggaattgaaggtatcaagaagcagaacgtcgctcaccatcactgcaaagaaaatcaccatgatttccgcaaaggaaaacatctgcgggtgaaagacgccggaacgcgcgatttccatcatccccgaggagaaggtggcgccgagcaacaccccgacggaggcgacgatcatcgtcgtgcggtaggaggaaatccggcaaccgagagcggaattcagaaagttcgaagcgtcgttgcttaccccgacaaaaagatcaaaacaggcaagcagcgccaaaaacgccaagatgacgaggtagaaattttccatcgtgaaggggcccgtcgggagggcacaataagacagtctgagactattgcgccgcagtttgacggggatttatgacggttatgtgacaaaaggacggtctgttggataagaaaaagaaatgacggttgttatggtgcacggcagcgcaccaaaaacgctcagaaacagggaaatcgcaagatgccccgactctgggtgaagccgaaaggcatcagcgatccgatgcctgtcaaaacggccgatttcatcatggacacggcggtttactgcagtgctcacgtcatcgtgacagagaggttcgatctgaaaggccgcaaacacggtcccaagaaacagtgtcttcattatcggcgggcacagtatgttcagcggagggtggaagacaaggctcaccgcaacgggcagcgggtgagtcgaggtagcgccgggaatacgtcgaaactcgcgtttgacggttccggcgctgccactcgggccgaaaagaatcacagtcccggcactttccaaaacgaaaagcggtcactgcgatttgagtactacgtacagcatcggcgcccggtattttgttcggaaaatcttcaagtcctcgtcggtgacgacggacagcgcattgcggtaaaagttccggaatgcgcggagagaaatacctgtaccttaagttcgctcattaggctccatgcggagttgggttcaacagaacgccaattatctgagtgcagcctgcatcgaactgaagccgtcccttcgattgccaacgaggaaatcccttgactttagtcggggtagacctcactgaggcgacgcggtgcggtgagatgatcggcgcatggaacgacggcggacggcttcagaggtaaaggctacggatcgaaacccgcagccctcaggaagattgcagaatcaatcaggcttttttgccgccttttttgtgaccggatgtcgcgcccggtagtcctccaggaacttcgcaatgcggttgatggcgtccttcaattccgattcatgcggcaggaacaccatgcggaagtgatcgggcttgggccagttaaagcccgtaccctgcacgagaacgacgttggtggcttccagaagttccttgaagaactcacggtcgtcttcaatgggatacacctcgggatctaaccgcgggaacatgtaaagggtggacgtgggacgtacgacggagacgccgggaattgccgagagcatttcgtaggcgaggtcacgctgccgacgcaaccgcccgccttcgcccaccaaatcgttgatggactgatagccgcccaacgcggtttgaatcgcccactgaccgggaacgttcgcgcaaagcttcatgttggcgagcatattgagcccttcgatgaagtctttggcgttggatttgtcgccggaaatcaccatccagcccgcgcggtaaccgcaggcgcggtaggccttggaaagcgaattgaaactcaacgtcagtacgtcgcgcgagagacttccgatcgccgtatgtttgatgccgtcgtagagaatcttgtcatagacctcgtcggccatgatgacgaggttgttctcacgggcgatctgaatgatttcgagaagcacgtcgttcgggtacatcacgcccgtggggttgttgggattgatgatgacgatgcccttcgtgcgcggcgtcactttggcgcggatgtcttcgatgctcggaatccagcccttcgattcgtcgcagaggtagtgcacgggcgtagcacccgcgagacttgtgactgcggtccaaagggggtagtccggcatcggcaccaagagttcgtcgccttcgttaagaagggcttcggtagccatcgaaatgaggtcggacgcaccgttgccgaggtagatgtcgtcgagcgttacgccctcaatgccctttagctgtgtgtagtgcatgacggctttgcgggccgcgaaaattcctttgctgtcggagtacccagcggaattcggcagatttgtgatcatgtcgctcatcacttcttcgggcggatcaaagccgaaaacggccaagttgccgatgttgagtttgatgagttttttgccttcggcttccatctgccgcgccttatccataatggggccgcggatgtcgtagaggacgtgagccagcttcgaggatttcagaatttttttatcggccatgattgtgcgtctcaaaaatatcgtcgcccggagcgaaaggaatttgtcgtcggacgtctcggaagagtatcggcgaagatatcacttttgccgggaagaaaaaagaaacgaatcaagaaaataaggcagaactacatagactgacttggattgttggtcgtatacagcagttttggtgtgagaagtattcagtcaaacgaatgttttgtgaagaagcggcggtggaaaagcaacttccgtatcaatgaagaaataaaccacagaaaaattgatacgaaagttaggaaaaataaatgaaacttgacttttttaaagaaattacgacactctttctcatcggatctctatcaattttgggagcacgaaatgcagaaccttcatcgcacggcagtcggcattgacttgggggctaaatacaccggcgtaatgatcgcggacacggtgcccggaacctcgttgcggcaggaagacttgacagcttttacggttgtcatgccggatgcagagaagatgatgttggcgcagactcagcgcacggcgactcgacaccgccttcgaggaaaaaagcggttcaatttggcacgtcggttgacgttacttgtgatcaacgagaagctgacggcggcaggcgtggttcttccggaaaaagtacgcctgcggatgattgaggccgtgaacggtctgctgcggcgccgaggctattctcgtattgaatcagaagttaatctgcaagttctcgaagaccttgatccgcaatgctttgctgagtgtgatctgttgaagagtttcttctccgaagctacgcgttccttgatggatcaatgggaagaactcaccaacgacatgggccgtatccgagacttggatcgggtgctccaagatcagacaaagcaggacgtcaaagaagccttcaaggaacaggggcttgaaaaagagatgctgaagtcggcaacggaagcagtagcctccgtgaaagaagctgcgcatgatttggtaacgcagcaatttatgggacacaagcctcgcgccacctaccttcagcatttattgtcggatttgaaacgcggggattctcgtctcacgaaagttatcgaagttttcggcggtgtggagcgattccatcatgtgataggcaatatttccaatttgcagctgagggcggaacggtggtatttcaatgcaccccacatgatcaagggagattgttgggagccatgtcgtctgaagcagtctgtcattcgggcgttcaagtattttcatccgtcacaggaaggaaatgagaaggcgcgtttggcggagctcattcgggaactggagtcgacggatgatgtcttggaagcgctttgtaccattgatccgcaacggacgatccctccctatgaagatcaaaacaaccggcgtccgccggtcgatcagacactctatctgagtccggaaaaactcaatgatcggttgggtgagcgttggatgagctgggctaaaagtttttcaaaggcagatccgcgcttggaagaagaactcgatgaaattcttcgtttgacggatcgacggtcgcgaattgctcgggacggtactcttgtactttcggtgctgcaataccggttttcatatgttttgcagcgtgtgctggatcgctcgaagttgctggatccgtttgctatccgggcgttggcgcatggggcggttttatctgcctcccggcatcagttggcaatggtgatcggcggtcagcatgttgatgagtttcttgcttttgctgcggagtactaccgcgagatcgagggagctaagtcaggactttggatgccgcagaccggcagctatcttgaacggtcggatctgcatcctctgatgaagaagaaaattctgccaattttggttggaaatgtactgcagaagacggacaaggaaggtgagcgcttcatggctgatatttggaatgccaaagtgggcggacgcagcacggtgcgttcagtttgtgccgtcatagagaaaacgcgcaaagacaacggcggtgactttaatcgcctctatcagcgagctttgttgcgcaggaagttggggcagaaactttcgaaagaagacaaggtgtttgcggcgttgagtgacaaagttgatgcggtgacggaagtcattgcaaatacattgggactgtctgaggacgaggcggcaaaatttgccaatccctattcgttgtcgcagttatacaacctcattgaaacagaacgtgacggttttacatcggtatccgtggcggctcatcgggaaaataactggcgcatgaggttgacggaatgtaccgacaaggacggctccaagacgtggagtgccaactgctcgcgccttccggcagatgctgcacgtccgtttgatggggtggtgcgtcgtgtcattgaccgaaaagcttgggaaatagctaagcgcgtagcagagtctgttcggagacatgttactttccaaaatggtacggtggaaattccactttttgtggaggagaaccgctttgagttttcagcatcgttggcggaactcaaacacaatgcagcagcccgtaaaaagatgctcgatcggtcggaagggcagaccaaacgctggcagtccaaaatagagcgcatcaaggctgcaagtcgaggggtatgtccctacagcggtaaggctatcaaggcaaacggggagatagaccatatcatcccgcgcagtctgacgaaaaagaatgccggaacgattttcaatgcggaacccaatctcatttacgtttctcaagaaggtaatcagagaaaaggcaatcaggggtaccgattgagtgatctcaatgcgacgtatctgacggctgtgtttcgcacgaattcggtttccgaagcacaggcgacgatagaaaagacggtgaccaatctgcagaagcaggggcgtttggttttctttgatctgctgtcggaatcggagcaagactgtgttcgtcatgcgctatttttggaggactttaacccggcaaagctggcggttcttgaaatgctgggaaatcagcggaaagcccgagtaaacggtacgcagatgtggttagttcgctgcttggtagaaaaattgggcgaagaactggcgtcatggtgcgaacgaaccggtaatcagatccagtttaatgcgacggctgttttgcctgaagtgtccatgcagcttcgtgaagcattgggggaagtcgatgcaacaatgaagaaaacggatgtgcagccagtcgcttcacatacgattgacgcattctgcgcattggccgtggggtgtgacggtctttttgttgacgaaccggatttggctgtgccggaaaatatggttgcgttgtatccggagaactgcagtattgttcagatccaacgcaaaccgttagaagagaaatctcagttcggtggtgtgcctttgtttaaggacggaatctacgcggagcattatgtgccgctgtttacgctcgacggtcgaatttatgcgggctacatttccaagccgagcgaagacggtgtaatgccgggggctgtcgaggtatgcggcaaggatcctgtacagttgcttcagactttatcgccgtatctcactcgaccgtttgaaggggaagtttctaagaatgagtcgtatcgggttgatcgtttaaaggctgcggcgctcttggcggaagtggcacatcagtgttcgtcggaacaaaaggttgctgcggccggggtgttggagggactgtcgtattgcaccaagcgttgcccggtgattggcgcgttctgggattccgtgaaaaagaaattggtggccgaagacgtagcgttgaaggacgataagttcgaggtaaaacttaatctcagctgtggccgtcagtggtcgctgaaggggaaactggtgctgccggttagaagagaatgggcaaccctttatgcggaggtaagccgccaattgccggaagatgctcaggagccacaggtgcgcgaagtccttaaccggtattggaaacgtccggaaaaacgtcgactgcagcacgtgccggtgcatcgagatctcagtcttccggtgattgataaaccctcaggtggttttcggtttatgcgtcgtacgttggacggaaaccccgtgattcagattcaggtacccaacagcaagctgcagggatttgcgtcgaaaaacggtgtggctgactgggggaaggcggtactttttgaacgattccgttcgcaaaaaatcactatgtttgatgccaggtatttccccgtaaccgaaaccacctcaatgaacgaatggcgtcaagtgctgaacggcgaaatcaaagtttggttggcaccgggatctgcggttcgtttcaatgcgcggattgaggcgccgtttgctgctgtgagcagctggctgaaggccggaaatccggacatttcttgccggtctttcttggatcttccggggattttgaaggtcaaggatgccaaggctttctttgcagccttgcctcctgaagttcgtgcggtattgaaccaaccgcgagcttatctctactttgaaaatgtggggacaagggtttgtttctggtttaccgtggcgagcaataacgctgacattaaaaagacttacaaccaggcggcgatatgcggcatgtgacgatcgcatcctttggggccgcactcggagtttctggcagccgcctggttgtcactgaaaatggccagagctgggagacggccctttcgcggctgcgcacaattcgggtggaaaagaaaggagtgtctgtctcttcgaacctgattctggaatgcgcagcccgaggaatccgactttattttgtggactggcacggtgtcggtgtcgccgccgtgtccggtctgcatcagcacgcggtggtcagtgtgcgtgaagcacaatttgattgcgtgcgatctgaggcggctttggcattggcgcaggaaattatttttacgaaaattcgtaaccagcgtgcagttttgctttacttcagcaagtacttaaacaaggtttccccggatatcggccttcatttgcgacagactgctttggaactggagacagcggcagagtctctccgatcaggccccaagaagggggtgaaagagtggcgcaacatcttgatggggcttgaaggaagtgcggcaaccgtttattggcaggcgctccgagaaaccggatttttgccgccgtctttttgtcagcgggaagggcgagggtcagtcgagatcggtaacgctgcgcttaactatggctatgcggttttgcagagctatgtttggtcagctcttgacaatgcagggttggaactttatgcaggcgtgttgcataccaaacgtccggggaagccggcacttgtgttggattttatggaggagtatcgagcctgggtggtggacagaaatatcatcaaattacggcgccgattggaagcgtgcggagataaagggctgacgactgaactaaagatgttgattgtgaacgcgattgacgaaacgatggcgacctcgattgcgtggcataaaaagtccgttctgttggaaaatgttcttcagcggcaggcgtatcgcttggcaggtgccatggtgtcaggaaaaacgtatcgaggcattcgatttcggtggtgagagaacggtatgggaatgtatgctaaatacttggtctgctacgacattgtcgacaataagcgacgtaaacgtttttcagatgccctgaaggatttggggatggtgccaatgcaaaaatcggttttctatggcgatctcaagggggctgaggtgagtgcgttggcgaggttggcgtcagacgatctggatgagacggaggacaagtgtttttggttcccttgccatcttgagccagaagtaattcgtcagtgtcttgggtattctgggtgggactacaaggagccggatggtcatggagttatttaatcttccggtctctttgctgagacagtaccatttttgttcaagaataccttattttatgttggtcagggaactttctgtgaagggaggtccttggttgaagcaagggctttcttttcatgaaaaaaacgccatgctgaccaagcgccgcaatttggtgcattacggccttcctgtaggtggctttcggttcgttgcggatatcaaactctatgatgaagcattggggttacatgtgttagacgacactctatagtacccaccaaacgacactaaaacgaacccacccttggcgggggcggaaagcgccgaaggagggtacgatgaccgcaaaaaagcggaagatagaagctttctcacaacctcgaggaggcttcaaaaaaatgttcagtgcagaagacaaggcgctgatccgaacgctgtacgccgaaaagcatgtatcaattcggtgtatcgcgcagatggtacatgtatcacgaaatgccgtaagacggcagatacgggaagaagggaaagcgcgggcagcgcgtagcgccgcgggggcatttctgaaggaacatgccatcgatgttcaggagctgtatctggcgtgcgaaatgcggtgcccgccgctacgtcgtcggctcaacaaagactatcagcaagacattccgctgaggatgctgcagcggttctgcagcccgatgcgtgcagaagcgcagcggaagacgtatttggaagacgaagagggcaagcctctccgatatgagacgttgccgggacagcacatgcaggttgattttggagaaaaggacgtgctcgtcaacggcgcgtggttgcacctgcatttcttcgtctgcaagttaggatactcccgacgggtgtttgccaaggcctactacgcggagacgcaggatgcgtggctggatggcatggaatcagccttccgatacttcggtgggattccgtactgtattgtctgtgataacgcttccagtttggttcgagaccactatgccaacgatgatgccctgaagttcaccgaacgcttctaccactttctgcagtactggggaatcaaaggaatcgcaacggccgtgcggcatccgagatccaagggcaaggtggaagcaggcgtcaagtacctcaaggggaacgctgtcgtaggaatcgacaagagggatctggaagcctggaacgtgtggcttgagctctggtgtcgcaccgagtccgataagcggcgattgaacacgctgttcagcggcccgtttacaccgcgggaacgttggctgctggaagcgccggcgttacgtccgtacagcaagccggggatagccggtacgttctttgagaaacgcaaagtgggacgggacggccttattcgcgtagataaccgctactaccgagttgataacgcctacattggactggaggttcaagttcaacacggtaaagagaacatcattgttcgctacggcaccaaagaggttgcgacgctgaataaggccagagacgcatttaaccccggttttcaggctgcgtcaactgagatgccgcaggaagccgcgaccaagaagcagttggaaaagctcagcagtgatgcccaatggcaacaattgcggaacagcaaaaacgaactcaaccgtgacggagcggaatatgacgccgccgttaattggccccaacaggaggcggcatgacggaaagaaagactgatgaggcgatccgccaaaaagcatcgcgactacgcctgacgtttgtccgggatcacgtggcggaagtgttggatatcgccgataaaaccaagatgacgccgcgggaagtaattgactatgtcttcggcaaggagattgaacagcgggacgtcaaccgttacaagcaggcgcttatggcagcgcattttcctgcggtgaagacgttggaagattttgatttctccaaacagccaagcattaacccgggggtgattcgcgaactgaagagccttgaatggttggaagccggcgagaacatcaccctgtttggacctcccggtgtcggtaagacgcatttggcgttggggttgggacgtttggcggtggaacacggatataccgtccgtttctattccgcggcgactttattggggctactggagaaagcagtacgagacggtacgctggaagccaaactcaaagaactgtccaaaccgcagctgctgatcgtggacgaaatcggctacctgccgtatacaccggaagcagcgcgcctgttcttcctcgtcgtcagtcgacgctatgagaagaaaagcctcatcacgaccagcaatcgaccgccgtcggaatgggggctgatctttgcggattccacggccgccactgccatattggataggctactgcaccactgcaccgtgttgactatccgcggagaaagctaccggctgctggagcaaaagaaagcggggttgcggttaaaagccgcaacggtgaaggtcgctaccccgccgtcttccaacaaagaaaagaatcttttgtaacgtatctgatacagaatattgttacattgtaataaacacaaaattatgactactctaaataagactatcgataaatcagttatcgaagccgtatacgaaatactggataaagcccaaaatgccaatgaaaagattccggcgctgagagttatccgtgccactattggacgcagctcgttttctactatctcggaagccgttaaacaatggcgtcttgattggctacagagtaccggcgctttgccggtggcttttagccccgaaaacgcgaaagtcgtttccgacgctgtgtggtcggttgtgcagcccattcttgcgccgaagctgtcgaaataatcggtgttacaaaccacgtaactgtagctgttacacgaaaaactagggggactcaggccgcgcgacgcggcaggcagtagcctgagtctcgtcggcctacggcctcctcgcctcaggctactgcctgccgccaaaacccgcgctttaccgctgaaaagggtgggtccgttttaatgtcgtttggtgggttcatttcaatgtcgcttgacagggttacatggaatttgtgacggtgccgtgtttgcagaaaacggtgctgtatttcctttggaattcaagatgacggagaccccgccggcgattggtgccaaagtgcaacttgcagcgtacgccatgttattggagaaaagagagggaacgcaggtttctcgagggtttgttttaatggggaagcgcgggaagacttacgaagtgcttgtggatgcaaaaatgcggcaggaggttatccgcgtatcagctgccatcaggaaatcgcttgaaagggcacttctcccggatacatcggcaacagctccgcaatgttgccaatgtgagtatgccaatttttgtgcagatcgtttgtgaagaaagcaaacggggaactctttccagaattccccgtttgcttttaatccggatgtcagaagacagtggccggaaccaatcttgaatttagttgatttcagctcatcccgaaaaaatcgggacgacttcagctagattctctgaactaagattgcaagagtcatcataatgactttttcgaaaaaagccagtgtgttcgtgcattcctgttcgtttcgaactttcatacattggaaagacatgaaaatcgttttaaaacagagtgatttctcggaccctgcaatcttagttcagagaaaccagcaactgaaacttgaaagcaagctccaccgagggacgatgacgctcgacctgcaatcttagttcagagaaaccagcaactgaaacaccgcaaaggaaaagaggtatcgaaagtattcgtgcctgcaatcttagttcagaatgttgtttttcaaaactaagattgcattaaaactagaaattcaacttaaattagcacttgctgagcgctgctttcttggttacgtgcttgtgtttggggcgcgctttgatgacggcaggctttgcctgctttttcatgccgggctttttaatggcggtcttcttgcgaagtttcgccgcagcctcttcgtcggcggcgttgcgcactgggtgcttcgaagacttcttttccttgggttcgcgccagagaacgagcatcttgccgatcgcctgaatgcgggcggcgttcaatttgtcggcgagtgtcgtgtaaatttcgtcgcgttcttcgcgatcgtcactcggcacgtgaatcttgatgagaccgtgttcatcaagcgcgcgttcgacttctttttcgacggcgtcggtcagcccccgcgcgcccaagagaaccacaggttttaagtggtgggcggcgccgcgcagttcaagccgcttgtcgcgctctaaaataagttcggccataattaaaggctgtcctttttgtgtaaagtcaatcggaaagttccgtattctaccttcactatgcccaaatcattaaaaaagctcaagagcaatcgtgcctggattgagcgtcatatcaacgatccctttgtaaaaaagagccgtgccgaggggtatcgggcgcgttctgcgtacaaactcatcgaactcgatgagaaggaaaagatcctgcgtcccggcatcacggtcgtggacttgggggcggcgccggggagttggtcccaggtggcgcgcgccaaattgacgaaccccgacggaacctttaacggtcgtgtggtttccatggacattcttccgatggaacccattgagggcgtcgattttctgcagggcgatttccgcgaagaatccgtggaagcgcagttaaatgcgatggtggcgggcggcaaagtcgaagccgtcgtgagcgatatggcaccgaacctttcgggcgtcgcgatggtggacgccggagcgagcctgtatctgtgcgaactcgcgctcgattttgcggtgcagcatttgaccccggacggcatttttgtcgcgaaggtattccagggatcgggctactcgcagtacatcgaagcctgcaaaaaggtctttaaggtcgtgcatcagcgcaaacccgaggcaagccgcgattcaagttccgaaatgtacgtggtggggcgcggactgaagctgccgaagtaattggaaacaagattttccatcggagacgttgtagaaagaagacaaaacgacagatttcgtttagtctctttcctaacatcggaagattgcgcccaaatgaatcggcgggatgcgattttacgaaactgagaaccaatgcataaatcagaagaggatcagctttggacaaaaagatgctgagccgcatagcggtctgggtgttgattgcctttgtgctctttacggtcttccgtcagtttgacggtgatcgtcagatgcaggggctcgccacggatcagacgagctatacgcagtttatggccgacgcgaaggctggcaagatcagccgcgtcgatgtgcaggggcggcgccttaccgtgcgtcctacggaaggtatgccctatacgatcacgagtcccggggacttgtggatggtggatgacctccgcaagaacggggtgcaggtctacggcaaggccgaagacgaaccgtctttcctgcagcagattttcgtgagctggttcccgatgttgctcttgatcggcgtgtgggtctttttcatgcgccagatgcagggcggcaaaggcagtcccttctcctttggtaaatccaaggcccgcgtgcttgacgaatctgccaacaaagtgcgtttttcggacgtcgcggggtgtgatgaagccaagcaggacgtgcaggaagtcgtggactttttgaaggatccgacgaaatactcgcggttgggtgggcatattccccgcggcgtgttgctcgtggggcctccggggaccggtaagacgcttctcgcgaaggcgatcgccggcgaagcaggcgttccctttttctccatttccggctccgacttcgtggaaatgttcgtgggcgtgggcgctgcccgtgtgcgcgacatgtttgaaaacgcgaagaagaacgcgccctgcatcatcttcatcgatgaaattgatgccgtgggccgtcaacgcggtgccgcaatgggcggcaacgacgaacgtgaacagaccctgaaccagatgctcgtgcagatggacgggtttgaaaccggtacgaacgtcatcgtgattgcggcgacgaaccgtccggacgttttggatcaggccttactgcgtccggggcgctttgaccgtcaggtcgtggtgccgttgcccgacatccgcgggcgcgaacagattttgaacgtgcacatgaagaaggtgccggtggcaaccgacgttcagacggacgtgattgcccgtggtactcccggtttctccggggcggatcttgcgaacctcgtgaacgaagccgcactttttgccgcgcgccgcaacgggcgcgtcgtaagcatggcggacttcgaacttgccaaagacaagatcatgatgggcgccgaacgcaagtccatggtgatgaacgaagacgagaagaagaatacggcgtaccacgaatccggtcacgcgctcgttgcaaaactgatgccgaaatccgatccggttcataaggtgacgatcatcccgcgcggccgtgcgctgggcgtgacgatgcagctgccggaagaagaccgctacgcgtacgacaagcagtaccttctcacgcgtatcgccattctattcggggggcgcattgccgaagaagtcttcatgcaccagatgacgaccggggcgagcaacgactttgagcgcgccacgcagttggcgcgcgacatggtgacccgttacggcatgagcgacaagatgggcatcatggtttacgtcgaaagcgaaaccgatcccttcctgagccgcgccatgccacgccagagcaacatctctgaagagacgatgcgggcggtggatctggaaatccgacacattcttgaaacgcagtacgcgatcgcccgtaagctgatcgaagacaaccgcgacaagatggaagcgatggctcaggcgcttttgaagtgggaaaccattgatgcggatcagatcgacgacatcatggcgggaaagcccccgcgggaaccccgtgtgattgaacctccgaaggctgagacgaaggcgaaggagccggatgaaaaaacaccggaagccgaagcaaagccggtgacagaaccggcggcggacgacaagtcggcggagacggcaccggaaacggcaccggaaacgggagtgaagtctgacgtgaaggatgagtcgaagtcggacgcacagtaaccgaaaaaagcagtatccgaacgggacggtgggtgaagtgcctgccgtcctctttttttcaggatagagaaaatgacgttggcaacggaatggaaattgagaacccgagtgctcgatattacgacgccgcggattatgggcatcgtcaacgtgacgcccgattccttcagcgacggaggcctgcacgcgacgaaaacggaagccgtggcgtttgcgcaccggttggtggaagaaggcgccgacatcatcgacgtgggaggtgaatccacgcgttcgggcgccgcggacgtgtcgcctgaggaggaactggatcgcgtcgtcggcgtagtggaagcgttggcccgcgaaggcatcacggtgtccgtcgatacgagtaaggccgtcgtcatgcaggaagccgtgaaggcgggtgcggagattttgaacgacatccgcgcgtttcgggaaccgggggcagacgtggcggctgccacgtctggcgcgggactcattgcgatgcacatgcagggaacgccccgtaccatgcaggcggcgccgcattacgaagacgtcgttcgggaagtcgaggatttccttttaaagcaggaagcgcatcttttgagtcttggggcggaagcgggaaaagtctgctttgatccggggttcgggttcggtaagaccgtggaacagaatttccagctgctcgcggcgacggaacgctttgctcagttggggcgcccttatttgatggctttgtcccgcaaatcttccatcggggcggtgaccggggtgaaaaatgccgcagaacgcgtcgtcggttccgtcaccggggcgctccttgcggtggaacgcggggcgcagctcgtgcgggtgcacgacgtgaaggccacccgtgaagcgttggacgtttggcttgcgacgaaaaacgctgaagcggcataattaaaagatcggccgacgaaaacggcttttagttggaaaaatatatgtcacgacgttatttcggcaccgacggggtgcgcgctacggtgggaaccttcccaatgactccggactttgtcatgcttctgggccaggccgcgggtcgggtactgcgccgcacaagtccggacgggcgggctacggtgttgatcggcaaagacacgcgggtgtcgggctatatgctcgaagcttcgctgcaggcggggttttcctctgcgggcgtcgacgtcgttctctgcgggccgattccgacgccggcggtggcgtacctcacgcgggcgctgcgtctgacggcgggcgtcgtcatcagcgcgagccataaccccttccgcgacaacggcatcaaattcttttcggcgcaggggacgaagctgccggacgccgtggaacttgagattgaagcggaaattgacaagggatttctctgcgaagcgagtgaaggactcggcaaggctcggcggctcaacgacgccgaaggccgctacattgaattttgcaagagcaccttcccgcaaggcgcggatttg

SEQ ID NO: 114 - DNA, 16500 bp, synthetic construct
  source 1..16500: mol_type = other DNA
  misc_feature 1..16500: note = Synthetic
cttcgggataggtcgatgagtccgggcatatgttcgcctaacacccgcaaaaccggcgaaacaaggcgcgggcttgccatgcgcttgatggcataaacaaaatcatcggccacaagttcccgtgtgtccttgtagggaagatctaagggacttgaaagcgatgccgccgtcttttcaggtaggttgtggtagcgataggagccggtttcgtctttggcaaaagccgggtgaggggcaaagaaaatcccggatttcactttcagggtgtagcgactgacggcaatggacgaagcaggcgcattgcgcgaaagaactttcccgtcttgatctaagtactcgggcacggcgacgcactcgaccgaacgcgcctcgagcgtaaacgggcgctttaagtagtggtaggcgtacggcggctcgtacgtcaaatacacgaaaacgctttcgccctgcgagtacgacacttgaggatctaaggtcttggggcttaaggaaaatgtcgaaaaaattgtgttcgtcgcgtattcggaaaccgggcgcggcgcgttaaggacttcgcggcacccggtaagcgcaacaagtcctacggcccctaggagcacggcaaagtcgcgtagccctcgttttcccttcacgcttcccccggcacgttgacaaaatcaaacggttttgcaaacaaaaacacacggctattcaatatactttcgctttggcccgattgcaatgacgccggctttaagaacaggcggcgtgcttttcttttttacgttgcctttcgggaaactctttttcactgagcatgacaaatccgattccttcactgacaacgcgggtctattgggaagataccgatgcaagcggcatcgtttaccacgccaattacatccgttggatggagcgcgcccgctcggagtgggccagatccttggggctaaaccaagatgcgctcctaacggaaagccaccgtgctctcgttgtcgccaatctgacaattgcctacaagcgcccggcgcatttggatgacaccgtgacggtacgcacgcgtttaattgcccttaaaaccgcctcgtttgtggttgagcaaaccgtttggcgcaatcaaacgctattaacgacagctaacgtgcgtttaggctatgtcgatacgctcaccgggcaccccgttgccttttccccggacactcttacgctctttaagtcttaccttacatcggaggacgaacaatcatgaatgcttccgctgatatgtccattgtcaccttggtgatgaatgcctctcctgtcgttcagtgtgtactcgcgattttggtgatcgcaagtctggccagttgggcgacgattttcagtaaatggatcgtgctctcgcgcacgttgcgtcaaaccgacgagttcgagcagcgcttctggtcgggagccaatttaaccaagctcctggagacagcgacctcgcgcaccaatcgcacgagttccgaagagcgtatcttcgtggccggtatgaccgagtttttaaagctttcggacaagccggaagccgaaatgctctcgggcgtgcgtcgcggcatgagtgcggcctttcagcgtgaaatcgacgatttggagcgcgggcttccccttttagcctccatcggatctgtgtccccgtacatcggcctcttcgggacggtctggggcatcatgaatgcctttacgggcctatcgaccttagaaaacgtctcgcttgccgtcgtggccccgggcattgccgaggcacttgtggcaacggccatcggtctatttgccgccattccggccacggccgcctacaacacctttgccacacgtcttgaccgtattacgaatcgatttgatagtttctcggaagaattcatgaacattctggcgcgccagcgctaagcgcgaggaggtcactatgtccttaaggtctcttggcaaacacacgcgccgacgcatgatgagcgagatgaacgtggtgccgtacatcgacgtcatgctcgttttggtcgtcatcctcatggtcgcggctccctttgtcaatccctcggtcgtcaatctgccgagtgtgcaaaaagcgagcaaagcacccgacaaacccgtggaagttgtcgtgcacacggacgggaaaatctcggttcgcgcaggaaaaagtctggtgcccgtgacaatcggaacccttgttgaacgcgtcaaatcgcagggctcgcttcaaaccacacccgttgtcattgctgccgacaaagacgtcaattacggcaaagtcatcgacgtgatgaagacgctgcaaaaagccgatgtcgcgcgcgtcggtcttgccctgcaactagaaaacaccaagcgctaggaaataagcgatggctgacgagaagaaaaccgcgacgcctttaaaggccaaaaacgagcgcatcaccgacaagcccttagggtttgttgcggcgcttgttgcgcacgcggttttaatcttcggactgatcacggtctttcagtggaacacggaacccgtgacatttaccgccgagctttgggcgccggaaaacgcaagtgccgaggcgctgacgcctaagcctcaggaaaaagtcgcgcccgaagagacgccgattaccaagcccacacccgaagagattcaggagcgcatcgaccgcgaggcgcaaattcgcattgcggaagaagaaaagcaaaagaaacttgaggaactcgcgcgcaagaagcttcaagaagcgcgtcgccttgaggaacaaaagcgcgccctagaagccaaaaagaaacgcgaagaagcagaaaaacggcgccaagaagaactaaggaaagaggaacttgcgcgtattctcggcgcagctcctgtgaaaaacgctgaacgcgtcgggaaaacaaccggggacatgcgtgtaaccacccccaatgccggcacgtccggacaagccaattacgtggccaaagtgattgccatgctccgtccgcggattatcttccaagtgccgccgggtcttaagagcggcgagcgccaggcggtctacacggtttacctactgcccgacggctcacaggctaaacccccgaccttagagaaaagttcgggccttccggctttcgatgcggcggtagaaagcgccatccggtggtgcaatcccttcccgccagccgaggccggaaaggttcttccgaggaccattcagattacgtttgaccccgtggaaagcagccgctagggttagtagtagcaacggggcgaggcaatcgaatcgacaacggcaagccacgcagcaagtttcttgttctctttagcggcctttcgcaaggcctcaatcggaacaaattcttccgtgccgcccgctaaagtttgtgtcggaagagctcctcggatatcaaaggccgacaaaagagaagctttttccgcataccgaacgccgtctttttgcaccagacgacagacactgtcatcggtgcgaatatcatcgtcaatttcaacgtagtcgggattgcgtcgtgtggctaaatacccccaaaggaagggccaaacgacaaaggcaagccaaaagggcgccgttaaggtccaggtaagccaccccgttcccccttgcgtgtcttcaaagacgaaaatacctccgatgaaaagccaggcgctccacgcaagccacatcgtgcgggatttttcgcgactgattttctgtttacggcgtgccatgttcggtttctcctaacacgcgggcgcgcaactggccgcacccgccttcgatctcttgcgcagcgctttcgcgaagcgttgccacaaaacccttttcgcgcaaaatcgtaataaggtcttgcatgtgcgagggcgcaggtcgcttaaaaggcgaacctgcaacggcgttgacggcaatgaaattgaccatcgcaaggcgcggatctaagagctcggcaaggcgcttaacgtcctccttactatcgttaacgccttcaatcagcgtccactcgatttgcgccgggtacttggtgttttgtgcgtactcaagggttctttcgataagttcttccacgggaatatcgggcgcatgcggcaaaaggcgcctgcgtttcgcttcatctgtcgtatgaaggcttaacgcaaaggccggttttacggaccaagtcggcatagcatcaaaaagacgcctgtcaccgacagaagagatcacaatctccttgtgagccattccaagagcatcccccaagaaccgcacggcctcggcgacgtttttaaggttgtgcgacggctcgcccatgcccatgaaaaccacctttttaaggcgcggattgatacgcaacgcctcacgcacctgaaagacgatttcggcacttgtcagttgacgaatgagaccgttttttcccgttgagcaaaataggcatccgacggcgcacccgacctgagtggaaacgcaaagcgcatcgcgcgggagtattaccgtttccacgcactgcccgtcctgtaggccgattaaaagcttacgagtaacgcccttaccctgcgcgacaatcacatgtccgaacgagtcgaggttctcttgcaaggtcgggattatttctcgtaacgacttcgggtaggcgccccaggccggagcgtcccacgaagcgcgtccgaaccacgcccgaaaaatctgacgaatgtgcgagctcttggcgcctgaaagacgcaagtcgtgctcgatttgaccgatggaagcgatgttacgtgtcggcatccgcaatcccgagttctttgagtttgcgcgtgagtgtgttacgcccgacaccgagttttttcgccgcgagaatgcgctttccgtgcgtctgatctaacgcagcccggtaaagcaccgtttcaaagtcgcgcgtcaaggaatccatcacgttgcttttcccgttatgaagcgcagcgtcaacggcacatcgcagggacgctttccagtcgccggcgccgcctgccgaatcctcagttggcgcatcgggaagattttctgaagcgaactccgcgggaaggtcctgcgcttcaatcacttgcgagggagccataaccgtgaggtaattacacaggttttcaagttgcctgacattgcccgggaaaggaaagactgcaatgcgctcagaggctttttgagagaggtgctttttttctgtcttcaggcttttagcggcaagcgttaagaagtgttcggctaaggccggaatatcctcggggcgatcacgcaaaggcggcaagcgcaagcgaatgacattaaggcggtgatacaaatcctcacggaaaagaccttctcgcacccgctcttctaggttttggttcgtagcagcaatgacgcgcacatcggcatgtacaagggttttgcctcccacgcgataaaaacttgcatccgataaaacacgcaaaagtttggtttgcatcggcatcggcatatcgccgatttcatctaaaaagagcgttccgcctcgggcctgttcaaagcgaccgatgcgttgctcacttgcacccgtaaaagcgcctttttcgtgtccgaaaagttcgctttctaataggtcggcgggaatggccgccgtgttaatcgcaataaagggagcatttttgcgcggactatgccggtgaagggcgcgagcaaccagttcttttcccgtaccgctttcgcccgtaatcaacaccgtcacatggctttgcgaaaggcgcccgatggctcgaaagagctcttgcatcgcaggcgactgcccgacgatttccgagacaagtgccggggcttgctctttgggctcagggtcgttgcggcacgcttcttcactggcgcgcttaattaaactcacagcggccgtgatatcaaagggtttggcaaggtactcgtaggcccccccctcaaaggccgtcacggcgctttccaaatcgccgaaggccgtcatgatgatgacgggaagttccggatatttttctttgacgcgacgcaagaggtcggttcccgtcatgccgggcatgcgaatatcggtcaccaacaccgccgggggctcactatcaagtgcttgtatgacggacgcagcatcttcaaagagacgataatctaccccttcgcgctctaaggctttacctagaacccagcgaatcgaacggtcatcgtcggcaatccaaatcgacggcatcactgtctcccttcgtgcggaccgtcaagcggcaagacaatccgaaaatccgtgcgtcctgcttcgctttcaagttccacttcgcctccgttacgctcggcataggtacgaacaatcgaaagacccaggcccgtgccgtgcgctcgagtggtgactagcggataaaagattttttcgcggattgcagggtcaatacccgggccgttatcaataacgtcgatgacaaccgccaagcggcaacggcgacgccgaatcacaacgccgcgcgccacccgggttttaagcgtaatgcgagccgaaccggcggcaatgcctttttccatcgcttgtgcggcattgcgcatgaggtttaaaaaaatttgcgtcagttgctcgcgatcggcctcaaatgtcggaaccgacacatcgtaatcgcgcacaaccgtaaggccggcgggaaactcagctgacacgagattacgcacgctctcgagaatctcatgtaagttcacgtttgttacgtgtcgttcgtctcgatagggctccaaaaggcgatcgacaagcgcacgcaagcgatcggcctcgcgaataatgaccccggtaaattcccgaagagcaggatcgggaagttcggtctcaagaagctgcgccgctccgcgaatgccccctaaggggttttttatctcgtgcgccaggttgcgtaagagaacgcgacttgcgtcatttaatccctctttttgttcctggcgatccaaggtaaaagcttgttcggcctcgctcatttccaaaagaagctttccgggctccgggaccgaaagaacggcaagtaccgaacttttcggagtgcctgccacgggacttagccgcacgagagcactgcaaagcgaggccttttcagcatcggcatgtagcgcccgaatccacgtctttaaaggcgggaaaaactgcgacgcatcagtcccaatgaggttcttacccgaagcgccgaaaagggtctcggctgcctcattgcaccaaaggatgagcccgtcgttgtccatgagaacaacgcccgtcgcaagagactggcttaaaagctttgcgctatccggtctcattggtcctttagccttattccgtgttcgttagagcgcgaaatacatcgcgtattcacagggctgcaccgtctgacggtactgcgaaatctcgcgacactttaactccaagtaactatcgattaaatcgtcggagaacactccgcctcgcgttaagaactcgcggtcggcatcgagcgcatcgacggcctcttgcaagtcggcacacacgacggcaatcttggcgttttcctcaggcggcagatcatacaagttcttcgttgccgggtcacccggatcgatcttattttggataccgtcaagacctgccatgagcattgccgagaacgcgaggtagggattagccagagggtcggggaaacgcacttccacacgacgcgctttttctcccgagacgtgcggaatgcgaatcgaggcggagcgattgcgcgccgagtacgccaatttcaccggcgcttcaaagcccggcacaaggcgcttgtacgagttcgtcgacggattagtaatcgcatttagggcacgcgcatgacgaatgatgccgccgatgtagtaaagcgccatgtccgaaaggcctgcatagccgttgccggcaaataggttcttgctgcctttccaaatcgactgattcacatgcatacccgatcccgcgtccccggtgatgggcttaggcataaaggtggccgttttgccgtacgcagcggcgacgttccaaaccgtgtacttgagaatttggttccaatcggcgcgttccacgagcgtagaaaagcgcgttccgatttcacactggccggcgccgccgttttcgtggtgatggatttcgcaaggaaccccctgttgctccaaaagcgtcatcgcctcggagcgaatatccgtcaaactatcgacgggagcgagcgccaaatatccgtgcttggtgcgaggacggtggccgagattgccggcgtcgtagtcgatgtgactggaccacgcgccttcgtcactacgaatcttaaagaacgtgttttgcggctcacagccccacgtcacaccgtccaaaataaagaactcgggttccggcccgaaatacgctttgtcgccgattcctgtggatttcagatagctttccgcacgatgcgcaaccgagcgcggatcacgcgaatacccgttcccggtatcgggctcaataacgtcacacgttaaaacgagcgtgtcgtgctcgcgaaacggatccatatgcgccgtattcgggtcgggaacaagcaacatgtcgcttgcttcgattcccttccagcccatcatcgaagagccgtcaaagggctgtccgtcttcaaaaagggcttccgttacgtgagaggccggcaccgtcagatgctgctctttgcccaatgtatccgtaatacgcaagtcgacgaacttgacgtcgttgtcttcaatcagtttgattacttcaaccggtgtcgtcatcgagaaaacctcttaataaagaaatctgtaaaagctccgccaccaccaacacagatgctgtgcggaaatacgcgagacgaattctaaatggggcgcgccctgttttggtgcatatccgacttttgatacgatttctttcaaaaaaacgaaagagaaatccgagcactgcttataatctgctttgtacgtgggggtgtcctggcttcgacggggcgtaggacgctgcacggtgcatgccgaggtctggttcctcgttaaacaactagaaaaaatataaacgccaataacgagcgtttcgctctcgccgcctaagggccgcgagcggtgcaccggaaggtctctggtccggcttgggtaaaaccaagggcaccgtcatatacagagactaagaagcatcggagtcatgacgatacttacgaaaatcttagtgacttgctctcggtaggcccgtccatcggcagtatcgaaagtgaaatttaaatcattgggctaagcatgtagatccggcggaagaatcgtttcggacaggggttcaactcccctcacctccaccacctaacactctgagacaccaagataatcacgaaaaatctcctctcttccgccgagtaggggctgtgtttgcaattccccacaaaagctgtcacccaaaagttccgttgcctccttgccttaccgcccaaagtcccgcttctggtgtaggtataaatcttaaactttgacagattcaatcttcctgaccgagagcagttctgcgaccgattccgccgagtcgaacaattccggaaagccccgttttgccaccaagttcttatctttttccgtcacgttattcagaatcaagtcgcctttggatgtcttgactagacggattttttggaaccgtttcaataactccggaactgtgtagcacgtccttaaatccgtgtcttccgtcgtcttctttcgcatccgcgatcactactgtccaaaacgaacctctgcgatgttggctaacaagttgatttaatttaggaaataagcacctcgttgtctgagggggtgtttttagaggtccagcggcaattgatccaagccgctcatacagttttacggccttgttaatctctttttgcgtgtacatatcttgaacctcgaattattaattcttaatccagatttttgtccgcacctccccgtggcctactttagcgcagcgcctaacaccaaatgggggatgttcatttttagtgacacattcatcgcgaccgcaaaaactcagtggattatttttatgcgacgaaacggcctacttctgtacgtccgccaacattaaaccgtggaaaaattaatagcatgttgtacactcatttccgaggtctattgcagagattgattgttcttttttgacagttcgaactaaaaaaaacacacagcgaaccagaaaatatcgcaactactggagacatagaatgcaagccaagaagcatcgcactgccattgggattgatttgggcgcaaagtacacaggagttgtaattgcgaattacaccccaggagaagaacttactcaagaggatttaaccgctttcacggtcgtaatgccagattctgagaaaatgactttatctcaggcacaacggacagcggtcagacatagaatccgtggcaagaagcggtttaatctcgctcgtcgtctggcaaatcttctaatcaacgaaaaactggctgcatctaacatatcgctaagtctagaagaacagaaaaaaatgaccgaagccgtaagcggtcttcttcggcgtcgtggctattctcgcatcgagtcggaaattaatttagatattcttgaagaaactaattctgaatggttttctcaccatgaggttatgaagcattatttccctgactccaatcgtcctcttgccgatcaatgggaagatttaacaaataaaacagacagtattcgcaacctagatagagacataagtaagttttcagttgcagatttcaaagccgcatttaaaaaaatgggtcttgaaaaggatgaggtcggtgttgcaaaagatgctgcttgtgctgtcagggatgcagctcataacatcgtaactcaacaagttatgggacacaaacatcgcgtgaagtatttggctgatttaatgaaggacttgacgcgtggagattctcgactcaaaaaagttattgaggctttcggcggagtggagcggttccatcatttaatcggcaacatttcgaatctccaacttcgagcagaacgttggtatttcaatgctcctaatatgataaaaggagacgagtgggaaccgggcaaactgaagaaatccatcattagagcttttaaatattttcatccctcgcaagaaagagatgaaaaagagcgcctagcaactttggtttctgaactagaacgttctcaagatatcattgagacactctgttcaattaatccggaacgaaccattcccccgtatgaagaccaaaacaatcgtcgccccccattggaccagacattatttttggatccaaggaaactgactaatcattttcaggataaatggacgatttgggcaaaggctttcgccaaaactgaaccagagttggaagaagccctagagcataatttggaacaaacagatcgtaagtctcggattcgccgagatgggaatgaacctcttcctaagttgcaataccaatttgcctatattcttcagcgggtgctggatagatcacgacctcttgatccctatgctattcgagcacaggctgacggaattgttttgaaaaatgctaggaaccaacttgaatctgttcttggtcaacaacatatagatacattcctttcgttcgcttctgattactatgcggaagtgaggtcggccaaagttgggctttggttgccccaaacaagtcttttcttggaacgtgcagacatacacccgccggtgaagaaaaagattctttgtcttttggtcggaagtgttctacaaaatcagaagttggggaaacagtttctagatgaggtatggaaaaagaaggttggacggagttcggttcgctcaatttgttcatctgttgaagttattcgaaaaaaatatggaggagactttaaccgtctttatagaggtgctctccttcaatgggaacgtaaagagaaactgtctgccgaagaaaaaggctttgtggcattaagccagaaggtcgaagacgcgtcgacggtcattgctgatactcttggtctgtctgattctcaaaagaaacgtttttctaacccgtattctttggcccaacttttcacaataatcgaaacggaacgcgatggttttactactgtttctgtggctgcgcataacgaaaataattggcgcatgcaaatgcatgaatttctagatgagaatggtaacaagagggaatgtgcaaattgcgcaagacttccagcagatgctactcggccttttgatggggttgtccgccgaatgattgatcgcaaggcgtgggaaattgcacagcgcgtagctgagtcgattcgtagtagcgttagcgacaatcaatgccaagttgaaatcccactcttcgttgaggaaaaccgattcgaattctcagcgtctgttgccgaattaaagtgcaacacgaatgctagaaaaaaacttcagagcaattccgaagtacagtacaaacggtggcaggacaaaactgagcgcatcaagaaagccagtcactctatttgtccgtatacggggaaggtcattggtcttaaaggtgaaattgaccacatcattccgcgaagtgcttctaaaaaaagggcaggtactattttcaatgctgaagccaatctcatctatacctctcaagagggaaatcagaggaaagggaatcaactttatggtctcagggaccttgccgataattatttaaaagaggtatttcattcagactcattggaagtaatcgaacaacggattgaaaagacaatcctagatttacaacagacgaagcgacttcgtttctttgatttactctcggatgatgagcaagcatgcgtgcggcatgctctatttcttccaagttccagccaggcacgacaaattgtcgttgaatctcttgctaatcaaagccgagcaagagtcaatggcacacaaatgtggcttgttcgtcaacttatcgaaaaactcgacaaggagttagcctcttggtgtgcgacaacgggcaaccatatttctttctgcgcattcccagtttctcctgaagtctctatgcgtcttcgtggaaatctaggtgaatacaaccctccgatgaaaaaaatggatgtgcaacccgtagcttctcattctattgatgctctttgtgctcttgccgttggttcagatgaggagtatgtcgtagatccttctctctcagggatttccgatgtcagaaagcttgcggagatttatccaaaagaatgtgaaattgtccagattcaacggaaacctctagaaaataaaacgaccttcggaggagttccgttgttcaaagatggcatttactccgaaagatatcttcccatatttacacatggcggaaaagtctatgtggggtttgcatccaagcctgacgatgctggggcaatgccaggagcgctcaaagtcggtggaaaaaaaacagagttgctgttgcaactgctctcgccatactttcaaagaccttatgacggagatatagaaagaaacacaacttacaccctgaatcgttccaaggttctggggctgttttttgatgtagcgcataagaagaccacggacgaaaacttacaaacggctagtctcattgaagctctgagtttttgcacgaaacgtgccgctgtatcatcggttctttgggatgcaaaggaaaaaaagataatttcagaagagagattttctaaaggcaaagaatggcagttaaaagtaaagatttcgggactgcgtcaagtccaattggaaggaaaacttacgttgcctgtaaaaaaggaatggtccaagatttattcagcgttgacagcaacaacctctgaagaagatctccaaaccgtaataaaccgtttctggaaacgacctcacaaacaaaagctaagccacattcccacgcatagagaactgagcttgccgattctcgattcaccttccggagcattccggattaggcgaagaacgagggctcagcaggatattgttcaggtacatgcagctaatgcaaaacttgctggttttgctcaatcaaatggcataacactatggaagaaagaagtgctctttgagcggtttcaatctttaaaaatggccgcctttagtgcgcgctacttccccgaaacagaaacaacctcgttgcacgagtggcgacaagttttggacggagccataaaggtttggcttgagccagggagtgctattcggtttaatgtcaggattgaagcgccgtttgaggacgtgagaagatggattatggctggcgagccgtccatggatatttcatcctttcttgaaattccggcgttgctcaaactgaagtcgaaaaaagatgtcaaaacaaaagctttcttttctgcatttccgccagaacttaaggatattctcgcctatcctcgagacaccatagttttcgaaaacgtaggagagcgagtgagatttcgttacacagtaattagtaacaaaccaagcattctaaaggcttacgataactccactaatccatgaggcatttaacgatttcctcctttggtgtttctcttggcgtcactggggagcgtcttgttgttacagaaaatggggagagttgggaaactgcgctttctcggcttcgaacaattcgcgtggagaaagaaggggtttcaatttcctccaatctcatcctcgcttgcgccgctagggggattcggctttattttctggattggcgcgggattggtatcgcagccgtcgcgggtttacatcaacacgccgtcgtgaaagttcgtgaggcgcagtttgagtgtatccactctcaggaagaatcactcattcttgccagagagattgttttctcaaaggttcgcaaccagcgagcagtattgctctactttagtaaatattctgccaagacatcagtggctgtttgtgagcaattacgcagaggagccgcactcctagaggatgtcgcacgggagctgttagttgaggttgttccttcgcagaaaaattggcgcaatgttctcctgggacttgagggagttgctgcgacgctttattggaaggcattacgagagacggaattgttgccgaagtcttttttccaacgcgaaggtcgcggctcagtcgaaattggcaattcggcactcaattatggctatgccatcctccaaagttatgtatggtcagctcttgataatgcaggacttgaactttatgcaggattgtttcatgtaaaaagaccggggaagccatctctcgtacttgatttcatggaagagtatcgagcttgggtcgtcgatagaaatataatcaagttgcggcataaacttgaggactcagccaagaaaggattaactatcgagttaaagaaaataattgtggaagctgttgataaaacaatggcaacgccgttgtattggcataaaaaatcccttcgacttgagaacatacttcagcgccaagcgtacaggttggcgggtgccatcgtggacaagaaagcgtatcgcgggattcgatttcgttggtaaaagcattatgggaatgtatacaaaatatctcgtttgttatgatatttctaacaacaaacgccgtcaacgcttttcagatgttcttaaaaatctggggtttgtttctatgcagaaatcggttttttatggtgatataagaaatgcagagatttctgcactcgctcgtgccgctaccgagttgcttgaggcgaacgaggataggtgtttttggtttgcttgttatctcaaacccgacgaaatacggaagtgtctcggctatgccaattggaattacgtggagccagatggttatggagtcatttagcattccggtttccaatttaagacaatacttattttgtcccagaattccttacttagcattgatgaagggactcaatgtaaaaggtggtctttgggtacatcagggactgtcctttcacgaacggacagaaatgcttacgagacgccggaatttgagtcattattctttgtctgcaagtagtttccgattcgtggcaaatataagactttacgataaagaactaggtctccatggggtatgcgatggggctctttacacgaaagagggtagggtttatccgcttgaattcaaaatgacagaaggtcaagcacctaccttggctacggaaatacaacttaccgcatacgccatgcttttggaaaagaaagaaaatattgtaatcgcttgtggttttatcttgatgggaaagcgcggaaaaacctacgaaatccaatttaatcaaactaaacgtcttgaggttttacgagtagttgactcaattcgcaaatctctcaatctggccgtaatgccaataacgccagccacatctgctcagtgttgccaatgcgagtatttgaacttttgcgcagatcgcatgtgactgctgcaaaatcccacggaatccggacggcggtttcacaaaggcaaccgcctggtttttaggggttaattctggcttcaaaaacgtgatacctgtcaagcgtcctctgaattgacccccgaaaacgtcgtttaaattgagctcctgttgttaatcagtcaaagctgtaccaacagccctggctgaggttaaaagtccttcctttcgtttctccaggggacggtagctgtctccgcgaatcacgatgatttcactgtgatgcaacaatctgtccagcatagcagttgtcagggtt

SEQ ID NO: 115 - DNA, 24242 bp, synthetic construct
  misc_feature 1..24242: note = Synthetic
  source 1..24242: mol_type = other DNA
ttgtaatggtacaggtactattatcaccaacggttgtaagacctgcggtggcactggccgtgtaattgacttaaagaccttatcagttgatattcctgctggtgttgatactggcgatagaattcgcttaagtggcgaaggtgaggctggtttaaacggtgctggttctggtgatttatatgttgtaatcgaagtaaaagatcatgagatctttactcgtgatggcaatgatttgtactgtgaagtaccaatcagctttacaacagcagcactaggtggcaaggtagaagttcctacattagatggtcctgtaaatattacagtacatcctgagacccagaccggcgtaatgatgcgtctgtcaggcaagggggttaagtcttataactcaacctttaaaggtaacctgtactgcaagattgtagttgagacacctgtaaacttaactaaagaacagaaagatctgttaaagaagtttgaggaatcattaaacggtgatgacaaagtttctacaacaggggatagtaaaaagaaaactgacaccgcagcgaagcataagccaaagtcagcaggcttcataaaaggtgttaagaagttctttgaggatctatcaagttaataatgtgagttgtacagctaatcataagttttcatattgaactaagttatagattaggttattatcaactcatatgatcatgaggacgcctgatgtaacagttaggcgtcatttttttatattttaaattgaggctattatcatggatcagactccaatgactcctcgtggcgaggatttacttcgcaaagaattacagcgcttaaagacagtagagagacctcgcattgtagctgcaattgccgaggctagaagccatggtgatcttagcgaaaacgcagagtacgatgcagcaaaagaagagcagggcctttgcgaagcaagaattaaagacatcgaaggcaagctagcaagtgctaacgttatcgatgtatctaagttaaagactcctaacggtggcaagctaaaggttatctttggtgcaactgtaactgttgttgatgttgatactgacaaagagacaacttacagaatcgtaggtgaagatgaggccgacattcaggctaacttaatttcatacaagactcctatcgctaaaggcttattaggcaagtgcgaagaagacgagattgaaattaagatccctaagggaacaatctgctacgaaattgaaaaggttgagtatatctaagagataactaagaccttttgatgtaacttaaaattctagttacgcaaccattgataagaaaacggaagtactcaaaagtgcctccgtttttttgatcttaagataattgtaggctttaaaagtggactttaagtagactttaaagtagactttatctagaggtaacgattatgaatttaggacatgaaaacgaaactcttgagttcaaagagagtttaggtcagcttgacaagggtctaaagtctataactgcaatgctaaacagatctggctatggttgtgtttgctttggtgtattagacaatggagatgttaaagggttaaccgttggtcctaatacattaatggatattagaaataagattaagtttcttatcagtcctcaggctctggttcatatagaaaaagtgacagttggaaagtttgattacatcaaggtaaccgctcatggctcagatattccttacagttgcgatggtcgttactacattagaaatgtggctgcagatgagactgtatctaatgaaatattacgcaaaatgttaactacatcagagactgacatcataagacgcataccttctgaagatcaagatcttacttttaaccaatttgatagttttatgtctaagtatggcattcatacagaatcctctattcctttccataaaaattacggtttaaaaaatgatgaaggtaagttcaatctaatggcttatctgttgtctgatcaaaacaatgtaagcattaaagttgttaaatttgaaggtaccgataaaagcacaatgtcagagagaacagattttggatctcaatgtcttttaagatctgttcaagaagttcttgagtatgtaaaagtaaacaatgcagtaaaagtagatctgtcagacggtataagaaaagaaacaccacttttagattatgaagcttttagagaagcttggataaatgcatgtattcataacttgtggattgagatgattcctccaattgtttttatatacgacgatagattggagatcctctcaaatggtgggttaccatatggattatcatgtaaagaattcttttgtggtaaaagttttccagtaaatagagaattgtatgctatttttaaatcaactactttggctaatgaaagtaacggtatatctacaattgtttctaaatatacaaaagatgctttttcaataggtagtggtttaattaaggtgactctaaactttaactttgaacgtgatgatgttgtagcacgaaagcataaagagaaagctatttataaactgaccatcaagcaaaagaagatcttagagttgttaaaaggtaatggcgaacttactcaaaaagagctgtctgataagacctcagtaagtttagcaggagtgaaaaagatcatgcaaaagttacaagagcttaatttaatctcaagacgtggggctaaaaagaatggtcgttggattgtagcatcccgactgaaataaaaaacgccttattaaaaggcgccttttacaatttgagtgaacctagaagttcaacttaaaactagcgaggaagaatgaatctgctgtcatcttttctctgtctgaatagaactgcaattctaccaactagagatactaattcagcattaacagttttagcagcagtttcagcctgctcttttctaccttcaccagcatttaaacggatcttgataagctcgtgatgctcaatgctgctgtctagctctttaagcactgattctgaaagaccgtcattgcctagtaagacaactggctttaatgaatgagcttgtgcctttaaaaactggcgctgatgtgaattcaatgacatacaaaacctataataagaaaaaatatctgttaaaagcttaatctattgtgatttagacttcgcataaatgttgtgcaaattgtataatattatcgagtaattttaaactgaaaaatctatagtaatatttgggatttaaatttaatgccagcaaagaaaagaactgccagccaaactagatggttacaggaacacttttccgatccttatgtgaagcaggcccacaagttaggactgcgttcacgcgcttcatttaagctagaagagttgcagaaaaaagatcacctgatccgtcagggtaatatcgtagttgatcttggtgccgctcctggcggttggtctgagtatgccgtaaagtgcatcggagatagcggtcgagttatcgcctgtgacattctgccaataagacctattcgtaacgtacagtttttgcagggtgacttcagagaagatgaggtcttcaaaaaactgtattcaatgatcggtgtcggtgctcatgtagtactctctgacatggctcctaatatgtcaggtaacctagctatcgatcagccaagagccatgctgttatcagaattagccttagatatggcaagacgtgtactgcgtattggtggtagttttgctgtaaaagttttccagggtgtaggttctcaagagtttttaaaagaattacatcaggactttaccactgttaaagtaagaaaacctgatgcatcaagagaccgttctcgtgaagtttatatggtagcaatgggctttaaaggtcatcctttaaatggtgttgcaccaggtgctgaatttgaagagtctgaagataagactttggagtaagtgagtaaatatgacaaaaaacctaatattatggctagtcattgctgtgattttaatgactctctttgagtcatttaactcatcagacaattcaggtcgtatggaagactacactagcttcgtaagagaagtgcagtcagatcagatacaggaagttgtatttgatggcaaggttatcaatggtgttaaaaagaacggtgaaagattcttaactgttatgccattgagcgatcctgcaattatcgactctcttttatcacacaatgtaagagcatctggtactaagcctgaagagcagagcttattgctctcaatctttgtgtcatggttcccaatgctgcttttaattggtgtgtggatctttttctcacgtcaaatgcagggcggttctaaaggcaatcctctgtcatttggtaagtcaaaagcaaaactactctctgagaatcagattaaaacaacctttgatgatgtagcaggttgtgatgaggcaaaagaggacgtagttgaattagtagacttcttaaaagatccaaccaagtactctaagttaggaggccgcattccacgtggtgtgttaatggtaggtcctccaggtaccggtaaaactttattagcaagagcaattgcaggtgaagctaaagtgcctttcttctcaatttcaggttctgatttcgtggagatgttcgtaggtgttggtgcttctcgtgtaagagacatgttcgctcaggctaagaagaatgctccatgtattattttcatcgacgaaattgatgcagtaggtcgcaagcgtggcgtcggcatgggcggtggtcatgacgaaagagagcagaccttaaaccagttactagttgagatggatggttttgaaggctttgaagctgtaattatcatcgctgcaactaacagacctgatgttcttgatcctgcactgttacgtccaggtcgttttgacagacaggtcgtggtaggtttacctgatgtacgtggtcgtgagcagatcttaaatgttcatgtaaagaaagtacctttaggtaaagatgttgatactgcaactatcgcaagaggtaccccaggcttctctggtgccgaattagcaaacttggtaaacgaagccgccttaaacgcagcacgtcataacaagcgtgtagtaagcatgaatgagtttgaagaagctaaagataaactcttaatgggtgctgagcgcagaagcatggctatgaatgagcatgaaaagatcaacactgcttatcatgaggcaggtcatgctatcgtaggtaaattggttccagagcacgatcctgtatacaaggtatctattattcctcgtggcagagctttaggtgtaaccatgtatcttcctgaacaggataaggtatctcaaagccgtatcggtctgttatcaaacatttctactctgttcgctggccgtatcgccgaagagttaatgtttggtactgatgctgtaactacaggtgcttcaaatgatattgaaagagcaactcagattgctcgtagcatggtaacccgttggggcttctcaaagagattggctcctatgcagtatgaaaaggacaatgaaggttctgcatacttaggtggttcatctactactatgatttcaatgtcagatgaaactgccaagatcatcgatgaggaagtaacagaaatcatcaactcatgctacaagaaagctcaggatttacttgaagctaataaggacattcttgagaatatgaaggatgctctattaaagtatgagaccattgatgctgatcagattgacgatttgatgaatcgtaaagaagttcgtccacctcgtaaggtaggagatgctaaatcttcagatcagaaatcagatgataactcaaaagatgagaaatcaaatgatgtaaagactgaggataagtcaactgacaatcagtctgaaaaagctaagactgagaactctgacaatgcatcagagacaaaaaaagacgataatgacaataattcagagcagtaattagacaggacaacttgtcaaaattaccatcgtctcatgaaggatctcttgacaggagatcctttgcttttaatgtaggttaaatgggcaagctgatttatatcagttttgtacaagtttagtgtgggatattcgatgaaattaagactgccaaatagtaaaagccttgatttgtcttttacaaaagtaatgggaaccattgctttagaagagaatgatacccgttcaattgaagatctagttttacttgcaaatagctatgttaaagctggtgctgagctactggagattggagctaaagctggtgctaacggcatcaacgaaactcgcgtgatctctgtgttgtgcgctgtgatgaacagtgtagatgttcctgtagcactaaactcaaacaactatgaaattgtttcacaggctattaaagcaggtgtttcaattgttattaccacaaacggtctgtccacagagggcatgatcgatcttgtcaaaggatcagaggtagctgtatgccttcactttgatcctaaagaaaaaattgaagatgacagcgatgtggtaagtatcatttctgaatactactttgaaagaatcgatactcttttaaatgccggtattgaaagaaagagattactcattgacccatcagttgtaaacgcttctgtaagtaacagattaagactgttaggaagacttgagagctttaagagttttgctctgcctatctgtattgctctgcctcgttctttaccaaaagaagacagattcatgaaagataatagagtgcttaccttaactacagctttattctgttcatctgtaagtccagttcaaatcatcagaacagcagatgtaggtgaagttgcaattgcaattggtttttggcagattatggcaagtaagactaagccatttaagttatcaaagactatcgtaagacgtctaagacttctacgtgatgcaattcatgacttaagaaagaacaaagaaaagaattaaaattgagcatctttaaaagtctagtcttttaaaggtaaataacttttagaaaaaaaagaaaacaaagatgaaaagaaaatattttggtacagacggtgtacgtggccgtgtaggtcaatatcctattactcctgattttgcagtaagactaggtttagctgcaggtaaagttttaggtaagaaacatggcggtaaagttatcattggtaaagatactcgtctgtcaggttatatgctagaagctgccttagagtcaggcttttcagcaggtggtatgtctcctgtaatgttaggccctatgccaactcctgctgtagcttatttaactcgagcattcagagcagacctaggcgttgtaatcagtgcttcacataacccatactatgacaatggtattaagttcttctcagctcatggtaccaagttacctgatgaggttgaacttgagattgagtctgtattagatgctaaggatattcctttagctgcttcatcagactttggtcgtgccttcagacaggatgatgctccaggtcgttacattgagtactgcaagagtacctttgcaagccacttctcattagagggcatgacgattgttttagattgtgctaatggcgctacctatcacatcgctccactggttttcagagagttaggagcaactgttatcaccatcggtgataagcctaatggcattaatatcaatgatggtgtaggttctactcatccagaggctttagttgctaaagtcctctcagaaaaagctgatcttggtattgcttttgatggcgacggtgaccgcgttttaatgtgcgacagtcacggaaacttacgtgacggtgacaaccttctgtatatcattgctaacgacactaaaaagcgtggacgtctgccaggtggtgtagtaggtactttaatgacaaacttaggtcttgagttagctttaaagcgtgaaggtattcctttctctcgtgctaaggttggtgatagatacgttatggagcagttgttagagaagaactggactctaggcggagagaacagcggtcacatcatcagcttaaaccatgcaaccacaggtgatggtatcgtatcagcactacaggtcctaaaggcttgtatgtatgcaggcaagacagttgaagagttatctgaaggcctgaccatgtacccacaggatcttatcaacgtaagattaacagcaggtcttgatgtaactcgtgacgagaaagttcaggctgttgtagctgaagttgaaaaagagttaggctcaactggtcgtgtacttttacgcaaatcaggaaccgagcctgtggttcgtgtaatggttgaaggtgagaatgcacaggacgttcatactaaagctcaaagaattgctgatgtgatcatccatcaggcaggctgtgaaaatgcttgaaaaaaagcataataacctgtaatatttgcacagctttgtatacgcaaaataggatgcgtttttattatgtacgaaattggtattgtagttttattactaattgcaattgcaatgattgctttgatccttgttcagcagggtaaaggtgctggcatgggcgcttcatttggtgctggtgcatcaaatacagtattcggttcagtaggatctggtaacttcctgactagatcaacttggactttaattattctgttcttcggtgtttgcttattcttaggttacttacagaagtcagctcacgaagagaagtcaagtttcagcaatatttctgagactcctgcaacagagcaggttgaagagaagactgttgttaacactgatgctcctgtagttgatacagatgcacctgcagtttcagacacaacagatgctcctaagactgacgctccagagactaagtaataaaagtttctactaaaaaagacccaccgtacggtgggttttttattggcgattttagataaattgattagaagacgtagtgcttggtaggagttatgacttcatgcaaaggcatatcccaatgctcaataggtacagcatctaaaagttggaagtcataagctacacctattaaaagacattgagcagagagcttctttaacattctgtcgtaatagcctccacccatacctaatctgttgcctttattatcaaatccaactaatggcacaatcaaagcttcaaatttatcaggagttaccagattctctggtaaattctcaggctctagaatgtggaagcggttttcaattaacctgtcacctttcttataggaataaaagtccatatgaccttttacgtgaacatccataaaaggtagagctaattcatggtgttctagaagatactcgttgataggctctgttgataactcaccgcctaagcttaaatatgatcccaccatctttttttgcaggaagtgtttatggtgacttaagatttttacaatctcaacgccagcctcataggcttttacaggtgttacctgtcttctttgttctaagatctgctgacgcagcgacttgcgtaaaactttgttatcaaaaaaatcagtcattgttagctctttgaagagaagttttcatcttggtgattagttttaatgcttcattttcaaatggagttttgtcgtttagatatccttgcaaggtactctctgagtcaagcgcaattaagatagctgcttgtgtaggagttaaattaggattatctcgcatcatagaggatgctttagtttgtaatgaagctatcgctctttgaagattttctttttgttcttttgcgcatcttaagttgaaactctcaccaaagagtgcacattggacaaagtcctgtgtgttttgatctgacatatgtaattcctttttgcctatattgtaaggatattaatcaaattgtccaaaaacttctgagagtgcattaaaagtaacggtagttatactgatattagactataaaaattatttttgtattgaaaaataatgcgaatagtacatctaaaaataataatcttttaaatgtgaagataatactgtttaaattatagattaggtgttaaagtgagatgagaagttttcatctatccaatagcagagttttattatgagcaaaaaaacagtgtattcaaatattgcaattgatctaggtggtaagtatacaggatgcgtatcatatacgtcttcaatattgccatctgcagatgacatcaatgcttttattattgagatgcctgatgatggtaaaggtattaaatatacagtaaaagatagaactcagaagagacatatgattcgtgctttggatagattcaaaaaagcaagaaaactaatctatcttgttataagttcagtaattcatagagagcttactgctgatgaaaaagaagcaatctcttctttaatgaagagaagagggtatacaaggctagaagcagaaattgaccttgatattttaaaagaatgccctgttgatctatttgcctcatatattaaagatctgtttgatgaatctcagtctttatatgatcagtttaatcaaaggtgttgtgatttagattcagcaaaagtcatgatgaaagaactttctcaagatgaatttaataaggcagtggaatcttcagaacttgataaaacagaaatagaactgtacaagtcagcttttgatgtgatggtgaaagctgctgaaaacatcatcaatacctgtgaatttggcaataaacaccgtaaacaatacttatcagatatcaaggcagatataaataaggattctagattagctgatatagttaagtcatttgatggtaatgaaaagcttttcaaatgtgttggaaatatttcgaatcttcagctgagagctttgcgctggtatttcaatgatatcaacatgaaaggaaatccaaaatggattcctgaaagatttaaaaaagtgtgggcaagagcttataaatacttccattatccaaaagaagatcaacaaaaagccagagagctgataaaaaatctggaaatttcaaatgatgtaacttcattgttgtgttcaattgatcctctcgacacaattcctccatatgaggatcagaacaatcgaaatcctcctacagatttaacattactcttatcacctaaagccttagacaagaaatacacaaatttatgggagaaatgggcagagaagttcgcaaaactatatccaaatttaaaataccagctagaagatatagttaaaatttcagaccgaaagtcaagaatagatgtaaagagttcaagctcatatacgcaaagcaaagttttcaactcatatgtaatgcaacgtttgtttgatttagctgcagataaaaacgagccaattacactattgagatcatgggtaagagatccttcaaattcaaaactggcagatacagtcaagataattcagtcagtggtagaagatcgtgaggatgatttttataagttagctcagtcatattacaacgaagtagaaatggccaaatcaggtctttggtcagtgatagatgatcctcttcttgaaatttctggaatacatcctccaatgaagaataaagtgatatcaacactggttggaaatgtacttggaataaataatgattttgattatgagaaatttcttgaagtttggagagctcctataaaaggaagaaaaactttaaaatcagtttgtaaagatattgaaggacttcgaaaagaatacggtaatacttttaaaatcgaatatgactatgctaattattctgctaaagaaaagaaagaacggttgactgcagatcagaagaaactagtagaaatcaataaaataattgaagagatttctccattagttaggaacagtatttctcaagatcctttatcagaaattaaatttaacaatccgttcagtttttctcaactttatactctaatcgaaacagatacattaggcttttcaagcaattgtgtagcagtaaatatggagaataacgcaagaatgcagtttctgttaggaaatcatgcgttatgttctcaactgccaactgaatcagtaagaccttttgatggtgccttaggaaagatcttagaaaggcaggcttatgaaatcgctaaagtaaagagcgcagagataaaagagttagactctctgaatgagacagtgataaatgtcggtatattaattgaacagaataaatttgagtttacagaatcaatagcgaagataaagaagtcaaagttacgggaagaaattaaaaaaagatcccaaagtggagttagtcgtcaattaaagaaatgggaaaataaagagaagagaattaaatctgcttcaagaggtgtatgtccatacacaggtgaacctatatccgaaactaatggtgagatcgaccatatcattccaagaagctttactaaatccagtatgggtacgatttttaactcagaagcgaatctgattttttgtagactaacaggaaatcggaataaagatgaaaatatgtatacattaagagaactttcaccaaagtatcttaatgctgtatttggaacagcagatattgtgcagattcagcagaatatagaaggtacggtagcaaaaattagtagcaaaaacccaagattcctgtttgatatgatggatcaaaaagagcaagactgttgcagacacgctttgtttatgcctcacagcaaagcctatcagatagttgtgtcagcaatggccagatcctatagtacaagggttaatggaactcagtcttattttgtaaatgcgattatttcaaaattaaaaaacgagttgtcttcatggctaaaaacacacaatagtactcttaatttctttgcttataaggtggatccttcgattgttcattctacaagagatgacttgagcaaattaaatacactgttgaaaaaacaagaaaatcagccaataacatctcacgccatagatgctttatgtgtattggcatctgcatcaacaaatgagcgtatttctgaaaatatctcaaaagaaagttgtttggctaaaatttctaatactggcaatttgttaaaacttgagcctcatgaatttaaaattcttcgaatagagaaaaaagatttttcagataaaaatgacgatttttctagaaagttatttaatgatacgatctacgcagagcattttttacctgtgatggtaatgaaagatcaagttaagattggattttcatggaactctagtaaaaaaggaaattctattgaaattgtaaaagatcaacataaatttcttgaattgttagctccattttttaataaagcaatagaatccagttgtaaatttattacgtataaaataaataaaaagaaagcttttgattttatccatagatatatacatcaagaagtagatgtaaatgattgtgctcttatagtaaaaattttagagtcattacgttacacaacagtaaataccgatgtatgtgatatttacaatgatagagaaaagagatttaagagtaaatctgaaatccttacaaacaaaaattttgagttaaatttttcattacccaaaccttttaagatcttagcttgtaaaaaaatatatttaccatctaaaaatgaatggtcgaaaattactgaaaaattttcagattatttgggtaaagataacattaaaaatgggaaagagattatttataattctttaaatttaaacagaaaaaccacaaaaaaactcaatcatgccggaacaaaacgagtgtatagcttaccaatactaaaaaatgcatctggaggaataagaattaagaggtatacagatgaaatggaagaattttatcagttgctagaagtaaatacgcctcagactgttaaaagaaaagggtttgccttaagtgaaaaaggtgaagtcatgtggaataaaccaataacagttgattcgtatatcggaaaaaatctaactctacttgaaaaaaattacaaaaatgtatgttttggggataattttgttccaatgaaagaaaataggatggtttataaaaacgaaaaaacagaagtatacatttctccatcgtcggattctcgtagattggtaataattaagcaaccttttgatgaatttaataaatgtttaaaaaataaatataagaattatctagaacttccttcaacattggttttgtctggtgatgaaattaaaaattatgttaaaaacatgaaaaatgattttattggaaatccaagagtagaaacaaaaaataataaaaaaacaggaaaaatagttatgctttctattggcaaacttgttcgttattgttatatgtctactacttgtgattctctgatgaaaacagcctatgactgtgccctgagttagaatgagataccttactgtaagcgaatatggtacttttttaggtctttcaggagaaagacttattgttaaacagaatggtacacagataaaagagctccccttatcacgattaagaacgatatgtgttcttaaaaggggagtttctgtttctggtgacttaatcttgtcatgctctctaagaggaataagaattctctttttggattggaaaggtcaggctgtatcagctgtcttaggtcagaatcagcatgcggtagtctctttgagaaaatctcagtttgactttattaaagatgaaaaactttgctgtgatgtatctaagaagattattctttctaaggttagaaatcagcgtgcagttgtactttatttctctaagtaccagttgaaaaataatgaagagttaacaacagttgttggcaaatttgtaacatcagttaatcagatcataactcagctcaaaaacattcaaggaccacaatggaaaaccaccttatttggcttggagggaaaagctgctgtattgtattggaatctcctaagttctctgtccatgcttccacacgattttgaatgtagagaaggtcgtggggcaaatagcataactaataaagctcttaattatggctatgcaattttggcaagttttttattatcagccgttgataacgctaggtttgaaatgtacgctggattttttcacgtagacagaccgggaaagccatcacttgtcttagacctgatggaagagtacagagcctgggttgttgatagagttgttataaaacttaggtctagacttgaaagtgcaaaagaatttgattcttcaattaaaaaagcgataagtgatgaaatatacaaaaccatggctacaaggtactcctataacaagaagaaagtaaaacttgaaaatatcatacaaaggcaagtatacagattatctggagttataagtgaaaagggaaattataaaggctattcctttaaatggtagaaaaagatgaatatttaccaaaagtacctcgtctgttatgacattgagaatgataaaactagaaagaagttctttgataaaatgaaggatcttgggttgatatctattcagaaatcagtgttttatggagatttaaatcaagccgagttctctgctatgaagaaagttgttcaaaaaatgcttgatcctgaatctgacaagtgcttttggaccaaatgtacattgtctgataaagagctttgtagttgctttggttataaaaattttaaatatatagagccagatggatatgaatcaatttaacttaccggtttcaatgttaagacaatactgtttttgcccaagaattccttatttctatattgcgcgaaatataacgcctgtagaaaaagagtggatgtctcaaggcattgaagaacacaagcgccaagagatgttatctaaaagaaggaatctctctaggtttggaatttcaacgattggaaaaatttcttttaatgtggaactgtatagtgaccaattatctcttcatggcatatgtgatgcaattttgtctgttgattcagaattaagcatcattgaatttaaaaactcagattatgacaagttcactataggaactgcagtgcaactatgtgcatatgcaatgctatgtgaagagaagtacggagaaataataaaacaatgttttgttctttacggaagtaaagggaaaaccagaaaagtgaatatcgatgcatctattagatccaaaactttggaaataagagatcacattattgaaaacctcaaaaagacagacattccaccttctagcgcagaagaaaataaatgcggacaatgcgaattcttcaacttctgtgctgacaggttttaaaaatacatccagatgcttacgcagttgctggacttaatcttgatttttgatgatttcagctcgccataaagacgacttcaagaactttttcaatctatgtttttattgtaaagtatttttttcgaaaaatatacttgtttcagtgcaaaaaataatatttcgaaatttacatcacattttatatgtgcaacatattctttttaaagaattttatgttgcagcttcaattatagattgaaaaagtccttaactgaaactacagtaccgttttcagaatgaacgtgtgcacgaatcacagcttcaattatagattgaaaaagtccttaactgaaacgccatttcttctagcagtgcacgaattgatttgtgcttcaattatagattgaaaaagtccttaactgaaacaagactaatattgagcgttcttcttttgaccgttctgcttcaattatagattgaaaaagtccttaactgaaacatggcaattatactttgtttaggctcaccctcaagcttcaattatagattgaaaaagtccttaactgaaaccagttatcaatagactgcataatggttgtaactgcttgcttcaattatagattgaaaaagtccttaactgaaacattcttgatacataaacgaacaactgtgatttaaggcttcaattatagattgaaaaagtccttaactgaaacttaaaaggtactttctctgttccttcaagatatatgaagcttcaattatagattgaaaaagtccttaactgaaacaaccgattctacagactatttagtacctaccgttacaagcttcaattatagattgaaaaagtccttaactgaaacgtgcttacaaaacttctaaaaatcgtcacaggtgaagcttcaattatagattgaaaaagtccttaactgaaacagaacaatagcgcgataatccttaggagctagaagaagcttcaattatagattgaaaaagtccttaactgaaacttacagtgccatccttcttctgttcctgatgctcgttgagcttcaattatagattgaaaaagtccttaactgaaacacgtcttttggcgaaattgtgattgcagctttcttatgcttcaattatagattgaaaaagtccttaactgaaacggtcagtgctttcttattattagaactaaagatgaaagcttcaattatagattgaaaaagtccttaactgaaacatggagaaaagctcgcaaagtgtgtcgtgaggtcttgcttcaattatagattgaaaaagtccttaactgaaactttcactttttacctgcattctttgtttttgtcacagcttcaattatagattgaaaaagtccttaactgaaacttacataagttgcctgaatgtcctcgatgccaccgcttcaattatagattgaaaaagtccttaactgaaactcattaaatgttgtcttataaccaaatgaacgagcttcaattatagattgaaaaagtccttaactgaaacagcatttcagagtattcattagcatctgattgcacgcttcaattatagattgaaaaagtccttaactgaaacttaatgttaaaggaggaacgtggacatagaagaccaagcttcaattatagattgaaaaagtccttaactgaaacattcttgctaaacgctcatgccatactttttgtgcttcaattatagattgaaaaagtccttaactgaaaccttatataatagtttccacgagcaacaaggttagagcttcaattatagattgaaaaagtccttaactgaaactggttgcagatgttccaataccatcaccatcttttaagcttcaattatagattgaaaaagccattaactgaaactccttacgggtgaacatgtaacgagacttaaaaactagcttcaattatagattgaaaaagcccttaactgaaacgtcattccagatttttcctgcttttaccctttgtgagcttcaattatagattgaaaaagcccttaactgaaacctcgttgtggggatgtctctgttcttatatactctatttccattacagattgatcaaaatataaacagaaagcttttttgaaaggcaataagcttattactccatataattcttactgaaaatttcaattttgtaaagtactaatgtaaaatagaaacatatttgaatttaagctttttttaagtagaaaataatatatgactgagaagttacagaaaattttatcccgcgctggaattgcttcacgcagagctcttgagcagatgattgatcagggcagagttaccgtaaatggcaaaatggcaactatcggtgacagatacgaagcagatgacattttagttaaaatagacggtaaggttgtattaacacctgacagtcaaaaagtatcttgcagagtcttaatgtatcataagcctgaaggtgaacttactacattatcagatccagaaaacagaccaacagtattcgaccatatccctaagcctccaactggtcgctggatctacattggccgtcttgatatcaatacctcaggtttactcttatttaccaccgatggtgaattagcaaatgcactgatgcatcctaaatatgaagttgagcgtgtatatgctgcacgtatctatggtgaagtaagtgaagagcaaatcgatcagttaacccaaggagtaatgttagaagatggtaaagctcgctttaacaaagttacttacgtaggtggtgaaggacgtaacgcctggtaccacgtaaccttaaaagaaggacgtaagagagaggttcgccgtctttgggaagctgtagggcttaaagtttcacgtcttatcagaattaagtacgcaggtatcgatcttgatcctgacttaaagacaggacagttcagagaacttaccttaaatgagttaaatcgtttaagaaaagctgttcatttagagccagttgaagagttggctcctgctttagatttaaatgcctcttcttcaaataaaggaagaaaagctacaaaagctcctgtaagaaagcctgtttcatttaattcttctaaagaagaaaatgatgataagtcttcaagaagatctccatacggtaagccacaatctcgtcctgcaagaggggataagtcagctttccctaagaaaggtaaatcttttggtgagaacaaaggaagaaagttcacacaagattcttcatttgataaaaatgacagaagaaagtcttttaccaaagatgattcttcaagaaagtttggtaataagtcaaacaactctgcaaagcactttgtttcacacacaaatcttcgctctgagaaagaaggtcagtcttttaataaaggctatgctgtaaagagcagaggcagtgctgtatcaaagtcctcttttgtaaagccaagaagaacaaatagaagttcatattaagcttaagagctatcttttaagagataatcgtgaaggcggatatttatgaatgagcttttaaattttgagatattttcaaatgaagagcttgtagcaaaggtaaccgccttttcttcacgaggacatgatgtctatgattttagctatgttccttcttggatagaaaaaggctattctctagatccaacattgtatttcacttctgatattcaacaagtccaagttcttcctccttgcttacaagatatatgtccagatcgatggggaaggttaatacaaaaaagaaagttaggttacactccttcttcaactgagtatttgcttggtgtaagcgactattttcgaatgggagctttacgaattaaaatcaatggtaaatttgttgatgattctacggatagaccaaagttaacaagtttaaatgagttaatcgaagcttctagacaagtagagcttggtaatacgagtgatcatgatataaagctgctatttgctccaagtggcagtttaggaggggcaagaccaaaaggttgtgtagtagataatggtcaactttttttagctaagtttccatcaataaacgatcaagatattcagttgtcaaagtgcgagaaagtatatttagatttggcaaaagaagctggtatcaaagcttgttcatctaaagttattgaatcgaagtttggtgatgttcttcttttaccaaggtttgacagagatatacataacaaacgaattccttttatgtctgcaatgacggctcttggattgtcagagagcgatgagttggataattacagctatgtagatcttgcaatgtcagatttcatgacgtcaaaagaacaaaagcaagaattattcagaagaatgctctttaatggactttttggaaatacagatgaccatttgagaaatcatggttttttacgtatcaatggagaatggcaattatctccagcctacgacctaacaccaaatacagttccctacaataaacaacaccacgctttatgttttgttgaaggaaaagatctaccttcacttgagctttttgacgagataaaagccttctttgatgttgatgacaaaatttataaatcaatattgcttgatatgaagaaagctcaagaatcatctcttactttgcttaagaagaataaagtatctccagataacataaaacttctgcaaaacaattttgagcatgaagattttgaaaaactaaaactcattgtatagctgtcatatctatcaatttgaagcaaaagaatgcacctattgcaattgtgctatgctaattcgttgtttcaactgtaatatatagcaaagcattcgatgttacttcacataattaatacatgttgttaacatttgttgcttataattgttatatttacatcgttatacatatttttgattttatttgagaaattaaaacttaaaatgaacgcagacccgactatatttagtcacaccattctatctaacctctctattttttcattttcaaagctaggagctaaataactatgcaagaacaggctctagctcatccaactttattattcgatatgctgtgggtattagatcctactgcatggttaggtttattaaccttaacagcaattcagattgttttaggtattgataacttattattcattgctattctgtcagcaagacttccagcaagacaaggtaagactgctcgctacatcggtttaggtggtgctttaatcatcagaattatcttgatgatcttcgccgcttacgtaatggcaatgtcagagccattgttcactgtcttaaactttgaagtttcagttcgagacttaatgatgttcttaggtggtgctttcttgatatacaaagcaacagaagaacttcattccaagttggaagatcaaagtggtgatgaatcagtatcagttactaaatcagctggacattcatttgtcattgtagcaactcagatcatgatcctggatgtactcttctctggtgattcaatcatcaccgcagttggtatgaccaaccatgtgtacatcatgatcattgccgtaactatagcaatgggattgctgatgtgggcttcaggctttattgcagtctttgtttcaaagcatcctacagtagttatattgtgtttaggcttcctgttgcttatcggtttcagcctgattatggaatcattccatattgaagtaccaaagggatacttatactcagcaattggcttctcattgttaatcgagatcttcaaccaggcctcaagaaagactgttttgaacttaaagcactctaataacatgcaggcccgtcaggtagcagctcatctggtcttaagactgttaggctcaaaaaatgacgacgatgtgcattcaattaaggaagctattgtttcacgtcctagtgcctatgtctttaacaagcaggaaaaagagatggtatctcgtgttcttgaaatgtcatcactgcctgtaaaggctgtaatgacagcaagaactgatctgcaaacaattaaagttgatggctcaaaagagtacatcttaaacaaggcattatcttgcactaagtcattattgattgcttacagaagcggtcacaaagatcagcctttaggttttgtttcaagagcagatgttttaggcctttttgtcgaagacaaggttgatgttgcccacatggaaaagattgtccaggagcctttatatcttccgcaaacaattaacatcttaagtgccctagatcaatttaggcagtcaaagaaatactttggatttgtctttgatgagttcggaggttttgaaggtattgttactgttcatgatgtggttgaagagatcacaggtgagatgcctgaaaagagtgaaactccagagattgtacgttttggtaaagatggtaagtcatttagagtagatggtgatgctatcttacctgatgttgcaagaataactggtttagacttacctccatcagagcattatcagactattgcaggttacgttttagacagattgcagagagttccaaagcaaggcgaaactttagatgttggtgactggaagattgaagttttcagcgctgatgcaactgcaattaacgtcttaaaactctataggataaagtaggaaaaaacttgatttttatccttacttttgctataaataaagggcttgaagctgatagcgtttcaagcctgttcaagtgtgagcttgaaccttcagtaataaacgagtttattactgatagatatagtggaacttcataaagaaagggaccctagttgaggtcctttttttgtgtttaaaattaaataaattgaggtactaatggcaggaaccattgaagagaaagtagcagagctagtaactcctctggtggagtctatggatcttactgtatggggtatcagattccgtggcggtaatgatcatgcgatgttgcaggtgtttgttgattctgagcaaggtgtaagcgcagataagtgtggcgagttaatggatgtattatctcctgctttagatgcagctgaccttatcgctcctaaatatacacttgaggtatcttcacctggtcttgacagaattttgttcacacttgagcaagctaaggcttatacaggtaaaactgtaaaagctgaacttagaattcctactcagggcagacataagcttcaaggtactttagatgaagtaactgatgatggcatgctgaagattaacgataagatctcaggtcttatcgaagttgcattctcaaatgtatctacagcacgtgttgtcccagagtttccaactaacaacaaaaaagctcctaaaagcggatcatagagaggtcttagattaaaaatgggtaaagagatcattgccatcgcagaggcactatcaaacgagcgtgctattcctagagataagatttttgaagctttagagactgcattagcaactgcaaccaagaaaaagtatccagttgatatcttagttcgtgttgtaattgacaagaaagacggctcatataacaccttccgccgttgggaagtagttgatactgacggtccactagagaagcctgctcaggaaatatcacttgcagcagccgctgttgaccatcctggtattaaagctggtgatattgttgaagagcagatcccttctgttgagtttgaccgtattacaattcagactgcaaagcaggttctatctcagaaagttaaagatgctgagcgcgagcaggttgtagcagagcagcgtgacagaatcggtcatgttgtaaatgcaaccgttaaaaagcagactcatgacatcatggttttagatttgggcaacaacgctgaagctgttctaaagcgtgagcagatcattcctcatgagacctatggtcgtggtgacagagttaaggttttattacaggatatccgttcagagccaaatcgaggtccacagatcatctgctcaagaacttcacctgatttcttaaaagagttattcagaatcgaagtacctgagattggtgaagacgtaatcgaaatcatgggtgcagctcgtgatcctggttcacgtgcaaagatcgctgtaagatccaaggacagaagaatcgatcctcgtggcgcatgtatcggtatgcgtggcgctcgtgtaatggcagtatctaacgagctgtcaggtgaaaagattgacgttgtattatacgatgagaa

SEQ ID NO: 116 - DNA, 24215 bp, synthetic construct
  misc_feature 1..24215: note = Synthetic
  source 1..24215: mol_type = other DNA
aacttagagggtattgagcctcagccacgtggaatggcacagattgaagttaccttcgatatcgatgctgatggtttaatccacgtatctgctaaggataagaagactggcaaagagcagaagatcactattaagtcatcttcaggtctgtcagacgacgatatcaagcgtatggttcgtgaggcagaagagcactcagctgaggataagaagtttgaggagttagcaaacgcacgtaacagagctgatgctaccgctcatcaggttaagaagcagttagctgatcttggtgacaaggtatcagatgctgataagactaaggttaacaaggcattagctgacctagagttagctgctcgtggtgacgacaaggataagattgaacaggctgaaaaggctgtaatggaagctgcaaccgctttattacaggcaggtcaggcacaggctcaagctcaacaggcttcacagcaacaggcacaacagggtaattcatcaaaggatgacaatgttgttgatgctgagttcgaagaagttaaagacgacaagaaataatcttaaatcataaagattagtttaaaaggtgggtggagtattccacctgccttttgtcagttataaagaggataaaatggccgaaaaacgtgattactatgaggtgcttggcgtagacaaaggggcagatgatgcaacaatcaagcgtgcgttcaagcgtcttgctataaagtatcaccctgacagaaataaggatcctggtgcaggtgataagttccgtgaaattaacgaagcttatcaggtgttgtctgatcctcaaaagagagctgcttacgatcagtatggttttgctggtgctgatggttcacaggccggtggtggtaatccattcggcggtggtggtttcagcggcgctgatttcagtgatattttcggtgatgctttctctgatctcttcggtggtcgtggcggttttggttctcgtaaccagggaccacgtgaaattagaggtcgtgatatcagagctaagttaaccttaactttagaagaagctgtaaaaggctgcaagaagaagttaagtgttaagacttatgttaagtgtaaggactgcggaggctcaggcttaggcaagaacggtaagaaagagtcttgccctgattgtaagggtagcggtactgttcatgtacgtcagggctttatggctttttctcagacctgttcacgttgtaatggtacaggtactattatcaccaacggttgtaagacctgcggtggcactggccgtgtagttgacttaaagaccttatcagttgatattcctgctggtgttgatactggcgatagaattcgcttaagtggcgaaggtgaggctggtttaaacggtgctggttctggcgatttatatgttgtaatcgaagtaaaagatcatgagatctttactcgtgatggcaatgatttgtactgtgaagtaccaatcagctttacaacagcagcactaggtggcaaggttgaagttcctacattagatggtcctgtaaatattacagtacatcctgagacacagaccggcgtaatgatgcgtctgtcaggcaagggagttaagtcttataactcaacctttaaaggtaacctgtactgcaagattgtagttgagacacctgtaaacttaactaaagaacagaaagatctgttaaagaagtttgaggaatcattaaatggtgatgacaaagcatctacaacaggggatagtaaaaagaaaactgacaccgcagcgaagcataagccaaagtcagcaggcttcataaaaggtgttaagaagttctttgaggatctatcaagttaataatgtgagttgtacagctaatcataagttttcatattgaactaagttatagattaggttattatcaactcatatgatcatgaggacgcctgatgtaacagttaggcgtcatttttttatattttaaattgaggctattatcatggatcagactccaatgactcctcgtggcgaggatttacttcgcaaagaattacagcgcttaaagacagtagagagacctcgcattgtagctgcaattgccgaggctagaagccatggtgatcttagcgaaaacgcagagtacgatgcagcaaaagaagagcagggcctttgcgaagcaagaattaaagacatcgaaggcaagctagcaagtgctaacgttatcgatgtatctaagttaaagactcctaacggtggcaagctaaaggttatctttggtgcaactgtaactgttgttgatgttgatacagacaaagagacaacttacagaatcgtaggtgaagatgaggccgacattcaggctaacttaatttcatacaagactcctatcgctaaaggcttattaggcaagtgcgaagaagacgagattgaaattaagatccctaagggaacaatctgctacgaaattgaaaaggttgagtatatctaagagataacttagaactcatatgtaactggaaaatcttggttgcataatccaatttaacaaaacggaagtacctaaaagtgcctccgttttttttgatcttaagataattgtagactttaaaagtagactttaagtagactttaaagtagaccttaattaagaaatgtctttaaaatctaaagagtataaaatcttaataaatttaaagtctattaaaaggtactataaatttgaatactaagttacagttgtaggcagcagaaataaaaaacgccttattaaaaggcgccttttacaatttgagtgaacctagaagttcaacttaaaactagcgaggaagaatgaatctgctgtcgtcttttctctgtctgaatagaactgcaattctaccaactagagatactaattcagcattaacagttttagcagctgtttcagcctgctcttttctaccttcaccagcatttaaacggatcttgataagctcgtgatgctcaatgctgctgtctagctctttaagcactgattctgaaagaccgtcattgcctagtaagacaactggctttaatgaatgagcttgtgcctttaaaaactggcgctgatgtgaattcaatgacatacaaaacctataataagaaaaaatatctgttaaaagcttaatctattgtgatttagacttcgcataaatgttgtgcaaattgtataatattatcgagtaattttaaactgaaaaatctatagtaatatttgggatttaaatttaatgccagcaaagaaaagaactgccagccaaactagatggttacaggaacacttttccgatccttatgtgaagcaggcccacaagttaggactgcgttcacgcgcttcatttaagctagaagagttgcagaaaaaagatcacctgatccgtcagggtaatatcgtagttgatcttggtgccgctcctggcggttggtctgagtatgccgtaaagtgcatcggagatagcggtcgagttatcgcctgcgacattctgccaataagacctattcgtaacgtacagtttttgcagggtgacttcagagaagatgaggtcttcaaaaaactgtattcaatgatcggtgtcggtgctcatgtagtactctctgacatggctcctaatatgtcaggtaacctagctatcgatcagccaagagccatgctgttatcagaattagccttagatatggcaagacgtgtactgcgtattggtggtagttttgctgtaaaagttttccagggagtaggttctcaagagtttttaaaagaattacatcaggactttaccactgttaaagtaagaaaacctgatgcttcaagagaccgttctcgtgaagtttatatggtagcaatgggctttaaaggtcatcctttaaatggtgttgcaccaggtgctgaatttgaagagtctgaagataagactttggagtaagtgagtaaatatgacaaaaaacctaatattatggctagtcattgctgtgattttaatgactctctttgagtcatttaactcatcagacaattcaggtcgtatggaagactacactagcttcgtaagagaagtgcagtcagatcagatacaggaagttgtatttgatggcaaggttatcaatggtgttaaaaagaacggtgaaagattcttaactgttatgccattgagcgatcctgcaattatcgactctcttttatcacacaatgtaagagcatctggtactaagcctgaagagcagagcttattgctctcaatctttgtgtcatggttcccaatgttgcttttaattggtgtgtggatctttttctcacgtcaaatgcagggcggttctaaaggcaatcctctgtcgtttggtaagtcaaaagcaaaactactctctgagaatcagattaaaacaacctttgatgatgtagcaggttgtgatgaggcaaaagaggacgtagttgaattagtagacttcttaaaagatccaaccaagtactctaagttaggaggccgcattccacgtggtgtgttaatggtaggtcctccaggtaccggtaaaactttattagcaagagcaattgcaggtgaagctaaagtgcctttcttctcaatttcaggttctgatttcgtggagatgttcgtaggtgttggtgcttctcgtgtaagagacatgttcgctcaggctaagaagaatgctccatgtattatcttcattgacgaaattgatgccgtaggtcgcaagcgtggcgtcggcatgggcggtggtcatgacgaaagagagcagaccttaaaccagttactagttgagatggatggttttgaaggctttgaagctgtaattatcatcgctgcaactaacagacctgatgttcttgatcctgcactgttacgtccaggtcgttttgacagacaggtcgtggtaggtttacctgatgtacgtggtcgtgagcagatcttaaatgttcatgtaaagaaagtacctttaggtaaagatgttgatactgcaactatcgcaagaggtaccccaggcttctctggtgccgaattagcaaacttggtaaacgaagctgccttaaacgcagcacgtcataacaagcgtgtagtaagcatgaatgagtttgaagaagctaaagataaactcttaatgggtgctgagcgcagaagcatggctatgaatgagcatgaaaagatcaacactgcttatcatgaggcaggtcatgctatcgtaggtaaattggttccagagcacgatcctgtatacaaggtatctattattcctcgtggcagagctttaggtgtaaccatgtatctgcctgaacaggataaggtatctcaaagccgtatcggtctgttatcaaacatttctactctgtttgctggccgtatcgccgaagagttaatgtttggtactgatgctgtaactacaggtgcttcaaatgatattgaaagagcgactcagattgctcgtagcatggtaacccgttggggcttctcaaagagattggctccaatgcagtatgaaaaggacaatgaaggttctgcatacttaggtggttcatctactactatgatttcaatgtcagatgaaactgctaagatcatcgatgaggaagtaacagaaatcatcaactcatgctacaagaaagctcaggacttacttgaagctaataaggacattcttgagaatatgaaggatgctctattaaagtatgagaccattgatgctgatcagattgacgatttgatgaatcgtaaagaagttcgtccacctcgtaaggtaggagatgctaaatcttcagatcagaaatcagatgataactcaaaagatgagaaatcaaatgatgtaaagactgaggataagtcaacagacaatcagtctgaaaaagctaagactgagaactctgacaatgcatcagagacaaaaaaagacgataatgacaataattcagagcagtaattagacaggacaacttgtcaaaattaccatcgtctcatgaaggatctcttgacaggagatcctttgcttttaatgtaggttaaatgggcaagctgatttatatcagttttgtacaagtttagtgtgggatattcgatgaaattaagactgccaaatagtaaaagccttgatttgtcttttacaaaagtaatgggaaccattgctttagaagagaatgatacccgttcaattgaagatcttgttcttctggccaacagctacgtaaaagcaggagccgagcttctggaaattggtgctagagcaggttcagatggcatcaatgaaaccagagtgatgtctgttctttgtgctgtaatgaacagtgttgatgttcctgtggccttaaactcaaacaactatgaggttgtttcacaggctgttaaggccggtgtctccatggttattaccaccaacggccttgcaactgagggcatgattgaccttataaaacgctctaatgttgcagtatgccttcactttgatcctcaagaaaagattgaagatgacagcgatgtggtaagtatcatttctgaatactactttgaaagaatcgatactcttttaaatgccggtattgaaagaaagagattactcattgatccatctgtagtaaatgcttctgtaagtaacagattaagactgttaggaagacttgagagctttaagagttttgctctgcctatctgtattgctctgcctcgttctttaccaaaagaagacagattcatgaaagataatagagtgcttaccttaactacagctttattctgttcatctgtaagtccagttcaaatcatcagaacagcagatgtaggtgaagttgcaattgcaattggtttttggcagattatggcaagtaagaccaagccatttaagttatcaaagactatcgtaagacgtctaagacttctacgtgatgctattcatgacttaagaaagaacaaagaaaagaattaaaatccaacatctttaaaagtctaatcttttaaaggtaaataacttttagaaaaaaagaaaacaaagatgaaaagaaaatattttggtacagacggtgtacgtggccgtgtaggtcaatatcctattactcctgattttgcagtaagactaggtttagctgcaggtaaagttttaggtaagaaacatggcggtaaaattatcattggtaaagatactcgtctgtcaggttatatgctagaagctgccttagagtcaggcttttcagcaggtggtatgtctcctgtaatgttaggccctatgccaacccctgctgtagcttatttaactcgagcattcagagcagacctaggcgttgtaatcagtgcttcacataacccatactatgacaatggtattaagttcttctcagctcatggtaccaagttacctgatgaggttgaacttgagattgagtctgtattagatgctaagaatattcctttagctgcttcatcagactttggtcgtgccttcagacaggatgatgctccaggtcgttacattgagtactgcaagagtacctttgcaagccacttctcattagagggcatgaagattgttttagattgtgctaacggcgctacctatcacatcgctccactggttttcagagagttaggagcaactgttatcaccatcggtgataagcctaatggcattaatatcaatgatggtgtaggttctactcatccagaggctttagttgctaaagtcctttcagaaaaagctgatcttggtattgcttttgatggcgacggtgaccgcgttttaatgtgcgacagtcacggtaacttacgtgacggtgacaaccttctgtatatcattgctaacgacactaaaaagcgtggacgtctgctaggtggtgtagtaggtactttaatgacaaacttaggtcttgagttagctttaaagcgtgaaggtattcctttctctcgtgctaaggttggtgacagatacgttatggagcagttgttagagaagaactggactctaggcggagagaacagcggtcacatcatcagcttaaaccatgcaaccacaggtgatggtatcgtatcagcactacaggtcctaaaggcttgtatgtatgcaggcaagacagttgaagagttatctgaaggtctgaccatgtacccacaggatcttatcaacgtaagattaacagcaggtcttgatgtaactcgtgacgagaaagttcagactgttgtagctgaagttgaaaaagagttaggctcaactggtcgtgtgcttttacgcaaatcaggaaccgagcctgtggttcgtgtaatggttgaaggtgagaatgcacaggacgttcatactaaagctcaaagaattgctgatgtgatcatccatcaggcaggctgtgaaaatgcttgaaaaaaagcataataacctgtaatatttgcacagctttgtatacgcaaaataggatgcgtttttattatgtacgaaattggtattgtagttttattactaattgcaattgcaatgattgctttgatccttgttcagcagggtaaaggtgctggcatgggcgcttcatttggtgctggtgcatcaaatacagtattcggttcagtaggatctggtaacttcctgactagatcaacttggactttaattattctgttcttcggtgtttgcttattcttaggttacttacagaagtcagctcacgaagagaagtcaagtttcagcaatatttctgagactcctgcaacagagcaggttgaagagaagactgttgttaacactgatgctcctgtagttgatacagatgcacctgcagtttcagacacaacagatgctcctaagactgacgcttcagagactaagtaataaaattttctactaaaaaagacccaccgtacggtgggttttttattggcgattttagataaattaattagaagacgtagtgcttggtaggagttatgacttcatgcaaaggcatatcccaatgctcaataggtacagcatctaaaagttggaagtcataagctacacctattaaaagacattgagcagagagcttctttaacattctgtcgtaatagcctccacccatacctaatctgttgcctttattatcaaatccaactaatggcacaatcaaagcttcaaatttatcaggagttaccagattctctggtaaattctcaggctctagaatgtggaagcggttttcaattaacctgtcacctttcttataggaataaaagtccatatgaccttttacgtgaacatccataaaaggtagagctaattcatggtgttctagaagatactcattgataggctctgtagataactcaccacctaagcttaaatatgatcccaccatctttttttgcaggaagtgtttgtggtgacttaagatttttacaatctcaacaccagcttcataggctttaacaggtgttacctgtcttctttgttctaagatctgctgacgcagagacttacgtaaaactttgttatcaaaaaaatcagtcattgttagctctttgaagagtagtcttcatctttgtgattagtttcaaagcttcattttcaaatggagttttatcgtttaaaaatcccagtaaggtactctctgagtctagcgcaattaagatagctgcctgtgtaggagttaaattaggattctctcgcatcatatttgatgctttactttgcaaagaagctatcgctctttgcaatttttctttttgttcttttgcgcatcttaagttaaaactttcaccaaagagtgcacattgaacaaaatcctgagtgttctgatctgacatatgtaattccttttgctgtagatattgtaaagtcttttatcaaaagatccaaagataaacaaaacgttttttagagtactcttctatactgatattagactataaaaaatatttataaaataaaaataatgcgaataatacgtttaaaaatattaaaaaattaaaatgtgataaaaatattgtttaaattatagattaagtgatatagtcgagatacaaagttattatttatccaaagccgagttttaccatgaccacaaaaacagtatattcaaacatagcaatagatttaggtggaaagtacacaggttgcgtatcatatacatcttcgatacaacccttagctgatgacatcaatgcatttattatcaagatgcctgatgaaggtagtagcataaaatatactgtaaaagacagaactcaaaagagacatatggtcaggtctttggacaggtttaaaaaagcaagaaagttaatctatctaattgttgcatcaattgtgcgcagagaacttacatctgatgaaaaagaagcaatttcttctttaatgaaacgaagaggatacacccgactggaagctgagattgagcttgatattttaaaagaatgccctgtagatttatttactttgtatttgaatgatctgtttgatgaaaatcagtctttgtatgatcagtttaatcaaaagtgttgtgacttagatactgctaaagcaatgaaaaaggctcttgcttcagaagaattaagtatagctctgaaatcgtctgatctaggtaagactgaaaaaactctgtacaagtctgcctttaacacaatggttgaggctgcagacaatatcatcaatacatgtgagtttggaaacaaacaccgtaaacagtatttatctgatattaagtttgacttaaataaagattcaaggctaaatgatattgtaaaagtgcttggcgatagtgaaaaactatatagatgcattggaaatatatcaaatctacaattgagatctttgcgttggtatttcaatgatatcagtatgaaaggtgaaccaaagtgggttcctgaaaaattcaaaaaagtatgggtaagagcatataaatactttcattatccaaaagaagatcagctaaaagcaagagctctaattaaagatttagaaagtgcagaagatgccacttctttactatgtactatagatccttttgaaaccatccctccttatgaagatcagaataacagaaatccacctacagatttaacattacttttatctccaaaagagttagatgctaagtattcaacgttatgggaagattgggcagagaagttcgctaacttatatccaaatttaacatatcaactggatgatattgttaaaactacagatagaaaatcaagaattgaattgaagaattcaagctcatataccaagagtaaagtacttcactcatacattctgcaacgtttgtttgatttgtcagcaaataaagatgatcctgttacccttttgagagcgtgggtaagagatccttcaaacgcaaatctggcaagcacagtcaagatcattcactctgtagtaggtgagcgagaggatgaattttatagattagctcagtcatactataacgaagtagaaatggctaagtctggtctatggactgtagtagaatcgcctctacttgaaatttcgggaatacatcctccaatgaaaaataaagtcatatcgactttggtaggaaatgtacttggaattaataacgattttgattatgagaaatttcttgaagtgtggaaatctccaattaagggaagaaaaactctaaagtcaatctgtagagatatagaggaattaagaaaagactacggtaatacttttaaagttgaatatgattacgcaatttattcagctaaaaataagaaaaaatctttgacagcagatcagaagaaacttgtagaaatctataaaataatcgaagatatttctcctttagtatggaacaatatctctcaagatccattgtcagaaattaaatttaacaatccatttagccttgctcaactttatactctaattgaaaacaatacgatggggttctcaagcaattgtgttgcagtaaataaagaaaacaacgcaagaatgcaattcttgtcaggaaatcatgctctgtgttctcgccttccaactgaatctgtaagaccttttgatggtgctttaggaaaaatattagaaagacaggcttttgaaatagccaaagcaaagagttctgagataaaagagttagatagtcttaatgatgctgtgataaatgttggtattttaatagagcagaataagtttgagtttactgagtctgtagctaagattaagaagtcaaagctattgaaaaaaattcaaaagcgaactcaaagtggaatttgtcgtcaactagaacagtggaaatcaaaagaacaaagaattaaagattcttcaagagggatgtgtccatatacaggagaacctatatcagagttatcaaacggagaaattgaccatatcattccaagaagctttaccaaagcaagcatgggtacgatttttaattcagaagcaaatttgattttttgcagtaaaaaaggaaatcagactaagaaagaaaatgtatatacattaagagatctttctccaaaataccttaatgcgattttcggaacagccgatattgcgaagattcagcaagaaattgacagtactgtagcaatactaggcgataaaaatcctagattcttatttgatatgatgaatccaaaagagcaagactgctgcagacatgctttatttatgccacacagcaaagcatatcaaatagtagtatcggctttagcaagatcttacagtacaagagtgaatggtactcagtcatatttcgtaaaagcaattatctcaaaattaagaaatgagttatcgtcttggctaaaatctcacaatagtgctttaaatgtctttgcttataaagtagatccttcagatgttcactccacaagagagaacttgagtaaatctaatccatttttgaaaaagcaagaaaatcagccaataacatctcatgctatagatgctatgtgtgttcttttagcagcaagcactgttgagtctatttctgagaagatttctgaaaatggaagtatagcttttctatctgacttagataacctagaaaaagttcttcctaatcaatatagagttctacgtatagagaagaaatcattctccaataaggatgttcctgaatcaagaaaactttttaaagacactatatatgcagagcatttcctaacagttatgtctttaaaagagcaattaaaggtaggttttaattggaattcaaatgagaatggaaattctgtagagattgttaagggacaaaaagaatttctagagcttttatctccattctttacaaataaagttgtcatcgatggttcattccatgcctataaaattgacaagataagagcatttaacttcatccataagtacttatctcacgagatcgatgataatcaaatgtctaaacgtcagtatgagctattaaattctttgcactatacgaccttgaacacagatgtaagttccatttacgcacaaaacaaatttaaagatcgtaaagaaatcatgaagaaagagaattttgaaattaaaattaaatttccttcatggttgaagtcagatggtagaaagtcattagagttaccttcaaaacttgaatgggaagcagttgtttctaaatttgaagatctgttaggtaaaaaagatgagaatggtttagatatcttctacgaacgcctaaatctaaaaaagaaaaatacctcagtattaaaacacaaaggcacaaggagagtattcagcttacctgtaattagcaccccatcaggaggaattagaattagacgccaatcatttgataataaagatgtttaccaaatggttgcagcaaatactccagaaactgtactaagtaaaggtttttccattcaaaatggaaaagtatcttggtcagacactgtaatggttgattcttatataggtaaaaatctaactgctgttgacaaagcagtaactgttagcgattgctttgtaccaatggaagaagaaagattggtctttaaggatgactctctgtcgatctttatgtctccatcctcagaaggaagacgtatgatcagaatagttcagtcatttgatgattttaactcctgtttaggagataaatttaaatctcctctagatatgccttcagatatgacacttgcaagtaacgatagttgccatgatctagataatctattatcaaagatcaataaggattttacaggcaagccaagagatggaaaaatcaaactgcttacaataggtaataaagtctgttattggtatcaagttgcatcaagtaataaaaaaatgcaagaagtctttgacaatcctttgaattgatatgagataccttactgtaagcgaatatggcacttttttaggtctttcaggagaaagacttattatcaagcaggatggtaagcagataaaggagatccctttatcacgattaagaactatttgtgttcttaaaaggggagtatctgtttctggggatttgatcttgtcatgttctttaagaggaataagaattctctttttagattggaaaggtcagaccatatcagcagtattaggtcagaatcagcatgcagtagtttctttgagaaaagctcagtttgactttataaaagatgaatcactttgctgtgaagtttccaaaaagatcatactttcaaaagttagaaatcaaagagccgttgtactttatttctcaaaatatcaattgaagaataatgaagagttaacggctatagttgataaatatgtaactgcagtaaatcagattgcatctcagatcaaaaatcttcaaggaccacaatggaagaactcattatttggactggagggaaaagctgctgtattgtattggaatatccttatatcactgtccttacttcccgatgattttgaatgcagagaaggccgaggcgctaatagcatgaccaataaagctcttaattatggctatgcaattttggctagttttttattatcagcagttgataatgcaggatttgaaatgtacgctggtttctttcatgtagatagaccaggaaagccttcacttgttttagatcttatggaagagtacagagcttgggttgttgatagagttgtaataaaacttagagcaagactaggcaacttaaaagaatttgattcttcaattaaaaaagcgataagcgatggaatttaccgaacgatggctaccaagtactcttataacaagaaaaaagtgaaactagaaaatattattcaaaggcaagtttataggttgtctggtgtcataagtgaaaagggtaattataagggctattcttttaagtggtaaaccaagatgaatatttaccaaaagtaccttgtctgttacgacatagaaaatgataaaactagaaagaagttctttgagaaaatgaaagatcttgggttgatatctatacagaaatctgttttttatggagatttaaatcaagcagagttctctgctatgaagaaagttgttctaaaaattcttgatcctgattctgacaagtgtttttggacaaagtgcacattgtctgacaaagatctaggcaactgttttggttataaaaactttaaatatatagagccagatggatacgaatcaatttaatctaccggtatcgatgataagacaatactgtttttgtccaagaattccatatttctatatagcaataaatatttcccctgtagagaaagtatggatggctcaaggtgctgaagagcataagcgtcaagagatgttatctaaaagaagaaatctgtctagatttggaatttcatcaataggtaatatttctttcaacgttgaagtatatagtgacaaattgtcacttcatggcatatgtgatgctattttgtttgctgaatcagaactctgtgtcatcgaatttaaaaattctgaatatgagaaattcagtctaggaacagcagtgcaactatgtgcgtactcaatactatgcgaagaaaagtacgacgtagaagtaaaacagtgttttgttctttatggaaataaaggaaaaaccagaaaagtggatattgatgcatctattaggaccaagaccttggaaataagagatcacattataaacaacctcaaaaaggctgatataccaccatctagcgcagaagaaaataaatgcggacaatgcgaattcttcaacttctgtgctgacaggttttaaaaaatacatccagatgcttacgcagttgctggacttaatcttgatttttgatgatttcagctcgccataaaggcgactccaagaactttttcaatctatgctgtcattgtaaagtatttttttcgaaaaatacattcgtttttatacaaaactcaatctttcgaacttacttcacatttttttgtatgcaacatattcttttataagaattttatgttgaagcttcaattatagattgaaatagcccttaactgaaacagttacagaatgacattaaagatgctgaagctggaagcttcaattatagattgaaatagcccttaactgaaactacgaaattttgccattttggactgatgacgatcagcttcaattatagattgaaatagcccttaactgaaacgtaaaacttcctcctcctggtgaatacggtgtaggtagcttcaattatagattgaaatagcccttaactgaaactataaagctgtttctgaagtgcgtgtagatggcagcttcaattatagattgaaatagcccttaactgaaactactttggattttaaagatggattagcctttgaagcttcaattatagattgaaatagcccttaactgaaactcaaattttattgattattcaaacaatgaactgcttgcttcaattatagattgaaatagcccttaactgaaaccagtgttatccacagcgagctgtgcgttattaattatgcttcaattatagattgaaatagcccttaactgaaactttaagttaatgaaaaatatagagaaaaaaatcaactgcttcaattatagattgaaatagcccttaactgaaacattagcaccttagctaaaccttgccatgatttagctgcttcaattatagattgaaatagcccttaactgaaactttttacaaaaggatttttacagtttcccaataagcttcaattatagattgaaatagcccttaactgaaacgtgagttccgtcagtggatttgtaatgaagtattacctgcttcaattatagattgaaatagcccttaactgaaacgttctctaatttaccgtctgatgtccgtcgtaagttgcttcaattatagattgaaatagcccttaactgaaacagagtaagcgattaggaacaaaaaagaactgcatagcttcaattatagattgaaatagcccttaactgaaaccgcttaagaatgctaccttgcgaggttatttttgaaggcttcaattatagattgaaatagcccttaactgaaaccaaggtggttttggtgttcagtcaatattcgactatctgcttcaattatagattgaaatagcccttaactgaaacattgtcttgttagtctgctgtttaaagcgttcataagcttcaattatagattgaaatagcccttaactgaaacttcttgataatgacttgtaagccgttatcaaagaaaagcttcaattatagattgaaatagcccttaactgaaacacaaactcttctaaatttgcccttacatctggatcatagcttcaattatagattgaaaaaagctcactaaaatctctaaaacagcactacttcgtaattaacactaaaaattataatagatcaaaaaattaaagctgaaattatagaataatgtggtgactgcagaaaatccacagcttgaacggattactacatcaataatctaaaaatcaataggcattattcaatgttttttcacttattactgtttcagtacattaatgagaaagtgagcgcttttgaggaaatacaaaaatctctttagcttgatgcattaattttcaatttattagtcaagacagtacagaaataaatttgtaattgtttataaatcaataagtaataaattatacaactaataaataaattatatttaaataaaagtatatagtaaatatattatgttatagtcaaacatataaaagaacttaagtgggagtaaaaatgagtacaacttcaaacaaaatcgattcaaaggactgggacaagatccttaaagagattaatgcatctattgcatcaggtgagttctacaaagatgatgaaatgactgatgaagaatacattgaagatgcagctgattttggctactttcaagaagacgaagactttgacgatgacgagttctttgactagttcatctctttggctttattttgcttatcttttaaaatctcagtctaataattcttacggagaatttcatattttcaaagctctcatgtaaaatagagcctgaaatttcaatttatgctttttaaagtagaaaatattatatgactgagaagttacagaaaattttatcccgcgctggaattgcttcacgtagagctcttgagcagatgattgatcagggcagagttaccgtaaatggcaaaatggcaactatcggtgacagatacgaagcagatgacattttagttaaagttgacggtaaggtagtattaacacctgacagtcaaaaagtatcttgcagagtcttaatgtatcataagcctgaaggtgagcttactacattatcagatcctgaaaacagacctacagttttcgaccatattccaaagcctccaaccggtcgctggatctacattggacgtcttgatatcaatacctcaggtttactcttatttactaccgatggtgaattagcaaatgcactgatgcatcctaaatatgaagttgagcgtgtatatgcagctcgtatctatggtgaagtaagtgaagagcaaatcgatcagttaacccaaggcgtaatgctagaagatggtaaagctcgctttaataaagtaacttacgttggtggtgaaggccgcaatgcctggtaccacgtaaccttaaaagaaggtcgtaagagagaggtccgccgtctttgggaagcagtaggtcttaaagtttcacgtcttatcagaattaagtacgctggtattgatcttgatcctgacttaaagacaggacagttcagagaacttaccttaaatgagttaaatcgtttaagaaaagctgttcatttagagccagttgaagagttggctcctgcattagacttaaatgcctcatcttcaaataaaggaagaaaagctacaaaagctcctgtaagaaagcctgtttcatttaattcttcgaaagaagaaaatgatgataagtcttcaagaagatctccatacggtaagccacaatctcgtcctgcaagaggggataagtcagctttccctaagaaaggtaaatcttttggtgagaacaaaggaagaaagttctcacaagattcttcatttgataaaaatggcagaagaaattcttttaacaaagatgattcttcaagaaagtttggtcctaagtcaaaaaactctgcaaagcactttgtttcacacacaaatcttcgctctgaaaaagaaggtcagtcttttaataaaggctatgctgtaaagagcagaggtagtgctgtatcaaagtcttcttttgcaaagccaagaaggacaaatagaggttcttactaaacaagaaaaaactctaaaggcagaaaagtggaagagctagttaaatttgatctttattcaaatgatgctcctgtagctcacatttctgccttgtcatatcgcaggcatgaatactacgactttacctactctaggtcttggctaagttctggctattcaatcgatcctaccattgaattttctccaaaaacgcaaagaataaagggcatttctccttacttgagagatcttatcccagatcgctggggaaccttgattcaaaagagaaaactaggctacactccatcatcgttagatcttttacttggagccaatgatgccttccgtgaaggttctttaagagttaaagttaaagataagtttgtaaatacctttagtcaaacttatgatttatcatctttagaaatcctgattctggcatcatttcatgtagaacaaggttgtagctctgaagaggatctagatcttttatattctgtaagtgcaacggtaggaggagcaagacccaaagtctgcttagaaattgaaggaaaacagtacattgctaagttgccttcgtttaaagacaacgctctccaagtatctagaatagaaagactctatcttgatcttgctaaaagcgcaggaatcaatgcctgttcgtcgaaacttatagaaacaaagtttggagatgtccttcttctccaaagatttgaccgagccgagaataacagtagaaatcccttcatgtcagcaatgactgctcttggcttatctgaaaatgatgagttggagaattacagctatgtagatcttgctatgtctgatttcatgacgtcaaaagaacaaaagcacgagttattcagacgcatggtctttaatggtctttttggaaatacagacgatcatttgcgcaaccatgcgtttttaagagtaaatggaaagtggaagttatctccggcatacgacttaactccaaatacagtcccttataacaagcagcatcatgcgttatgtttcattgctggaaaagatctgccttcacttgagctttttgatgatataagaggcttctttgacgttgatgacaaactttataaatcaataatgttagatatgaagaaagctcaagaatcatgtcttactttgcttaagaagaataaagtatctcctgataacataaaacttctgcaaaataattttgtacatgaagattttgaaaagctaaaatccattgtttagctgtcatatctatcaatttgaagcaaaagaatgcacctattgcaattgtgctatgctaattcgttgtttcaactgtaatatatagcaaagcattcgatgttacttcacataattaatacatgttgttaacatttgttgcttataattgctatatttacatcgttatacatacttttgattttatttgagaaattaaaacttaaaatgaacgcagacccgactatatttagtcacaccattctatctaacctctctattttttcattttcaaagctaggagctaaataactatgcaagaacaggctctagctcatccaactttattattcgatatgctgtgggtattagatcctactgcatggttaggtttattaaccttaacagcaattcagattgttttaggtattgataacttactattcattgctattctgtcagcaagacttccagcaagacaaggtaagactgctcgctacatcggtttaggtggtgctttaatcatcagaattatcttgatgatcttcgccgcttacgtaatggcaatgtcagagccattgttcactgtcttaaactttgaagtttcagttcgagacttaatgatgttcttaggtggtgctttcttgatatacaaatctacagaagagcttcattcaaagttagaagaccaaagcaatgaagactctgtttctgtaagcaagtcagcaggccattcatttgttattgtagccacacagattatgatcctagatgtactcttctcaggtgattcaatcatcaccgcagttggtatgaccaatcatgtttacatcatgatcgtagctgtaactattgctatggcattattgatgtgggcttcaggctttattgcagtctttgtttcaaagcatcctacagtagttatattgtgtttaggcttcctattgcttatcggtttcagcctgattatggaatcattccatattgaagtaccaaagggatacttatactcagcaattggcttctcattgttaatcgagatcttcaaccaggcctcaagaaagactgttttgaacttaaagcactctaataacatgcaggcccgtcaggtagcagctcatctggtcttaagactgttaggctcaaaaaatgacgacgatgtgcattcaattaaggaagctattgtttcacgtcctagtgcctatgtctttaacaagcaggaaaaagagatggtatctcgtgttcttgaaatgtcatcactgcctgtaaaggctgtaatgacagcaagaactgatctgcaaacaattaaagttgatggctcaaaagagtacatcttaaacaaggcattatcttgcactaagtcattattgattgcttacagaagcggtcacaaagatcagcctttaggctttgtatctcgtgcagatgttctaggcttgtttgtagaagacaaagtagatgctactcatatggaaaagattgtccaggagcctttatatcttccgcaaacaattaacatcttaagtgccctagatcaatttaggcagtcaaagaaatactttggatttgtctttgatgagttcggaggttttgaaggtattgttactgttcatgatgtggttgaagagatcacaggtgagatgcctgaaaagagtgaaactccagagattgtacgttttggtaaagatggtaagtcatttagagtagatggtgatgctatcttacctgatgtagcaagaataactggtttagacttacctccatcagagcattatcagactattgcaggttacgttttagacagattgcagagagttccaaagcaaggcgaaactttagatgttggtgactggaagattgaagttttcagcgctgatgcaactgcaattaacgtcttaaaactctctaggataaagtaggaaaaaacttgatttttatccttacttttgctataaataaagggcttgaagctgatagcgtttcaagcctgttcaagtgtgagcttgaaccttcagtaataaacgagtttattactgatagatatagtggaacttcataaagaaagggaccctagttgaggtcctttttttgtgtttaaaattaaataaattgaggtactaatggcaggaaccattgaagagaaagtagcagagctagtaactcctctggtggagtctatggatcttactgtatggggtatcagattccgtggcggtaatgatcatgcgatgttgcaggtgtttgttgattctgagcaaggtgtaagcgcagataagtgtggcgagttaatggatgtattatctcctgctttagatgcagctgaccttatcgctcctaaatatacacttgaggtatcttcacctggtcttgacagaattttgttcacacttgagcaagctaaggcttatacaggtaaaactgtaaaagctgaacttagaattcctactcagggcagacataagcttcaaggtactttagatgaagtaactgatgatggcatgctgaagattaacgataagatctcaggtcttatcgaagttgcattctcaaatgtatctacagcacgtgttgtcccagagtttccaactaacaacaaaaaagctcctaaaagcggatcatagagaggtcttaaattaaaaatgggtaaagagatcattgccatcgcagaggcactatcaaacgagcgtgctattcctagagataagatttttgaagctttagagactgcattagcaactgcaaccaagaaaaagtatccggttgatatcttagttcgtgttgtaattgacaagaaagacggctcatatgacaccttccgccgttgggaagtagttgatactgacggtccactagagaagcctgctcaggaaatatcacttgcagcagccgctgttgaccatcctggtattaaagctggtgatattgttgaagagcagatcccttctgttgagtttgaccgtattacaattcagacagcaaagcaggttctatctcagaaagttaaagatgctgagcgcgagcaggttgtagcagagcagcgtgacagaatcggtcatgttgtaaatgcaaccgttaaaaagcagactcatgacatcatggttttagatttgggcaacaacgctgaagctgttctaaagcgtgagcagatcattcctcatgagacctatggtcgtggtgacagagttaaggttttattacaggatatccgttcagagccaaatcgtggtccacagatcatctgctcaagaacttcacctgatttcttaaaagagttattcagaatcgaagtacctgagattggtgaagacgtaatcgaaatcatgggtgcagctcgtgatcctggttcacgtgcaaagatcgctgtaagatccaaggacagaagaatcgatcctcgtggcg

SEQ ID NO: 117 - DNA, 24212 bp, synthetic construct
  source 1..24212: mol_type = other DNA
  misc_feature 1..24212: note = Synthetic
gttgtaatggtacaggttctattatcaccaacggttgtaagacctgcggtggtactggccgtgtagttgacttaaagaccttatcagttgatattcctgctggtgttgatactggcgatagaattcgcttaagtggcgaaggtgaggctggtttaaacggtgctggttcaggtgatttatatgttgtaatcgaagtaaaagatcatgagatctttactcgtgatggcaatgatttgtactgtgaagtaccaatcagctttacaacagcagcactaggtggcaaggttgaagttcctacattagatggtcctgtaaatattacagtacatcctgagacccagaccggcgtaatgatgcgtctgtcaggcaagggagttaagtcttataactcaacctttaaaggtaacctgtactgcaagattgtagttgagacacctgtaaacttaactaaagaacagaaagatctgttaaagaagtttgaggaatcattaaacggtgatgacaaagcttctacaacaggggatagtaaaaagaaaactgacaccgcagcgaagcataagccaaagtcagcaggcttcataaaaggtgttaagaagttctttgaggatctatcaagttaataatgtgagttgtacagctaatcataagttttcatattgaactaagttatagattaggttattatcaactcatatgatcatgaggacgcctgatgtaacagttaggcgtcatttttttatattttaaattgaggctattatcatggatcagactccaatgactcctcgtggcgaggatttacttcgcaaagaattacagcgcttaaagacagtagagagacctcgcattgtagctgcaattgccgaggctagaagccatggtgatcttagcgaaaacgcagagtacgatgcagcaaaagaagagcagggcctttgcgaagcaagaattaaagacatcgaaggcaagctagcaagtgctaacgttatcgatgtatctaagttaaagactcctaacggtggcaagctaaaggttatctttggtgcaacagtaactgttgttgatgttgatactgacaaagagacaacttacagaatcgtaggtgaagatgaggccgacattcaggctaacttaatttcatacaagactcctatcgctaaaggcttattaggcaagtgcgaagaagacgagattgaaattaagatccctaagggaacaatctgctacgaaattgaaaaggttgagtatatctaagagataactaagaccttttgatgtaacttaaaattctagttacgcaaccattgataagaaaacggaagtactcaaaagtgcctccgtttttttgatcttaagataattgtaggctttaaaagtagactttaagtagactttaaagtagactttatctagaggtaacgattatgaatttaggacatgaaaacgaaactcttgagttcgaagagagtttaggtcaacttgacaaaggtctaaagtctataactgcaatgctaaacagatctggctatggttgtgtttgctttggtgtattagacaatggagatgttaaagggttaaccgttggtcataataccttaatggatattagaaataagattaagtttcttatcagtcctcaggctctggttcatatagaaaaagtgacagttggaaagcttgattatatcaaggtaaccgctcatggctcagatattccttacagttgcgatggtcgttactacattagaaatgtggctgcagatgagactgtatctaatgaaatattacgcaaaatgttaactacatcagagactgacatcataagacgcataccttctgaagatcaagagcttacttttaaccaatttgatagttttatgtctaagtatggcattcatacagaatactctatttctttccataagaattacggtttaaaaaatgatgaaggtaagttcaatctaatggcttatctgttgtctgatcaaaacaatgtaagcattaaagttgttaaatttgaaggtaccgataaaagcacaatgtcagagagaacagattttggatctcaatgtcttttaagatctgttcaagaagttcttgagtatgtaaaagtaaacaatgcagtaaaagtagatctttctggcggcataaggagagaaacttcactactagattatgaagcttttagagaggcttggataaatgcatgtattcataacttgtggattgagatgattcctccaattgtttttatatacgacgatagattggagctcctctcaaatggtgggttaccatatggattatcatgtaaagaattcttttgtggtaaaagttttccagtaaatagagaattgtatgctattttaaaatcaactactttggctaatgaaagtaacggtatatctacaattgtttctaaatatacaaaagatgctttttcaataggtagtggcttaattaaggtgactctaaactttaactttgaacgtgatgatgttgtagcacgaaagcataaagagaaagctatttataaactgaccatcaatcaaaagaagatcttagagttgttaaaaggtaatggcgaacttactcaaaaagagctgtctgataagacctcagtaagtttagcaggagtgaaaaagatcatgcaaaagttacaagagcttaatttaatctcaagaagtggggctaaaaagaatggtcgttggattgtagcatcccaactgaaataaaaaacgccttattaaaaggcgccttttacaatttgagtgaacctagaagttcaacttaaaactagcgaggaagaatgaatctgctgtcgtcttttctctgtctgaatagaacagcaattctaccaactagagatactaattcagcattaacagttttagcagcagtttctgcctgctcttttctaccttcaccagcatttaaacggatcttgataagctcgtgatgctcaatgctgctgtctagctctttaagcactgattctgaaagaccgtcattgcctagtaagacaactggctttaatgaatgagcttgtgcctttaaaaactggcgctgatgtgaattcaatgacatacaaaacctataataagaaaaaatatctgttaaaagcttaatctattgtgatttagacttcgcataaatgttgtgcaaattgtataatattatcgagtaattttaaactgaaaaatctatagtaatatttgggatttaaatttaatgccagcaaagaaaagaactgccagccaaactagatggttacaggaacacttttccgatccttatgtgaagcaggcccacaagttaggactgcgttcacgcgcttcatttaagctagaagagttgcagaaaaaagatcacctgatccgtcagggtaatatcgtagttgatcttggtgccgctcctggcggttggtctgagtatgccgtaaagtgcatcggagatagcggtcgagttatcgcctgtgacattctgccaataagacctattcgtaacgtacagtttttgcagggtgacttcagagaagatgaggtcttcaaaaaactgtattcaatgatcggtgtcggtgctcatgtagtactctctgacatggctcctaatatgtcaggtaacctagctattgatcagccaagagccatgctgttatcagaattagccttagatatggcaagacgtgtactgcgtattggtggtagttttgctgtaaaagttttccagggtgtaggttctcaagagtttttaaaagaattacatcaggactttaccactgttaaagtaagaaaacctgatgcttcaagagaccgttctcgtgaagtttatatggtagcaatgggctttaaaggtcatcctttaaatggtgttgcaccaggtgctgaatttgaagagtctgaagataagactttggagtaagtgagtaaatatgacaaaaaacctaatattatggctagtcattgctgtgattttaatgactctctttgagtcatttaactcatcagacaattcaggtcgtatggaagactacactagtttcgtaagagaagtgcagtcagatcagatacaggaagttgtatttgatggcaaggttatcaatggtgttaaaaagaacggtgaaagattcttaactgttatgccattgagcgatcctgcaattatcgactctcttttatcacacaatgtaagagcatctggtactaagcctgaagagcagagcttattgctctcaatctttgtgtcatggttcccaatgttgcttttaattggtgtgtggatctttttctcacgtcaaatgcagggtggttctaaaggcaatcctctgtcatttggtaagtcaaaagcaaaactactctctgagaatcagattaaaacaacctttgatgatgtagcaggttgtgatgaggcaaaagatgacgtagttgaattagtagacttcttaaaagatccaaccaagtactctaagttaggaggccgcattccacgtggtgtgttaatggtaggtcctccaggtaccggtaaaactttattagcaagagcaattgcaggtgaagctaaagtgcctttcttctcaatttcaggttctgatttcgtggagatgttcgtaggtgttggtgcttctcgtgtaagagacatgttcgctcaggctaagaagaatgctccatgtattatcttcatcgacgaaattgatgccgtaggtcgcaagcgtggcgtcggcatgggcggtggtcatgacgaaagagagcagaccttaaaccagttactagttgagatggatggttttgaaggctttgaagctgtaattatcatcgctgcaactaacagacctgatgttcttgatccagcactgttacgtcctggtcgttttgacagacaggtcgtggtaggtttacctgatgtacgtggtcgtgagcagatcttaaatgttcatgtaaagaaagtacctttaggtaaagatgttgatactgcaactatcgcaagaggtaccccaggcttctctggtgccgaattagcaaacttggtaaacgaagctgccttaaacgcagcacgtcataacaagcgtgtagtaagcatgaatgagtttgaagaagctaaagataaactcttaatgggtgctgagcgcagaagcatggctatgaatgagcatgaaaagatcaacactgcttatcatgaggcaggtcatgctatcgtaggtaaattggttccagagcacgatcctgtatacaaggtatctattattcctcgtggcagagctttaggtgtaaccatgtatctgcctgaacaggataaggtatctcaaagccgtatcggtctgttatcaaacatttctactctgttcgctggccgtatcgccgaagagttaatgtttggtactgatgctgtaactacaggtgcttcaaatgatattgaaagagcaactcagattgctcgtagcatggtaacccgttggggcttctcaaagagattggctcctatgcagtatgaaaaggacaatgaaggttctgcatacttaggtggttcatctactactatgatttcaatgtcagatgaaactgctaagatcatcgatgaggaagtaacagaaatcatcaactcatgctacaagaaagctcaggacttacttgaagctaataaggacattcttgagaatatgaaggatgctctattaaagtatgagaccattgatgctgatcagattgacgatttgatgaatcgtaaagaagttcgcccacctcgtaaggtaggagatgctaaatcttcagatcagaaatcagatgataactcaaaaaatgagaaatcaaatgatgtaaagactgaggataagtcaactgacaatcagtctgaaaaaactaagactgagaactctgacaatgcatcagagacaaaaaaagacgataatgacaataattcagagcagtaattagacaggacaacttgtcaaaattaccatcgtctcatgaaggatctctttacaggaggtcctttgcttttaatgtaggttaaatgggcaagctgatttatatcagttttgtacaagtttagtgtgggatattcgatgaaattaagactgccaaatagtaaaagccttgatttgtcttttacaaaagtaatgggaaccattgctttagaagagaatgatacccgttcaattgaagatcttgttcttctggccaacagctacgtaaaagcaggagccgagcttctggaaattggtgccagagcaggttcagatggcatcaatgaaaccagagtgatgtctgttctttgtgctgtaatgaacagtgttgatgttcctgtggccttaaactcaaacaactatgaggttgtttcacaggctgttaaggccggtgtctccatggttattaccaccaacggccttgcaactgagggcatgattgaccttataaaacgctctaatgttgcagtatgccttcactttgatccaaaagaaaaaattgaagatgacagcgatgtggtaagtatcatttctgaatactactttgaaagaatcgatactcttttaaatgccggtattgaaagaaagagattactcattgacccatcagttgtgaatgcttctgtaagtaacagattaagactgttaggaagacttgagagctttaagagttttgctctgcctatctgtattgctctgcctcgttctttaccaaaagaagacagattcatgaaagataatagagtgcttaccttaactacagctttattctgttcatctgtaagtccagttcaaatcatcagaacagcagatgtaggtgaagttgcaattgcaattggtttttggcagattatggcaagtaagactaagccatttaagttatcaaagactatcgtaagacgtctaagacttctacgtgatgcaattcatgacttaagaaagaacaaagaaaagaattaaaattgagcatctttaaaagtctaatcttttaaaggtaaataacttttagaaaaaaagaaaacaaagatgaaaagaaaatattttggtacagacggtgtacgtggccgtgtaggtcaatatcctattactcctgattttgcagtaagactaggtttagctgcaggtaaagttttaggtaagaaacatggcggtaaagttatcattggtaaagatactcgtctgtcaggttatatgctagaagctgccttagagtcaggcttttcagcaggtggtatgtctcctgtaatgttaggccctatgccaactcctgctgtagcttatttaactcgagcattcagagcagacctaggcgttgtaatcagtgcttcacataacccatactatgacaatggtattaagttcttctcagctcatggtaccaagttacctgatgaggttgaacttgagattgagtctgtattagatgctaaggatattcctttagctgcttcatcagactttggtcgtgccttcagacaggatgatgctccaggtcgttacattgagtactgcaagagtacctttgcaagccacttctcattagagggcatgaagattgttttagattgtgctaacggcgctacctatcacatcgctccactggttttcagagagttaggagcaactgttatcaccatcggtgataagcctaatggaactaatatcaatgatggtgtaggttctactcatccagaggctttagttgctaaagtcctttcagaaaaagctgatcttggtattgcttttgatggcgacggtgaccgcgttttaatgtgcgacagtcacggtaacttacgtgacggtgacaaccttctgtatatcattgctaacgacactaaaaagcgtggacgtctgccaggtggtgtagtaggtactttaatgacaaacttaggtcttgagttagctttaaagcgtgaaggtattcctttctctcgtgctaaggttggtgacagatacgttatggagcagttgttagagaagaactggactctaggtggcgagaacagtggtcacatcattagcttaaaccatgcaactacaggtgatggtattgtttcagcgctacaggttctaaaggcttgtatgtatgcaggcaagacagttgaagagttatctgaaggtctgaccatgtacccacaggatcttatcaacgtaagattaacagcaggtcttgatgtaactcgtgacgagaaagttcaggctgttgtagctgaagttgaaaaagagttaggctcaaccggtcgtgtgcttttacgcaaatcaggaaccgagcctgtggttcgtgtaatggttgaaggtgagaatgcacaggacgttcatactaaagctcaaagaattgctgatgtgatcatccatcaagcaggctgtgaaaatgcttgaaaaaaagcataataacctgtaatatttgcacagctttgtatacgcaaaataggatgcgtttttattatgtacgaaattggtattgtagttttattactaattgcaattgcaatgattgctttgatccttgttcagcagggtaaaggtgctggcatgggcgcttcatttggtgctggtgcatcaaatacagtattcggttcagtaggatctggtaacttcctgactagatcaacttggactttaattattctgttcttcggtgtttgcttattcttaggttacttacagaagtcagctcacgaagagaagtcaagcttcagcaatatttctgagactcctgcaacagagcaggttgaagagaagactgttgttaacactgatgctcctgtagttgatacagatgcacctgcagtttcagacacaacagatgctcctaagactgacgctccagagactaagtaataaaagtttctactaaaaaagacccaccgtacggtgggttttttattggcgattttagataaattgattagaagacgtagtgcttggtaggagttatgacctcatgcaaaggcatatcccaatgctcaataggtactgcatctaaaagctggaagtcataagctacaccgattaaaagacattgagctgacagtttctttaacattctgtcgtaatagcctccacccatgcctaatctattgcctttattatcaaatccaactaaaggcacaatcaaagcttcaaatttatcaggagtcaccagattctcaggtaaattctcaggctctaaaatgtggaagcggttttcaattaacctgtcaccctttttataagcataaaagtccatatgaccttttacgtgaacatccataaaaggtagggctaattcatggtgttctaaaagatactcattgataggcttagtagataactcaccgcctaagctcaaatatgatcctaccatcttcttttgctggaagtgcttgtggtgacttaagatttttacaatctcaacacccgcttcataggctttaacaggtgttacctgtcttctttgctctaagatctgctgacgcagagacttacgaagaactttgttatcaaaaaaatcagtcattgttagctctttgaagagaagtcttcatctttgtgattagtttcaaagcttcattttcaaatggagttttatcgtttaaaaatcccagtaaggtactctctgagtcaagcgcaattaagatagctgcctgtgtaggagttaaattaggattctctcgcatcatatttgatgctttagtttgcaaagaagctatcgctctttgcaatttttctttttgttcttttgcgcatcttaagttaaaactttcaccaaagagtgcacattgaacaaaatcctgagtgttctgatctgacatatgtaattccttttgctgtagatattgtaaagtcttttatcaaaagatccaaagataaacaaaacgttttttagagcactcttctatactgatattagactataaaaattatttataaaataaaaataatgcgaataatacgtttaaaaatattaaaaaaataaaatgtgataaaaatattgtttaaaatatagattaagtgctatagtcaagctattaagttgtcattcatcaaaagcagagttttattatgagcaaaaagacagtgtattcaaatattgcaattgatctaggtggaaagtacacaggatgcgtatcatacacatcttcaatattaccatccgcagacgatttcaatgcttttattattgaaatgcctgatgacggtaatggaattaaatatactgtaaaagatagaactcaaaagagacatatggtcagatctttggatagatttaaaaaagcaagaaagctaatctatctagttacagcttcaataataagaagagaactttcctccgatgaaaaagaagcaatttcttctttaatgaaacgaagaggatacacccgactggaagctgagattgatcttgatattttaaaagaatgccctgtagatttatttactttgtatctgaatgatctgtttgatgaaaatcagtctttgtatgatcagtttaatcaaaagtgttgtgacttagatactgctaaagcaatgaaaaaggctcttgcttcagaagaattaagtatagctctgaaatcgtctgatctaggtaagactgaaaaaactctgtacaagtctgcctttaacacaatggttgaggctgcagacaatatcatcaatacatgtgagtttggaaacaaacaccgtaaacaatatttatctgacattaggtttgacataaataaagattcaagactaacagatattgtaaatggtttaggaaatagtgaaaaactatatagatgcatcggaaatatatcaaatctgcaattgagagctttgcgttggtatttcaatgatatcagtatgaaaggcaatccaaagtggatccctgaaaaattcaaaaaagtatgggtaagagcatataaatactttcactaccctaaagaagaccaactaaaggcaagagctctaattgataatttagaaagtagagaagatgctacttctttattattttctattgatcctcttgataccatacctccatatgaggatcagaacaatagaaatcctcctactgatttaacattacttttatctccaaaagcgttagatgctaggtattcaaaagtttgggagaattgggcagagaagtttgctagcttatatccaaatttgacatatcaattagaagatattgttaaaaacaccgatagaaaatcgagaattgaattaaagaattcaaactcatataccaagagtaaagttcttcattcgtacattctgcaacgtttatttgatctatccgcaaataaagatgagcctgttaccttattgagatcatgggtaaaagatccttcaaactcaaagttgttaagcactgccaagataatccattctgtagtcggcgagcgagaggatgacttttataaattagctcaatcatactataacgaagttgaaatggctaagtcaggtctatggacagtagtagaatctcctttacttgaaatttcagaaatacatcctccaatgaaaaataaagttatatcaactttggtaggaaatgtgcttggaattaataacgattttgattatgagaaatttcttgaagtgtggaaatctccaattaagggaagaaaaactctaaagtcaatttgtagagatatagaggaactaagaaaaaattacggcaatacctttaaagttgaatatgattatgcgatttattcagctaaagataagaaaaagactttaacatcagatcagaagaaactagtcgaaatctataaaacgatagaagagatttctcctttattgtggagcaatatttctcaagattcgttgtctgaaattaaatttaacaatccatttagtttatctcaactgtatactctaattgaaacagatacattgggattttcaagcaattgtgttgcagtaaataaagaaaacaatgcaagaatgcaatttttgtcaggaaattgtgcattgtgttcccgtcttccaactgaatcagtaagaccttttgatggtgcggtaggtaagatattagaaagacaagcttatgaaattgctaaagcaaagagctctgagataaaagagctagatggtcttaatgatgctgtgataaatgttggtattttgatagagcagaataagtttgagtattctgcatcattagcaacaattaaaaattcaaagtataagaaaaaaattcaaaaaagagcaaaaagtggagttagtcgtcaattagagcagtggaaatcaaaagaacaaagaattaaagacgcttcaagagacctttgtccatatacaggagaaccaatatctgagttatcaaacggagaaattgaccatatcattccaagaagctttaccaaagctagcatgggtacgatttttaactccgaagcaaatctgattttttgcagtaaagatggaaatcagactaagaaagaaaatgtgtatacattaagagatctatccccgaagtatcttaatgctgtgtttgggacagcagacagtgtaaagatcaagcaagaaattgatagtactgtagcaattttaagtgataaaaatcctagattgttatttgatatgatgaatcaaagagagcaagattgttgcagacatgccttatttatgcctcacagtaaagcatatcaaattgtagtatcagctttagcaagatcttacagtacaagagtaaatggtactcagtcttattttgtaaaagcaattatctcaaaattaagaaacgagctatcttcttggttaaaaactcacaatagtactttaaatttcttcgcttataaggtggatccttctgacgttcattccactagagagaacttgagtaaatctaatccatttttgaaaaagcaagaaaatcagccaataacatctcatgcaatagatgcaatgtgtgttctttcagctgcaagcaatgttgagtctatttctgagaatatttctgaaaatggaagcatagcttatctatccaatttagagagcctagaaaaagttcttccaaaccaatatagaattgtacgtatagagaagaaatcatttttcaataaagacgtccctgaatcaagaaaactctttaaggacactatatatgctgaccatttcctcacagttatgtccttaaaagatcaattaaaggtcggttttaattggaattcaaatgatgaaggaaattctgtagaaattgtaaaagggcagaaagagttccttgaaattttagctccattctttacagataaagtcgttattgatggttcattccatgcctataaaattgacaaaattagggcttttaatttcatccataaatacttatctcatgagattgatgataatcaaatgacaaaacgtcagtatgagttgttaaattctttgcactatacgactttgaatactgatgtaagtacaatctactcaaaaaacaaatttaaagaacgtaaagaaatcatgaagaaagataattttgaaataaaagttaaattcccttcatggttgaagatagctggtagaaagtcattagaattaccttcaaaacatgaatgggaatcagtagtttccaaatttgaagatttgttaggcaaaaaagttgaaaatggtttagatattttctatgaacgcttaaatctaaaaaagaaaaaaaattctgcattaaagcacaaaggtacaagaagagtattcagcttacctgtaattagcaccccatcaggaggaattagaattagacgtcaatcagtagataataaagatgtttaccaaattgttgaagcaaatactcctgaatcagtgctattcaaaggtttttttgtgcacaatgaaaaagtatcttggtctgactatgtaatgttagattcttacataggtaaaaatctaacctatgttggtgagcctgtagcaaatagcgattgctatgtaacaatggatgaagaacgcttagtctttaaggatgactctctatcaatctttatgtcgccttcttcaaaagacagatctatgatcagaatagttcagtcttttgatgattttaattcttgtttaggcggtaaatttaaatcaccattagatgtgccttcagaaataactctcgtaactaatgatagttgccatgatctagataactttttatcagagattaataaggatttcattggaaagcctagagatggaaaaatcaagttgctttccattggcaataaagtttgctattggtaccaaacatcaagaaataaaaaggtaaaagcagtatttgaaaatccattgaattgatatgagatatcttactgtaagcgaatatggaacatttttaggactttctggcgaaagactgactgtaaaacaggatggtaaactgataaaggagatccccttatctcgattaagaacgatttgtgttcttaaaaggggagtatccgtttctggtgacttgatcttgtcctgctctttaagaggagtaagaatactctttttagattggaaaggtcagaccatatcagctgtattaggtcagaatcagcatgcagtagtttctttgagaaaatctcaatttgattttattaaagatgaagctctttgcagtgaagtttccaaaaaaatcattctttcaaaggttagaaatcaacgtgccgttgtactttatttctcaaaatatcaattgaagaataatgaagagttaacggtaatcgtagacaaatatgttacttctgtaaatcagatagtaaatcagatcaaaaaccttcaaggtccacaatggaagacttcattatttggactagagggaaaagccgctgtattgtactggaatattcttatttctctgtctttacttcccaatgattttgaatgcagagaaggtcgaggtgctaatagcatgaccaataaggctcttaattatggctatgcaattttggcaagttttttattatcggcagttgataatgctggatttgaaatgtacgctggtttctttcatgtagatagaccaggaaagccttcacttgttttggatcttatggaagagtacagagcttgggttgttgatagagttgtaataaaacttagatcaagactagcctgtataaaagaatttgacgcctcaattaaaaaagcgataagtgatggaatttaccaaacaatggctacaaagtactcttataacaagaaaaaagtgaaactagaaaatattattcaaaggcaagtatacaggttgtcaggcgttataagtgaaaaaggaaattataagggctattcctttaagtggtaaacaaagatgaacatttaccaaaagtaccttgtctgttacgacatagaaaatgataaaaccagaaagaagttctttgagaaaatgaaagatcttgggttgatatctatacagaagtctgttttttatggagatttaaatcaagctgagttctctgccatgaagaaagtggttctaaaaatgcttgatcctgattctgacaagtgtttttggacaaagtgcacattgtctgataaagatttaggcaactgttttggttataaaaactttaaatatatagagcccgatggatacgaatcaatttaacctaccggtatcaatgctaagacaatactgtttttgtccaaggatcccttatttctatattgctagaaatatttctccattagaaaaagtatggatgtctcaaggtactgaagaacataagcgccaagagatgttatctaaaagaagaaatctgtctagatttggaatttcaacaattggtaatgtttctttcaatgttgaagtatatagtgacaacctgtctcttcatggcatatgtgatgccattttgtttacagaatctgaactctgtgttatcgaatttaaaaattctgaatatgagaaattcagcctaggaacggcagtgcaactatgtgcgtactcaatgctatgcgaagaaaagtacggagtagaagttaaacagtgctttgttctttatggaaataaaggaaatactagaagagcgagtattgatgcatccatcagatccaaaacattggaagtaagagatagcatcatacacaacctcaaaaaggctgatataccaccatctagcgcagaagaaaataaatgcggacaatgcgaattctttaacttctgtgcagaccggttttaaaaaatacatccagatgcttacgcagttgctagacttaatcttgatttttgatgatttcagctcgccataaagacgacttcaagaactttttcaatctatgatcttattgtaaagtatttttttcgaaaaatatatttgtttcagtgcaaaaaataatatttcgaaacttacatcacattttatatgtgcaacatcttctttttaaagaattttatgttgcagcttcaattatagattgaaaaagcccttaactgaaactttgttatttacaagtgtattaaggagcttattcatgaagcttcaattatagattgaaaaagcccttaactgaaacacaaattgcaacaaattagagcttgaagacttacaagcttcaattatagattgaaaaagcccttaactgaaacgtgttaatgtcagacactttacctgtattcaaatcaatgcttcaattatagattgaaaaagcccttaactgaaacttctttttcgttagccatttgacacctcgtcaatcaggcttcaattatagattgaaaaagcccttaactgaaacaaagattatcgcgctattgttcttggtgaagttttggcttcaattatagattgaaaaagcccttaactgaaacaagcatggcttcttcatacatctaccgatatattttctagcttcaattatagattgaaaaagcccttaactgaaaccttacgtagcccggtatactgacaagaaacaagaactagcttcaattatagattgaaaaagcccttaactgaaacgtcttaagagaacgtaaattagttgagccatagagcttcaattatagattgaaaaagcccttaactgaaacacattttcactgtttgctggttgtaccaaagagctagcttcaattatagattgaaaaagcccttaactgaaacttcttgcatcggcttgccgttcatggaaatcaaatcatgcttcaattatagattgaaaaagcccttaactgaaacatcaatacggtgattctattttaagaatcaaaggtatcgcttcaattatagattgaaaaagcccttaactgaaacataaagtgaggttcagtttgaacagcaacaactctagcttcaattatagattgaaaaagcccttaactgaaacttcttctgtgacgaagttctacctggtgatacttttaagcttcaattatagattgaaaaagcccttaactgaaacatcaatacggtgattctattttaagaatcaaaggtatcgcttcaattatagattgaaaaagcccttaactgaaacataaagtgaggttcagtttgaacagcaacaactctagcttcaattatagattgaaaaagcccttaactgaaacttcttctgtgacgaagttctacctggtgatacttttaagcttcaattatagattgaaaaagcccttaactgaaacaatgattggaagtcaagttatttcaattatgaaggcttcaattatagattgaaaaagcccttaactgaaactcaatctccttcactcattaaagaagattttgttcttgcttcaattatagattgaaaaagcccttaactgaaacgtgtatatctatcttgtgacagttcgttcaattcttcgcttcaattatagattgaaaaagcccttaactgaaactttctctcacttctaacgtaaaaaagagtgtacaggcttcaattatagattgaaaaagcccttaactgaaactgctattctgaaacgacaatataacaatagttatggcttcaattatagattgaaaaagcccttaactgaaacgacatgttgcgcgctcgtgccctgtctcatttcttgcttcaattatagattgaaaaagcccttaactgaaacattgttcccgtaatggataacatgttcttagatagcttcaattatagattgaaaaagcccttaactgaaactactgttggaagacaaaagacatgctgaccatttcttgcttcaattatagattgaaaaagcccttaactgaaactctcagacattattaaaaggctcttaaggtttaggcttcaattatagattgaaaaagcccttaactgaaaccacgttgtgggggatgtctctgttcttatatactttgtttccattacagattgatcaaaatataaacagaaagcttttttgaaaggcattaagcttattactccatataattcttactgagaatttcaattttgtaaagtactaatgtaaaatagaaacatatttgaatttaaactttttttaagtagaaaacatatgactgagaagttacagaaaattttatcccgcgctggaattgcttcacgtagagctcttgagcagatgattgatcagggcagagttaccgtaaatggaaaaatggcaactatcggtgacagatacgaagcagatgacattttagttaaaattgacggtaaggtagtattaacacctgacagtcaaaaagtatcttgcagagtcttaatgtatcataagcctgaaggtgagcttactacattatcagatcctgaaaacagacctacagttttcgaccatattccaaagcctcctactggtcgctggatctacattggccgtcttgatatcaatacctcaggtttactcttatttaccaccgatggtgaattagcaaatgcactgatgcatcctaaatatgaagttgagcgtgtatatgctgcacgtatctatggtgaagtaagtgaagagcaaatcgatcagttaacccaaggcgtaatgctagaagatggtaaagctcgctttaacaaagttacttacgtaggtggtgaaggacgtaacgcctggtaccacgtaaccttaaaagaaggacgtaagagagaggttcgccgtctttgggaagctgtaggacttaaagtttcacgtcttatcagaattaagtacgcaggtatcgatcttgatcctgacttaaagacaggccagtttagagaacttaccttaaatgagttaaatcgtttaagaaaagctgttcatttagagccagttgaagagttggctcctgctttagatttaaatgcctcttcttcaaataaaggaagaaaagctacaaaagctcctgtaagaaagcctgtttcatttaattcttcgaaagaagaaaatgatgataagtcttcaagaagatctccatacggtaagctacaatctcgtcctgcaagaggggataagtcagctttccctaagaaaggtaaatcttttggtgagaacaaaggaagaaagttctcacaggattcttcatttgataaaaatgacagaagaaagtcttttaacaaagatgattcttcaagaaagtttggtcctaagtcaaaaaactctgcaaagcactttgtttcacacacaaatcttcgctctgagaaagaaggtcagtcttttaataaaggctatgctgtaaagagcagaggtagtgccgtatcaaagtcttcttttgtaacgccaagaagaacaaatagaagttcatattaagcttaagagctatcttttaagagataattgtgaaggcggatatttatgaatgagcttttaaattttgagatattttcaaatgaagagcttgtagcaaaggtaaccgccttttcttcacgaggacatgatgtctatgattttagctatgttccttcttggatagaaaaaggctattctctagatccaacattgtatttcacttctgatattcaacatgtccaagttcttcctccttgcttacaagatatatgtccagatcgatggggaaggttaattcaaaaaagaaagttaggttacactccttcttcaactgagtatttgcttggtgtaagcgactattttcgaatgggagctttacgaattaaattcaatggtaaatttgttgatgattctacggatagaccgaagttaacaagtttaaatgagttaatcgaagcttctagacaagtagagcttggtaatacgagtgatcatgatataaagttgctatttgctccaagtggcagtttaggaggggcaagaccaaaaggttgtgtagtagataaaggtcaactttttttagctaagtttccatcaataaacgatcaagatattcagttgtcaaagtgcgagaaagtatatttagatttggcaaaagaagctggtatcaaagcttgttcatctaaagttattgaatcgaagtttggagatgttcttcttttaccaaggtttgaccgaaacacaaataacaccagaattccttttatgtctgcaatgacggctcttggattgtcagaaaatgatgagttggataattacagctatgtagatcttgcaatgtcagatttcatgacgtcaaaagaacaaaagcaagaattattcagaagaatgctctttaatggactttttggaaatacagatgaccatttgagaaatcatggttttttacgtatcaatggagaatggcaattatctccagcctacgacctaacaccgaatacagttccctacaataaacaacaccacgctttatgttttattgaaggtaaagatttaccatcattagctttatttaatgatataaaagattattttgaggttgatgacaagcttttcaaatcaatgttacttgatatgaagaatgctcaagcatcatgtctatctcttcttaagaagaataaagtttcacaggacaacataaaattgcttgaaaacaattttgagcacgaagattttgaaaagctaaaatccattgtttagctgtcatatctatcaatttgaagcaaaagaatgcacctattgcaattgtgctatgctaattcgttgtttcaactgtaatatatagcaaagcattcgatgttacttcacataattaatacatgttgttaacatttgttgcttataattgctatatttacatcgttatacatacttttgattttatttgagaaattaaaacttaaaatgaacgcagacccgactgtctttagtcacacatttctatctgatttctttttcaactcatttttacagctaggagcttactgatatgcaagatcaagctctagctcatccaactttaatatttgatatgctgtgggtattagatcctacagcctggttaggtttgttaaccttaacagctattcaggttgttttaggtattgataacttactattcattgctattctgtcagcaagacttccagcaagacaaggtaagactgctcgctacatcggtttaggtggtgctttaatcatcagaattatcttgatgatcttcgccgcttacgtaatggcaatgtcagagccattgttcactgtcttaaactttgaagtttcagttcgagacttaatgatgttcttaggtggtgctttcttgatatacaaatctacagaagagcttcattcaaagttagaagaccaaagcaatgaagagtctgtttctgtaagcaagtcagcaggccattcatttgttattgtagccacacagattatgatcctagatgtactcttctcaggtgattcaatcatcaccgcagttggtatgaccaatcatgtttacatcatgatcatagctgtaactattgctatggcattattgatgtgggcttcaggctttattgcagtctttgtttcaaagcatcctacagtagttatattgtgtttaggcttcctgttgcttatcggtttcagcctaattatggaatcattccatattgaggttccaaaaggatacctgtattcagctatcggattctctctgttaatcgagatcttcaaccaggcctcaagaaagactgttttgaacttaaagcactctaataacatgcaggcccgtcaggtagcagctcatctggtcttaagactgttaggctcaaaaaatgacgacgatgtgcattcaattaaggaagctattgtttcacgtcctagtgcctatgtctttaacaagcaggaaaaagagatggtatctcgtgttcttgaaatgtcatcactgcctgtaaaggctgtaatgacagcaagaactgatctgcaaacaattaaagttgatggctcaaaagagtacatcttaaacaaggcattatcttgcactaagtcattattgattgcttacagaagcggtcacaaagatcagcctttaggttttgtatctcgtgcagatgttctaggcttgtttgtagaagacaaagtagatgctactcatatggaaaagattgtccaggagcctttatatcttccgcaaacaattaacatcttaagtgccctagatcaatttaggcagtcaaagaaatactttggatttgtctttgatgagttcggtggctttgaaggtattgtcactgtccatgatgtggtcgaagagattacaggtgagatgcctgaaaagagcgaaacacctgagattgtccgctatggcaaagacggtaattcattcagagttgacggtgatgcaattttaccagatgtagcaagagttacaggacttgagcttcctccatcagagcattatcagactattgcaggttacgttttagaccgattgcagagagttccaaagcaaggcgaaactttggaagttggtgactggaagattgaagttttcagcgctgatgcaactgcaattaacgtcttaaaactctataggataaagtaggaaaaaacttgatttttatccatacttttgctataaataaagggcttgaagctgatagcgtttcaagcctgttcaagtgtgagcttgaaccttcagtaataaatgagtttattactgatagatatagtggaacttcataaagaaagggaccctagttagtggtcctttttttgtgtttaaaattaaataattgaggtactaatggcaggaaccattgaagagaaggtagcagagctagtaactcctctagtggagtctatggatcttactgtatggggaatcagattccgtggcggtaatgatcatgcgatgttgcaggtgtttgttgattctgagcaaggtgtaagcgcagataagtgcggagagttaatggatgtattatctcctgctttagatgctgctgatcttatcgctcctaaatatacacttgaggtatcttcacctggtcttgacagaattttgttcacacttgagcaagctaaggcttatacaggtaaaactgtaaaagctgaacttagaattcctactcagggcagacataagcttcaaggtactttagatgaagtaactgatgatggcatgctgaagattaacgataagctctcaggtcttatcgaagttgcattctcaaatgtatctacagcacgtgttgtcccagagtttccaactaacaacaaaaaagctcctaaaagcggatcatagagaggtcttaaattaaaaatgggtaaagagatcattgccatcgcagaggcactatcaaacgagcgtgctattcctagagataagatttttgaagctttagagactgcattagcaactgcaaccaagaaaaagtatccggttgatatcttagttcgtgttgtaattgacaagaaagacggctcatatgacaccttccgccgttgggaagtagttgatactgacggtccactagagaagcctgctcaggaaatatcacttgcagctgccgctgttgaccatcctggtattaaagctggtgatattgttgaagagcagatcccttctgttgagtttgaccgtattacaattcagacagcaaagcaggttctatctcagaaagttaaagatgctgagcgcgagcaggttgtagcagagcagcgtgacagaatcggtcatgttgtaaatgcaaccgttaaaaagcagactcatgacatcatggttttagatttgggcaacaacgctgaagctgttctaaagcgtgagcagatcattcctcatgagacctatggtcgtggtgacagagttaaggttttattacaggatatccgttcagagccaaatcgtggtccacagatcatctgctcaagaacttcacctgatttcttaaaagagttattcagaatcgaagtacctgagattggtgaagacgtaatcgaaatcatgggtgcagctcgtgatcctggttcacgtgcaaagatcgctgtaagatcaaaggacagaagaatcgatccgcgtggcgcatgtat

SEQ ID NO: 118 - DNA, 23066 bp, synthetic construct
  misc_feature 1..23066: note = Synthetic
  source 1..23066: mol_type = other DNA
tcaacttagagggtattgagcctcagccacgtggaatggcacagattgaagttaccttcgatatcgatgctgatggtttaatccacgtatctgctaaggataagaagactggcaaagagcagaagatcactattaagtcatcttcaggtctgtcagacgacgatatcaagcgtatggtacgagaggcagaagagcactcagctgaggataagaagtttgaggagttagcaaacgcacgtaacagagctgatgctaccgctcatcaggttaagaagcagttagctgatcttggtgacaaggtatcagatgctgataagaccaaggttaacaaggcattagctgacttagagttagctgctcgtggtgatgacaaggataagattgagcaggctgaaaaggctgtaatggaagctgcaaccgctttattacaggcaggtcaggcacaggctcaagctcagcaggctcaacaggcttcacagcaacaggcacaacagggtaattcatcaaaggatgacaatgttgttgatgctgagttcgaagaagttaaagacgacaagaaataatcttaaatcataaagattagtttaaaaggtgggtggagtatttcacctgccttttgtcagttataaagaggataaaatggccgaaaaacgtgattactatgaggtgcttggcgtagacaaaggggcagatgatgcaacaatcaagcgtgcgttcaagcgtcttgctataaagtatcaccctgacagaaataaggatcctgatgcaggtgataagttccgtgaaattaacgaagcttatcaggtgttgtctgatcctcaaaagagagctgcttacgatcagtatggttttgctggtgctgatggttcacaggccggtggtggtaatccattcggtggtggtttcagcggcgctgatttcagtgatattttcggtgatgctttctctgatctcttcggtggtcgtggcggttttggttctcgtaaccagggaccacgtgaaattagaggtcgtgatatcagagctaagttaaccttaactttagaagaagctgtaaaaggctgcaagaagaagttaagtgttaagacttatgttaagtgtaaggactgcggaggctcaggcttaggcaagaacggtaagaaagagacttgccctgattgtaagggtagcggtactgttcatgtacgtcagggctttatggctttttctcagacctgttcacgttgtaatggtacaggtactattatcaccaacggttgtaagacctgcggtggcactggccgtgtagttgacttaaagaccttatcagttgatattcctgctggtgttgatactggcgatagaattcgcttaagtggcgaaggtgaggctggtttaaacggtgctggttctggtgatttatatgttgtaatcgaagtaaaagatcatgagatctttactcgtgatggtaatgatttgtactgtgaagtaccaatcagctttacaacagcagcactaggtggcaaggttgaagttcctacattggatggtcctgtaaatattacagtacatcctgagacccagaccggcgtaatgatgcgtctgtcaggcaagggtgttaagtcttataactcaacctttaaaggtaacctgtactgcaagattgtagttgagacacctgtaaacttaactaaagaacagaaagatctgttaaagaagtttgaggaatcattaaacggtgatgacaaagcttctacaacaggggatagtaaaaagaaaactgacaccgcagcgaagcataagccaaagtcagcaggcttcataaaaggtgttaagaagttctttgaggatctatcaagttaataatgtgagttgtacagctaatcataagttttcatattgaactaagttatagattaggttattatcaactcatatgatcatgaggacgcctgatgtaacagttaggcgtcatttttttatattttaaattgaggctattatcatggatcagactccaatgactcctcgtggcgaggatttacttcgcaaagaattacagcgcttaaagacagtagagagacctcgcattgtagctgcaattgccgaggctagaagccatggtgatcttagcgaaaacgcagagtacgatgcagcaaaagaagagcagggcctttgcgaagcaagaattaaagacatcgaaggcaagctagcaagtgctaatgtaatcgatgtatctaagttaaagactcctaacggtggcaagctaaaggttatctttggtgcaactgtaaccgtagttgatgttgatactgacaaagagacaacttacagaatcgtaggtgaagatgaggccgacattcaggctaacttaatttcatacaagactcctatcgctaaaggcttattaggcaagtgcgaagaagacgagattgaaattaagatccctaagggaacaatctgctacgaaattgaaaaggtagagtatatctagagaaaacttagaactctgtatgtaacttaaaatcctagttacataatcctatttaagagaacggaagtggtatttggtgcttccgtttttttttgctgatttgcggaaaagtagactttaaaagtagactttaagtagactttaaagtagactttatttttgaaatatatttaaaatcaaatagatataaaaaaatggaaaatttttaagttcactgaaagaaactttaaatcgaactaaaaaagtacttttgttctgggaaaataaaaaacgccttattaaaaggcgccttttacatttacagtgaacttagaagttcaactaaagactagcgaggaagaatgaatctgctgtcgtcttttctctgtctgaatagaacagcaattctaccaactagagatactaattcagcattaactgtcttagcagcagtttctgcctgctcttttctaccttcaccagcatttaaacggatcttgataagctcgtgatgctcaatgctgctgtctagctctttaagcactgattctgaaagaccgtcattgcctagtaagacaactggctttaatgaatgagcttgtgcctttaaaaactggcgctgatgtgaattcaatgacatacaaaacctataataagaaaaaatatctgttaaaagcttaatctattgtgatttagacttcgcataaatgttgtgcaaattgtataatattatcgagtaattttaaactgaaaaatctatagtaatatttgggatttaaatttaatgccagcaaagaaaagaactgccagccaaactagatggttacaggaacacttttccgatccttatgtgaagcaggcccacaagttaggactgcgttcacgcgcttcatttaagctagaagagttgcagaaaaaagatcacctgatccgtcagggtaatatcgtagttgatcttggtgccgctcctggcggttggtctgagtatgccgtaaagtgcatcggagatagcggacgagttatcgcctgtgacattctgccaataagacctattcgtaacgtacagtttttgcagggtgacttcagagaagatgaggtcttcaaaaaactgtattcaatgatcggtgtcggtgctcatgtagtactctctgacatggctcctaatatgtcaggtaacctagctatcgatcagccaagagccatgctgttatcagaattagccttagatatggcaagacgtgtactgcgtattggtggtagttttgctgtaaaagttttccagggtgtaggttctcaagagtttttaaaagaattacatcaggactttaccactgttaaagtaagaaaacctgatgcttcaagagaccgttctcgtgaagtttatatggtagcaatgggctttaaaggtcatcctttaaatggtgttgcaccaggtgctgaatttgaagagtctgaagataagactttggagtaagtgagtaaatatgacaaaaaacctaatattatggctagtcattgctgtgattttaatgactctctttgagtcatttaactcatcagacaattcaggtcgtatggaagactacactagcttcgtaagagaagtgcagtcagatcagatacaggaagttgtatttgatggcaaggttatcaatggtgttaaaaagaacggtgaaagattcttaactgttatgccattgagcgatcctgcaattatcgactctcttttatcacacaatgtaagagcatctggtactaagcctgaagagcagagcttattgctctcaatctttgtgtcatggttcccaatgttgcttttaattggtgtgtggatctttttctcacgtcaaatgcagggaggttctaaaggcaatcctctgtcatttggtaagtcaaaagctaaactactctctgagaatcagattaaaacaacctttgatgatgtagcaggttgtgatgaggcaaaagaggacgtagttgaattagtagacttcttaaaagatccaaccaagtactctaagttaggaggccgcattccacgtggtgtgttaatggtaggtcctccaggtaccggtaaaactttattagcaagagcaattgcaggtgaagctaaagtgcctttcttctcaatttcaggttctgatttcgtggagatgttcgtaggtgttggtgcttctcgtgtaagagacatgttcgctcaggctaagaagaatgctccatgtattatcttcatcgacgaaattgatgcagtaggtcgcaagcgtggcgtaggcatgggcggtggtcatgacgaaagagagcagaccttaaaccagttactagttgagatggatggttttgaaggctttgaagctgtaattatcatcgctgcaactaacagacctgatgttcttgatcctgcactgttacgtccaggtcgttttgacagacaggttgtggtaggtttacctgatgtacgtggtcgtgagcagatcttaaatgttcatgtaaagaaagtacctttaggtaaagatgttgatactgcaactatcgcaagaggtactccaggcttctctggtgccgaattagcaaacttggtaaacgaagctgccttaaacgcagcacgtcataacaagcgtgtagtaagcatgaatgagtttgaagaagctaaagataaactcttaatgggtgctgagcgcagaagcatggctatgaatgagcatgaaaagatcaacactgcttatcatgaggcaggtcatgctatcgtaggtaaattggttccagagcacgatcctgtatacaaggtatctattatccctcgtggcagagctttaggtgtaaccatgtatctgcctgaacaggataaggtatctcaaagccgtatcggtctgttatcaaacatttctactctgttcgctggccgtatcgccgaagagttaatgtttggtactgatgctgtaactacaggtgcttcaaatgatattgaaagagcgactcagattgctcgtagcatggtaacccgttggggcttctcaaagagattggctcctatgcagtatgaaaaagacaatgaaggttctgcatacttaggtggttcatctactactatgatttcaatgtcagatgaaactgctaagatcatcgatgaggaagtaacagaaatcatcaactcatgctacaagaaagctcaggacttacttgaagctaataaggacattcttgagaatatgaaggatgctctattaaagtatgagaccattgatgctgatcagattgacgatttgatgaatcgtaaagaagttcgcccacctcgtaaggtaggagatgctaaatcttcagatcagaaatcagatgataactcaaaagatgagaaatcaaatgatgtaaagactgaggataagtcaactgacaatcagtctgaaaaagctaagactgagaactctgacaatgcatcagagacaaaaaaagacgataatgacaataattcagagcagtaattagacaggacaacttgtcaaaattaccatcgtctcatgaaggatctcttgacaggagatcctttgcttttaatgtaggttaaatgggcaagctgatttatatcagttttgtacaagtttagtgtgggatattcgatgaaattaagactgccaaatagtaaaagccttgatttgtcttttacaaaagtaatgggaaccattgctttagaagagaatgatacccgttcaattgaagatcttgttcttctggccaacagctacgtaaaagcaggagccgagcttctggaaattggtgctagagcaggttcagatggcatcaatgaaaccagagtgatgtctgttctttgtgctgtaatgaacagtgttgatgttcctgtggccttaaactcaaacaactatgaggttgtttcacaggctgttaaggccggtgtctccatggttattaccaccaacggtcttgcaactgagggcatgattgaccttataaaacgctctaatgttgcagtatgccttcactttgatccaaaagaaaaaattgaagatgacagcgatgtggtaagtatcatttctgaatactactttgaaagaatcgatactcttttaaatgcaggtattgaaagaaagagattactcattgacccatcagttgtaaatgcttctgtaagtaacagattaagactgttaggaagacttgagagctttaagagttttgctctgcctatctgtattgctctgcctcgttctttaccaaaagaagacagattcatgaaagataatagagtgcttaccttaactacagctttattctgttcatctgtaagtccagttcaaatcatcagaacagcagatgtaggtgaagttgcaattgcaattggtttttggcagattatggcaagtaagactaagccatttaagttatcaaagactatcgtaagacgtctaagacttctacgtgatgcaattcatgacttaagaaagaacaaagaaaagaattaaaatccaacatctttaaaagtctaatcttttaaaggtaaataacttttagaaaaaaagaaaacaaagatgaaaagaaaatattttggtacagacggtgtacgtggccgtgtaggtcaatatcctattactcctgattttgcagtaagactaggtttagctgcaggcaaagttttaggtaagaaacatggcggtaaagttatcattggtaaagatactcgtctgtcaggttatatgctagaagctgccttagagtcaggcttttcagcaggtggtatgtctcctgtaatgttaggccctatgccaactcctgctgtagcttatttaactcgagcattcagagcagacctaggcgttgtaatcagtgcttcacataacccatactatgacaatggtattaagttcttctcagctcatggtaccaagttacctgatgaggttgaacttgagattgagtctgtattagatgctaaggatattcctttagcagcttcatcagactttggtcgtgccttcagacaggatgatgctccaggtcgttacattgagtactgcaagagtacctttgcaagccacttctcattagagggcatgaagattgttttagattgtgctaacggcgctacctatcacatcgctccactggttttcagagagttaggagcaactgttatcaccatcggtgataagcctaatggcattaatatcaatgatggtgtaggttctactcatccagaggctttagttgctaaagtcctttcagaaaaagctgatcttggtattgcttttgatggtgacggtgaccgcgttttaatgtgcgacagtcacggtaacttacgtgacggtgacaaccttctgtatatcattgctaacgacactaaaaagcgtggacgtctgccaggtggtgtagtaggtactttaatgacaaacttaggtcttgagttagctttaaaacgtgaaggtattcctttctctcgtgctaaggttggtgacagatacgttatggagcagttgttagagaagaactggactctaggcggagagaacagcggtcacatcatcagcttaaaccatgcaaccacaggtgatggtatcgtatcagcactacaggtcctaaaggcttgtatgtatgcaggcaagacagttgaagagttatctgaaggtctgaccatgtacccacaggatcttatcaacgtaagattaacagcaggtcttgatgtaactcgtgacgagaaagttcagactgttgtagctgaagttgaaaaagagttaggctcaactggtcgtgtgcttttacgcaaatcaggaaccgagcctgtggttcgtgtaatggttgaaggtgagaatgcacaggacgttcatactaaagctcaaagaattgctgatgtgatcatccatcaggcaggctgtgaaaatgcttgaaaaaaagcataataacctgtaatatttgcacagctttgtatacgcaaaataggatgcgtttttattatgtacgaaattggtattgtagttttattactaattgcaattgcaatgattgctttgatccttgttcagcagggtaaaggtgctggcatgggcgcttcatttggtgctggtgcatcaaatacagtattcggttcagtaggatctggtaacttcctaactagatcaacttggactttaattattctgttcttcggtgtttgcttattcttaggttacttacagaagtcagctcacgaagagaagtcaagtttcagcaatatttctgagactcctgcaccagagcaggttgaagagaagactgttgttaacactgatgctcctgtagttgatacagatgcacctgcagtttcagacacaacagatgctcctaagactgacgctccagagactaagtaataaaagtttctactaaaaaaggcccaccgtacggtgggttttttattggcgattttagataaattgattagaagacgtagtgcttggtaggagttatgacttcatgcaaaggcatatcccaatgctcaataggtacagcatctaaaagttggaagtcataagctacacctattaaaagacattgagcagagagcttctttaacattctgtcgtaatagcctccacccatacctaatctgttgcctttattatcaaatccaactaatggcacaatcaaagcttcaaatttatcaggagttaccagattctctggtaaattctcaggctctagaatgtggaagcggttttcaattaacctgtcacctttcttataggaataaaagtccatatgaccttttacgtgaacatccataaaaggtagagctaattcatgatgttctaaaaggtagtcattgataggctctgttgataactcaccgcctaagcttaaatatgatcccaccattttcttttgcaaaaagtgtttgtggtgacttaagatttttacaatctcaacgccagcctcataggctttaataggtgttacctgtcttctctgttctaagatctgctgacgcagcgacttgcgtaaaactttgttatcaaaaaaatcagtcattgttagctctttgaagagaagtcttcatcttggtgattagttttaatgcttcattttcaaatggagttttgtcgtttagatacccctgtaaggtactttctgagtcaagcgcgattaagatagcagcttgtgtaggagttaaattaggattatctcgcatcatagaggatgctttagtttgtaatgaagctattgctttttgaagattttctttttgctcttttgcgcatcttaagttaaagctctcaccaaagagtgcacattggacaaagtcctgagtgttctgttctgacataaaaattccttcttttactcatattgtaaagttatttttcaaattgtccaaaagagtaaaggtgcatattgaaataaacttaattgtacgtttgtcagatagtgaaaaattattttgaattaaaaacaatacatataatacatataaaaaagttattaaaatgtgaggctgttactgtttaacatgttgattaagtggtacattcaaagaaaattattatccatcctcaaacagagtttattatgaataaaaagacagtatattcaaatattgctattgatttaggtggcaagtatacaggctgtgtatcctatacatcttcaattttaccatcagctgatgacatcaatgcttttattattgagatgcctgatgatggtaatggtattaaatatacagtaaaagatagaactcaaaaaagacatgtggttcgatctttggatagattcaaaaaagcaagaaagctaatttatcttgtgataagttcaatcattcgtagagaactgactgctgatgaaaatgaggcaatttcttcattaatgaagagaagaggatatacaagactagaggcagaaattgaccttgatattttaaaagactgccctatagatttatttgcttcatatatgaaggatttgttcgatgaatcgcaatctttatatgaacagtttaatcagaagtgctgtgatttagattcagctaaagctatgaagaaagctctttcttcagaagaattaaaacaggccatggactcttctgaactagataaaatcgaaaaaaaaatatacaagtcagcttttaacactatggttgaagctgctgacaatatcatcaatacctgtgaatttggtaataaacaccgtaaacaatacttatcagacattaaggtagacataaataaggattctagattaactgatattgtcaaagcttttgccagcagtgaaaaactttacagatgtattggtaatatttcgaatctgcaattgagagcattgcgttggtattttaatgatatcgacatgaaaggagagccaaaatggatttctgaaagattcaaaaaagtgtgggcaagagcctataaatactttcattatcctaaagaagatcaaacaaaagccagagagctaattaaaaaaatcgaaagttcagaggatgctatctcattactaagctcaattgatcctctaaaaacaattcctccatatgaagatcagaacaatagaaatcctcctacagatttaacgttactcctgtctccaaaagcattagatgacaagtatgctgatttatgggatgcatgggctgagaagtttgctaacttatatccaaacctaacttatcagcttaaagatatagttaaagctacagacagaaaatcaagaattgaacagaagaactcaagttcatatacgcaaagtaaaatatttaattcatatgtaatacagcgattgcttgatttatccacaaatgaagacgaaccgattacattattgagaaaatgggtaagggatccatcaaatccaaatttggcaagaactgtcaagataattcagtcagttgttgaagatcatgaggatgatttctataaactggctcagtcatattataacgaagttgaaaaggctaaatctggtctatggtcagtagttgaagatcctcttcttgaaatttcaggaatacatccgcctatgaagaataaagtgatatcaacactggtaggaaatgtgcttggaattaataacgattttgattatgagaaatttcttgaagtgtggaaatctccaattaagggaagaaaaactctaaagtcaatttgtagagatatagaggaactaagaaaagattacggcaatacctttaaagttgaatatgattatgcgatttattcagctaaagataagaaaaagactttaacatcagatcagaagaaactagtcgaaatctataaaacgatagaagagatttctcctttattgtggagcaatatttctcaagatccgttgtctgaaattaaatttaacaatccatttagtttatctcaactgtatactctaattgaaacagatacattgggcttttcaagcaattgtgttgcagtaaataaagaaaacaatgcaagaatgcaatttttgtcaggaaattgtgcattgtgttcccgtcttccaactgaatcagtaagaccttttgatggtgcggtaggtaagatattagaaagacaagcttatgaaattgctaaagcaaagagctctgagataaaagagctagatggtcttaatgatgctgtgataaatgttggtattttgatagagcagaataagtttgagtattctgcatcattagcaacaattaaaaattcaaagtataagaaaaaaattcaaaaaagagcaaaaagtggagttagtcgtcaattagagcagtggaaatcaaaagaacaaagaattaaagacgcttcaagagacctttgtccatatacaggagaaccaatatctgagttatcaaacggagaaattgaccatatcattccaagaagctttaccaaagctagcatgggtacgatttttaactccgaagcaaatctgattttttgcagtaaagatggaaatcagactaagaaagaaaatgtgtatacattaagagatctttcaccaaattaccttaatgaaatattcggtttatctgatattttgaagattcagcaggaaatagaatgcactgtagcaaatgtaaatgaaaaaaatccaagattcttatttgatatgatgactccgaaagagcaagtctgttgcagacacgctttgtttatgcctcaaagtaaagcatatcgattagtagtatcgtcattagcaagatcatatagtacaagagtgaatggtactcagtcatattttgtaaaagtaattatttcaagattaagaaatgagttatcttcgtggttaaaatctaacaggaatactttaaatttctttgcttataaagtagatccttcggatgttcattctacaagagatgacttgagcaaattaaatgctctattgaaaaaacaaaaaaatcagccaataacatcacatgctatagatgccttgtgtgtcctatcagcagcaagtactgttgaatatatttccgaaaatatatctgaaaatggaaaaatatcttttctatctaacatagaaaacctaaagaaagttgtcccaaatcaatatagagttatgcgtatagaaaaaaatcattgtttaataaagatgttcctgaatcaagtaaactctttaaagataagatatatgcagagcatttccttactgttatgaccttaaatgataaattgaaggtagggtttgattggaattcaagcggagaaggaaatgcagttgaaattataaaatgtcagaaggatgtactagagctattatcaccgttctttacagaaaaggtaagctatgatgactttttccatgcatataggattgataagataaaagcatttagtttcatgcacaagtttttagctcatgagatcgaggataatcagctctctaaaagacaatatgagctgttaaattcattgcactatacaactttgaacactgatgtaagctcaattatctactcagaaactgataaagagtttaaaacagctgatgagatcatgaatgaaaaaaattttgcaatcaaaattaaattcccttcatggttgaagtcagatggaagaaagtcattagttttaccttcaaaaaatgaatgggaaggtattgtttctacttttaaggatctgttaggtaagcaagttaaagatggaaatgaaaagaatattataaacgaacgtctaaatcttagaagaaaaaatacctcagcattgaaacacaaaggaacaaaaaggggattcagtttaccaataattgacggtccatcaggtggaattagaataagacgcaactcattcaataatcaagatatttatcaaatggtcactgctggttccgcaaaaagcaagggcttttcagttaaaaatggaaaggtatcatgggatgactttgtaatgattgatacttatattagtaataatttaacccctgctgatttgtctggaagttatagtaatagttttatcccaatggatgaagaaagattagtctttaaggatgattctctgtcaatctttatgtctccatcaactgaggataggcgaatgattagaattattcagtcttttgatgattttaatttttgtttaggaaataaatttaaatcaccttttgatattccatctgtcataactcttaaaagtaataaagattgtcatgatcttgacaatttcttatcaaaaattaacaaggattttattggaaagcctagatatggaaatctcaaattactgtcaataggcaataaagtttgctactggtatcaagttgtatcaagtaataagaaaatgcaggaaatatttaataacgctttgaaatagctatgagatatcttactgtaagcgaatatggtacatttttaggcctttcaggagaacggcttattgttaaacaggatggaaaacagataaaggagatccccttatcaagattaagaacgatatgtgttcttaaaaggggagtttctgtttctggtgacttaattttgtcatgctctctaagaggaataagaattctctttttggattggaaaggtcaggctgtatcagctgtcttaggtcagaatcagcatgcggtagtctctttgagaaaatctcagtttgactttattaaagatgaaaaactttgctgtgatgtatctaagaagattattctttctaaggttagaaatcagcgtgcagttgtactttatttctctaagtaccagttgaaaaataatgaagagttaacaacagttgttggcaaatttgtaacatcagttaatcagatcataactcagctcaaaaacattcaaggtccacaatggaaaaataccttatttggcttggagggaaaagctgctgtattgtattggaatctcctcagttctctgtccttgcttccacacgattttgaatgtagagaaggtcgaggggcaaatagcatcactaataaagctcttaattatggctatgcaattttggcaagttttttattatcagccgttgataacgctgggtttgaaatgtacgccggatttttccacgtagacagaccaggaaagccatcacttgtcttagacctgatggaagagtacagagcctgggttgttgatagagttgttataaaactaaggtctagacttgaaagtgcaaaagaatttgattcttcaattaaaaaagcgataagtgatgaaatatacaaaaccatggctacaaggtactcctataacaagaagaaagtaaaacttgaaaatatcatacaaaggcaagtatacagattatctggagttataagtgaaaagggaaattataaaggctattcctttaaatggtagaaaaagatgaatatttaccaaaagtacctcgtctgttatgacattgagaatgataaaactagaaagaagttctttgataaaatgaaggatcttggggtgatatctattcagaaatcagtgttttatggagatttaaatcaagccgagttctctgctatgaagaaagttgttctaaaaatgcttgatcctgaatctgacaagtgcttttggaccaaatgtacattgtctgataaagagcttggtagttgctttggttataaaaattttaaatatatagagccagacggatatgaatcaatttaacttaccggtttcaatgttaagacaatactgtttttgcccaagaatcccttatttctatattgcgcgaaatataacgcctgtagaaaaagagtggatgtctcaaggcattgaagaacacaagcgccaagagatgttatctaaaagaaggaatctctctaggtttggaatttcaacgattggaaaaatttcttttaatgtggaactgtatagtgaccaattatctcttcatggcatatgtgatgcaattttgtctgctgattcagaattaagcatcattgaatttaaaaactcagattatgacaagttcactataggaactgcagtgcaactatgtgcatatgcaatgctatgtgaagagaagtacggtgaaataataaaacaatgttttgttctttacggaagcaaagggaaaaccagaaaagtgaacatcgatgcatctattagatccaaaactttggaaataagagatcacattattaaaaacctcaaaaaggcagacattccaccttctagcgcagaagaaaataaatgcggacaatgcgaattcttcaacttctgtgctgacaggttttaaaaatacatccagatgcttacgcagttgctggacttaatcttgatttttgatgatttcagctcgccataaagacgacttcaagaactttttcaatctatgattttattgtaaagtatttttttcgaaaaatatatttgtttcagtgcaaaaaataatatttcgaaacttacatcacattttatatgtgcaacatcttctttttaaagaattttatgttgcaggcttcaattatagattgaaaaagtccttaactgaaacttaaagttagtccaatggtcccagagcaagcgattagggcttcaattatagattgaaaaagtccttaactgaaaccacataccttacttgttatatatgtgcggatcgaggcttcaattatagattgaaaaagtccttaactgaaacctcaaaggcgcattcttatgagaggtgtcgatccgcgggcttcaattatagattgaaaaagtccttaactgaaacctctaacgctgacaagattgcaccttctgaaaagcaagcttcaattatagattgaaaaagtccttaactgaaacttttttattctcactccttctttctcctgtctaaggcttcaattatagattgaaaaagtccttaactgaaacacattttagcatgatcaagtctgcactcaatacagcttcaattatagattgaaaaagtccttaactgaaactaaatcaccgtctttaattaaagaagattttgttttgcttcaattatagattgaaaaagtccttaactgaaacttactgttcctttagccggtgagattagtgctaagcttcaattatagattgaaaaagtccttaactgaaacttgtacaggattgtgttgacaaaggtattatcagcttcaattatagattgaaaaagtccttaactgaaacctgtttgctcttttgtaaactctacgttttgatgcttcaattatagattgaaaaagtccttaactgaaactgaatataagatctgctttggtgctggtgaggctgaagcttcaattatagattgaaaaagtccttaactgaaacaactgaacctgtacagctctgatcttggccttgttcggcttcaattatagattgaaaaagtccttaactgaaacgttggagcacttacgctaggtgttacagttactttgagcttcaattatagattgaaaaagtccttaactgaaacttaacattgtcgttttcatcttctgagatttcctgcttcaattatagattgaaaaagtccttaaatgaaacgattttactaggtcgattttatcaacattgataggcttcaattatagattgaaaaagtccttaactgaaactgttcgacagttacggaattttgcaaattttcgtgcttcaattatagattgaaaaagtccttaactgaaactgtcctccaactaataccatcatcgaatcgtacttgagcttcaattatagattgaaaaagtccttaactgaaactaattcaactcaggatcaacctgataagaaaggacttgcttcaattatagattgaaaaagtccttaactgaaaccattttcattgtctcctcgtagtcaacaaaaactacttcagcttcaattatagattgaaaaagtccttaactgaaacaacgtgacaaattattcttatttgagcaataccagcttcaattatagattgaaaaagtccttaactgaaacagattatgacaatgtaagttacatctgtgccgaccataggcttcaattatagattgaaaaagcccttaactgaaaccacgttgttggggatgtctctgttcttatatactttgtttccattacagattgatcaaaatataaacagaaagcttttttgaaaggcattaagcttattactccatataattcttactgagaatttcaattttgtaaagtactaatgtaaaatagaaacatatttgaatttaaacttttttaagtagaaaacatatgactgagaagttacagaaaattttatcccgcgctggaattgcttcacgtagagctcttgagcagatgattgatcagggcagagttaccgtaaatggcaaaatggctaccatcggtgacagatacgaagcagatgacattttagttaaaattgacggtaaggtagtattaacacctgacagtcaaaaagtatcttgcagagtcttaatgtatcataagcctgaaggtgaacttactacattatctgatcctgaaaacagaccaacagtattcgaccatattccaaagcctcctaccggtcgctggatctacattggccgtcttgatatcaatacctcaggtttactcttatttaccaccgatggtgaattagcaaatgcactgatgcatcctaaatatgaagttgagcgtgtatatgctgcacgtatctatggtgaagtaagtgaagagcaaatagatcagttaacacaaggcgtaatgttagaagatggtaaagctcgctttaataaagttacttacgtaggtggtgaaggacgtaacgcctggtaccacgtaaccttaaaagaaggacgtaagagagaggtccgccgtctttgggaagcagtaggacttaaagtttcacgtcttatcagaattaagtacgcaggtatcgatcttgatcctgacttaaagacaggacagttcagagaacttaccttaaatgagttaaatcgtttaagaaaagctgttcatttagagcctgttgaagagttggctcctgcattagacttaaatgcctcatcttcaaataaaggaataaaagctacaaaagctcctgtaagaaagcctgtttcatttaattcttcaaaagaagaaaatgatgataagtcttcaagaagatctccttacggaaagcctcaagctcgttcagcaagaggcgagaaatcatctttccctaagaaaggtaaaacttttggagatagcaaagaccacaagttttcaaaagaatcttcttttgataagaatgacagaagaaagacttttactaaagatgattcttcaaagaagtttggtcctaagtcaaacaactctgcaaagcactttgtttcacacacaaatcttcgctctgagaaagaaggtcagtcttttaataaaggctatgctgtaaagagcagaggcagtgctgtatcaaagtcttcttttgcaagacctagaagaacaaatagaggttcttactaagcttaagagctttattttaagagataatcgtgaaggcggatatttatgaatgagcttttaaattttgagatattttcaaatgaagagcttgtagcaaaggtaaccgccttttcttcacgaggacatgatgtctatgattttagctatgttccttcttggatagaaaaaggctattctctagatccaacattgtatttcacttctgatattcaacatgtccaagttcttcctccttgcttacaagatatatgtccagatcgatggggaaggttaattcaaaaaagaaagttaggttacactccttcttcaactgagtatttgcttggtgtaagcgattattttcgaatgggcgctttacgaatcaaagtcaatggtaattttgttgatgattctacggatagaccaaagttaacaagtttaaatgagttaatcgaagcttctagacaagtagagcttggtaatacgagtgatcatgatataaagttgctatttgctccaagtggcagtttaggaggggcaagaccaaaaggttgtgtagtagataaaggtcaactttttttagctaagtttccatcaataaacgatcaagatattcagttgtcaaagtgcgagaaagtatatttagatttggcaaaagaagctggtatcaaagcttgttcatctaaagttattgaatcgaagtttggagatgttcttcttttaccaaggtttgacagaaacacaaataacaccagaattccttttatgtctgcaatgacggctcttggattgtcagaaaatgatgagttggataattacagctatgtagatcttgcaatgtcagatttcatgacatccaaggaacaaaagcaagaattattcagaagaatgctctttaatggacttttgggaaatacagatgaccatttgagaaatcatggttttttacgtatcaatggagaatggcaattatctccagcctacgacctaacaccgaatacagttccctacaataaacaacaccacgcattatgttttattgaaggtaaagatttaccatcattagctttatttaatgatataaaagattattttgaggttgatgacaagcttttcaaatcaatgttacttgatatgaagaatgctcaagcatcatgtctatctcttcttaagaagaataaagtttcacaggacaacataaaattgcttgaaaacaattttgagcacgaagattttgaaaagctaaaatccattgtttagctgtcatatctatcaatttgaagcaaaagaatgcacctattgcaattgtgctatgctaattcgttgtttcaactgtaatatatagcaaagcattcgatgttacttcacataattaatacatgttgttaacatttgttgcttataattgctatatttacatcgttatacatacttttgattttatttgagaaattaaaacttaaaatgaacgcagacccgactgtctttagtcacacatttctatctgatttctttttcaactcatttttacagcaaggagcttactgatatgcaagatcaagctctagctcatccaactttaatatttgatatgctgtgggtattagatcctacagcctggttaggtttgttaaccttaacagctattcaggttgttttaggtattgataacttactattcattgctattctgtcagcaagacttccagcaagacaaggtaagactgctcgctatatcggtttaggtggtgctttaatcatcagaattatcttgatgatcttcgccgcttacgtaatggcaatgtcagagccattgttcactgtcttaaactttgaagtttcagttcgagacttaatgatgttcttaggtggtgctttcttgatatacaaatctacagaagagcttcattcaaagttagaagaccaaagcaatgaagagtctgtttctgtaagcaagtctgcaggccattcatttgttattgtagccacacagattatgatcctagatgtactcttctcaggtgattcaatcatcaccgcagttggtatgaccaatcatgtttacatcatgatcatagctgtaactattgctatggcattattgatgtgggcttcaggctttattgcagtctttgtttcaaagcatcctacagtagttatattgtgtttaggcttcctgttgcttatcggtttcagcctgattatggaatcattccatattgaagtaccaaagggatacttatactcagcaattggcttctcattgttaatcgagatcttcaaccaggcctcaagaaagactgttttgaacttaaagcactctaataacatgcaggcccgtcaggtagcagctcatctggtcttaagactgttaggctcaaaaaatgacgacgatgtgcattcaattaaggaagctattgtttcacgtcctagtgcctatgtctttaacaagcaggaaaaagagatggtatctcgtgttcttgaaatgtcatcactgcctgtaaaggctgtaatgacagcaagaactgatctgcaaacaattaaagttgatggctcaaaagagtacatcttaaacaaggcattatcttgcactaagtcattattgattgcttacagaagcggtcacaaagatcagcctttaggttttgtttcaagagcagatgttttaggcctttttgtcgaagacaaggttgatgttgcccacatggaaaagattgtccaggagcctttatatcttccgcaaacaattaacatcttaagtgccctagatcaatttaggcagtcaaagaaatactttggatttgtctttgatgagttcggaggttttgaaggtattgttactgttcatgatgtggttgaagagatcacaggtgagatgcctgaaaagagtgaaactccagagattgtacgtttgggtaaagatggtaagtcatttagagtagatggtgatgctatcttacctgatgttgcaagaataactggtttagacttacctccatcagagcattatcagactattgcaggttacgttttagacagattgcagagagttccaaagcaaggcgaaactttagatgttggtgactggaagattgaagttttcagcgctgatgcaactgcaattaacgtcttaaaactctataggataaagtaggaaaaaacttgatttttatccttacttttgctataaataaagggcttgaagctgatagcgtttcaagcctgttcaagtgtgagcttgaaccttcagtaataaacgagtttattactgatagatatagtggaacttcataaagaaagggaccctagttgaggtcctttttttgtgtttaaaattaaataaattgaggtactaatggcaggaaccattgaagagaaagtagcagagctagtaactcctctggtggagtctatggatcttactgtatggggtatcagattccgtggcggtaatgatcatgcgatgttgcaggtgtttgttgattctgagcaaggtgtaagcgcagataagtgtggcgagttaatggatgtattatctcctgctttagatgcagctgaccttatcgctcctaaatatacacttgaggtatcttcacctggtcttgacagaattttgttcacacttgagcaagctaaggcttatacaggtaaaactgtaaaagctgaacttagaattcctactcagggcagacataagcttcaaggtactttagatgaagtaactgatgatggcatgctgaagattaacgataagatctcaggtcttatcgaagttgcattctcaaatgtatctac

SEQ ID NO: 119 - DNA, 22571 bp, synthetic construct
  misc_feature 1..22571: note = Synthetic
  source 1..22571: mol_type = other DNA
aggtgaggctggtttaaacggtgctggttctggtgatttatatgttgtaatcgaagtaaaagatcatgagatctttactcgtgatggtaatgatttgtactgtgaagtaccaatcagctttacaacagcagcactaggtggcaaggttgaagttcctacattagatggtcctgtaaatattacagtacatcctgagacacagaccggcgtaatgatgcgtctgtcaggcaagggagttaagtcttataactcaacctttaaaggtaacctgtactgcaagattgtagttgagacacctgtaaacttaactaaagaacagaaagatctgttaaagaagtttgaggaatcattaaacggtgatgacaaagcttctacaacaggggatagtaaaaagaaaactgacaccgcagcgaagcataagccaaagtcagcaggcttcataaaaggtgttaagaagttctttgaggatctatcaagttaataatgtgagttgtacagctaatcataagttttcatattgaactaagttatagattaggttattatcaactcatatgatcatgaggacgcctgatgtaacagttaggcgtcatttttttatattttaaattgaggctattatcatggatcagactccaatgactcctcgtggcgaggatttacttcgcaaagaattacagcgcttaaagacagtagagagacctcgcattgtagctgcaattgccgaggctagaagccatggtgatcttagcgaaaacgcagagtacgatgcagcaaaagaagagcagggcctttgcgaagcaagaattaaagacatcgaaggcaagctagcaagtgctaacgttatcgatgtatctaagttaaagactcctaacggtggcaagctaaaggttatctttggtgcaacagtaactgttgttgatgttgatactgacaaagagacaacttacagaatcgtaggtgaagatgaggccgacattcaggctaacttaatttcatacaagactcctatcgctaaaggcttattaggcaagtgcgaagaagacgagattgaaattaagatccctaagggaacaatctgctacgaaattgaaaaggttgagtatatctaagagataacttagaactcatatgtaactggaaaatcttggttgcataatccaatttaacaaaacggaagtacctaaaagtgcctccgttttttttgatcttaagataattgtagactttaaaagtagactttaagtagactttaaagtagactttatctagaggtaatgattatgaatttaggacatgaaaacgaaactcttgagttcaaagagagtttaggtcagcttgacaaaggtctaaagtctataactgcaatgctaaacagatctagctatggttgtgtttgctttggtgtattagacaatggagatgttaaagggttaaccgttggtcctaataccttaatggatattagaaataagattaagtttcttatcagtcctcaggctctggttcatatagaaaaagtgacagttggaaagcttgattacatcaaggtaaccgctcatggctcagatattccttacagttgcgatggtcgttactacattagaaatgtggctgcagatgagactgtatctaatgaaatattacgcaaaatgttaactacatcagagactgacatcataagacgcataccttctgaagatcaagagcttacttttaaccaatttgatagttttatgtctaagtatggcattcatacagaatcctctatttctttccataaaaattacggtttaaaaaatgatgaaggtaagttcaatctaatggcttatctgttgtctgatcaaaacaatgtaagcattaaagttgttaaatttgaaggtaccgataaaagcacaatgtcagagagaacagattttggatctcaatgtcttttaagatctgttcaagaagttcttgagtatgtaaaagtaaacaatgcagtaaaagtagatctttctggcggcataaggaaagaaactccactactagattatgaagcttttagagaggcttggataaatgcttgcttgcataactcttggtcggagatgttgcctccatctgtatttgtgtatgacgacagaatggagatcgtgtcttatggaggtcttccatttggtttgtctaaagaaggattctttaaaggaacaagtttacctgtaaatagaggattgctaacaatctttattgcgacaggttttgctgagcaaagtggtcatggtgttccaattatcgtatctaaatatagtgaagaagctttttcttttgaaaacggtatgataaaagttacattgaattttaactatgaacctgctgaagtagttcgtagaattgaaatagaaaagactgaagataatctcactgttaaacaaagagaagttctagagttaataaaagaaaatgtaaagattacccaaaaagaactgtctgaaaaagcaaatttaagtttagctggagttaagaagatcatgcttaaattgcagaatatgaacttaatagaaagagtaggtgctaagaaaaatggttattggactgtaaatagtagactttaaaagtagactttaagtaaactttaaagtagactttaattaagaaatgtctttaaaatctaaagagtataaaatcttaataaatttaaagtctattaaaaggtactataaatttgaatactaagttacagttgtaggcagtagaaataaaaaacgccttattaaaaggcgccttttacaatttgagtgaacctagaagttcaacttaaaactagcgaggaagaatgaatctgctgtcgtcttttctctgtctgaatagaacagcaattctaccaactagagatactaattcagcattaactgtcttagcagcagtttctgcctgctcatttctaccttcaccagcatttaaacggatcttgataagctcgtgatgctcaatgctgctgtctagctctttaagcactgattctgaaagaccgtcattgcctagtaagacaactggctttaatgaatgagcttgtgcctttaaaaactggcgctgatgtgaattcaatgacatacaaaacctataataagaaaaaatatctgttaaaagcttaatctattgtgatttagacttcgcataaatgttgtgcaaattgtataatattatcgagtaattttaaactgaaaaatctatagtaatatttgggatttaaatttaatgccagcaaagaaaagaactgccagccaaactagatggttacaggaacacttttccgatccttatgtgaagcaggcccacaagttaggactgcgttcacgcgcttcatttaagctagaagagttgcagaaaaaagatcacctgatccgtcagggtaatatcgtagttgatcttggtgccgctcctggcggttggtctgagtatgccgtaaagtgcatcggagatagcggtcgagttatcgcctgtgacattctgccaataagacctattcgtaacgtacagtttttgcagggagacttcagagaagatgaggtcttcaaaaaactgtattcaatgatcggtgtcggtgctcatgtagtactctctgacatggctcctaatatgtcaggtaacctagctatcgatcagccaagagccatgctgttatcagaattagccttagatatggcaagacgtgtactgcgtattggtggtagttttgctgtaaaagttttccagggtgtaggttctcaagagtttttaaaagaattacatcaggactttaccactgttaaagtaagaaaacctgatgcttcaagagaccgttctcgtgaagtttatatggtagcaatgggctttaaaggtcatcctttaaatggtgttgcaccaggtgctgaatttgaatagtctgaagataagactttggagtaagtgagtaaatatgacaaaaaacctaatattatggctagtcattgctgtgattttaatgactctctttgagtcatttaactcatcagacaattcaggtcgtatggaagactacactagcttcgtaagagaagtgcagtcagatcagatacaggaagttgtatttgatggcaaggttatcaatggtgttaaaaagaacggtgaaagattcttaactgttatgccattgagcgatcctgcaattatcgactctcttttatcacacaatgtaagagcatctggtactaagcctgaagagcagagcttattgctctcaatctttgtgtcatggttcccaatgctgcttttaattggtgtgtggatctttttctcacgtcaaatgcagggcggttctaaaggcaatcctctgtcatttggtaagtcaaaagcaaaactactctctgagaatcagattaaaacaacctttgatgatgtagcaggttgtgatgaggcaaaagaggacgtagttgaattagtagacttcttaaaagatccaaccaagtactctaagttaggaggtcgcattccacgtggtgtgttaatggtaggtcctccaggtaccggtaaaactttattagcaagagcaattgcaggtgaagctaaagttcctttcttctcaatttcaggttctgatttcgtggagatgttcgtaggtgttggtgcttctcgtgtaagagacatgttcgctcaggctaaaaagaatgctccatgtattatctttatcgacgaaattgatgcagtaggtcgcaagcgtggcgtcggcatgggcggtggtcacgacgaaagagagcagaccttaaaccagttactagttgagatggatggttttgaaggctttgaagctgtaattatcatcgctgcaactaacagacctgatgttcttgatcctgcactgttacgtccaggtcgttttgacagacaggtcgtggtaggtttacctgatgtacgtggtcgtgagcagatcttaaatgttcatgtaaagaaagtacctttaggtaaagatgttgatactgcaactatcgcaagaggtactccaggcttctctggtgccgaattagcaaacttggtaaacgaagctgccttaaacgcagcacgtcataacaagcgtgtagtaagcatgaatgagtttgaagaagctaaagataaactcttaatgggtgctgagcgcagaagcatggctatgaatgagcatgaaaagatcaacactgcttatcatgaggcaggtcatgctatcgtaggtaaattagttccagaacacgatcctgtatacaaggtatctattatccctcgtggcagagctttaggtgtaaccatgtatctgcctgaacaggataaggtatctcaaagccgtatcggtctgttatcaaacatttctactctgttcgctggccgtatcgctgaagagttaatgtttggtactgatgctgtaactacaggtgcttcaaatgatattgaaagagcgactcagattgctcgtagcatggtaacccgttggggcttctcaaagagattggctcctatgcagtatgaaaaggacaatgaaggttctgcatacttaggtggttcatctactactatgatttcaatgtcagatgaaactgctaagatcatcgatgaggaagtaacagaaatcatcaactcatgctacaagaaagctcaggacttacttgaagctaataaggacattcttgagaatatgaaggatgctctattaaagtatgagaccattgatgctgatcagattgacgatttgatgaatcgtaaagaagttcgtccacctcgtaaggtaggagatgctaaatcttcagatcagaaatcagatgataactcaaaagatgagaaatcaaatgatgaaaagactgaggataagtcaactgacaatcagtctgaaaaagctaagactgagaactctgacaatgcatcagagacaaaaaaagacgataatgacaataattcagagcagtaattagacaggacaacttgtcaaaattacatcgtctcatgaaggatctcttgacaggagatcctttgcttttaatgtaggttaaatgggcaagctgatttatatcagttttgtacaagtttagtgtgggatattcgatgaaattaagactgccaaatagtaaaagccttgatttgtcttttacaaaagtaatgggaaccattgctttagaagagaatgatacccgttcaattgaagatcttgttcttctggccaacagctacgtaaaagcaggagccgagcttctggaaattggtgctagagcaggttcagatggcatcaatgaaaccagagtgatgtctgttctttgtgctgtaatgaacagtgttgatgttcctgtggccttaaactcaaacaactatgaggttgtttcacaggctgttaaggccggtgtctccatggttattaccaccaacggtcttgcaactgagggcatgattgaccttataaaacgctctaatgttgcagtatgccttcactttgatcctcaagaaaagattgaagatgacagcgatgtggtaagtatcatttctgaatactactttgaaagaatcgatactcttttaaatgccggtattgaaagaaagagattactcattgacccatctgtagtaaatgcttctgtaagtaacagattaagactgttaggaagacttgagagctttaagagttttgctctgcctatctgtattgctctgcctcgttctttaccaaaagaagacagattcatgaaagataatagagtgcttaccttaactacagctttattctgttcatctgtaagtccagttcaaatcatcagaacagcagatgtaggtgaagttgcaattgcaattggtttttggcagattatggcaagtaagactaagccatttaagttatcaaagactatcgtaagacgtctaagacttctacgtgatgcaattcatgacttaagaaagaacaaagaaaagaattaaaatccaacatctttaaaagtctaatcttttaaaggtaaataacttttagaaaaaaagaaaacaaagatgaaaagaaaatattttggtacagacggtgtacgtggccgtgtaggtcaatatcctattactcctgattttgcagtaagactaggtttagctgcaggtaaagttttaggtaagaaacatggcggtaaagttatcattggtaaagatactcgtctgtcaggttatatgctagaagctgccttagagtcaggcttttcagcaggtggtatgtctcctgtaatgttaggccctatgccaactcctgctgtagcatatttaactcgagcattcagagcagacctaggcgttgtaatcagtgcttcacataacccatactatgacaatggtattaagttcttctcagctcatggtaccaagttacctgatgaggttgaacttgagattgagtctgtattagatgctaaggatattcctttagctgcttcatcagactttggtcgtgctttcagacaggatgatgctcctggtcgttacattgagtactgcaagagtacctttgcaagccacttctcattagagggcatgaagattgttttagattgtgctaacggcgctacctatcacattgctccacttgtattcagagagttaggtgcaactgttatcactatcggtgataagccaaatggtaccaacatcaatgatggtgtaggttctactcatcctgaggcattagttgctaaagtactatcagaaaaagcagatcttggtattgcttttgatggtgatggtgaccgtgttttaatgtgcgacagtcacggcactttgcgtgatggtgacaaccttctgtatatcattgctaacgacactaaaaagcgtggacgtctgccaggtggtgtagtaggtactttaatgactaacttaggtcttgagttagctttaaagcgtgaaggtattcctttctctcgtgctaaggttggtgacagatacgttatggagcagttgttagagaagaactggactctaggtggcgagaacagtggtcacatcattagcttaaaccatgcaactacaggtgatggtattgtttcagcgctacaggttctaaaggcttgtatgtatgcaggcaagacagttgaagagttatctgaaggtctgaccatgtacccacaggatcttatcaacgtaagattaacagcaggtcttgatgtaactcgtgacgagaaagttcagactgttgtagctgaagttgaaaaagagttgggctcaactggtcgtgtgcttttacgcaaatcaggaaccgagcctgtggttcgtgtaatggttgaaggtgagaatgcacaggacgttcatactaaagctcaaagaattgctgatgtgatcatccatcaggcaggctgtgaaaatgcttgaaaaaaagcataataacctgtaatatttgcacagctttgtatacgcaaaataggatgcgtttttattatgtacgaaattggtattgtagttttattactaattgcaattgcaatgattgctttgatccttgttcagcagggtaaaggtgctggcatgggcgcttcatttggtgctggtgcatcaaatacagtattcggttcagtaggatctggtaacttcctgactagatcaacttggactttaattattctgttcttcggtgtttgcttattcttaggttacttacagaagtcagctcacgaagagaagtcaagtttcagcaatatttctgagactcctgcaacagagcaggttgaagagaagactgttgttaacactgatgctcctgtagttgatacagatgcacctgcagtttcagacacaacagatgctcctaagactgacgctccagagactaagtaataaaagtttctactaaaaaagacccaccgtacggtgggttttttattggcgattttagataaattgattagaagacgtagtgcttggtaggagttatgacttcatgcaaaggcatatcccaatgctcaataggtacagcatctaaaagttggaagtcataagctacacctattaaaagacattgagcagagagcttctttaacattctgtcgtaatagcctccacccatacctaatctgttgcctttattatcaaatccaactaatggcacaatcaaagcttcaaatttatcaggagttaccagattctctggtaaattctcaggctctagaatgtggaagcggttttcaattaacctgtcacctttcttataggaataaaagtccatatgaccttttacgtgaacatccataaaaggtagagctaattcatgatgttctaaaaggtagtcattgataggctctgttgataactcaccgcctaagcttaaatatgatcccaccatctttttttgcaggaagtgtttatggtgacttaagatttttacaatctcaacgccagcctcataggcttttacaggtgttacctgtcttctttgttctaagatctgctgacgcagcgacttgcgtaaaactttgttatcaaaaaaatcagtcattgttagctctttgaagagaagttttcatcttggtgattagttttaatgcttcattttcaaatggagttttgtcgtttagatatccttgcaaggtactctctgagtcaagcgcaattaagatagctgcttgtgtaggagttaaattaggattatctcgcatcatagaggatgctttagtttgtaatgaaactatcgctctttgaagattttctttttgctcttttgcgcatcttaagttaaagctctcaccaaagagtgcacattggacaaagtcctgagggttctgttctgacataaaaattccttcttttactcatattgtaaagttatttttcaaattgtccaaaagagtaaaggagcatattgaaataaacttaattttacgtttgtcaggtagtgaaaaattattttgaattaaaaccaatacatataatacatataaaaaagttattaaaatgtgaagctgttactgtttaacatgttgattaagtggtacattcaaagaaaattattatccatccacaaacagagtttattatgaataaaaagacagtatattcaaatattgctattgatttaggtggcaagtatacaggctgtgtatcctatacatcttcaattttaccatcagctgatgacatcaatgcttttattatcgagatgcctgatgatggtaaaggtattaaatatacagtaaaagatagaactcaaaagagacatatggttcgctctttggatagattcaaaaaagcaagaaagctaatttatcttgtgataagttccatcattcgtagagaactgactgctgatgaaaatgaggcaatttcttctttaatgaagagaagaggatatacaagactagaggcagaaattgaccttgatattttaaaagactgccctatagatttatttgcttcatatatgaagaattttttcgatgaatcgcaatctttatatgaacagtttaatcagaagtgctgtgatttagattcagctaaagctatgaagaaagctctttcttcagaagaattaaaacaggccatggactcttctgaactagataaaatcgaaaaaaaaatatacaagtcagcttttaacactatggttgaagctgctgacaatatcatcaatacctgtgaatttggtaataaacaccgtaaacaatacttatcagacattaaggtagacataaataaggattctagattaactgatattgtcaaagcttttgccagcagtgaaaaactttacagatgtattggtaatatttcgaatctgcaattgagagcattgcgttggtattttaatgatatcgacatgaaaggagagccaaaatggatttctgaaagattcaaaaaagtgtgggcaagagcctataaatactttcattatcctaaagaagatcaaacaaaagccagagagctaattaaaaaaatcgaaagttcagaggatgctatctcattactaagctcaattgatcctctaaaaacaattcctccatatgaagatcagaacaatagaaatcctcctacagatttaacgttactcctgtctccaaaagcattagatgacaagtatgctgatttatgggatgcatgggctgagaagtttgctaacttatatccaaacctaacttatcagcttaaagatatagttaaagctacagacagaaaatcaagaattgaacagaagaactcaagttcatatacgcaaagtaaaatatttaattcatatgtaatacagcgattgcttgatttatccacaaatgaagacgaaccgattacattattgagaaaatgggtaagggatccatcaaatccaaatttggcaagaactgtcaagataattcagtcagttgttgaagatcatgaggatgatttctataaactggctcagtcatattataacgaagttgaaaaggctaaatctggtctatggtcagtagttgaagatcctcttcttgaaatttcaggaatacatccgcctatgaagaataaagtgatatcaacactggtaggaaatgtgcttggaattaataacgattttgattatgagaaatttcttgaagtgtggaaatctccaattaagggaagaaaaactctaaagtcaatttgtagagatatagaggaactaagaaaagattacggcaatacctttaaagttgaatatgattatgcgatttattcagctaaagataagaaaaagactttaacatcagatcagaagaaactagtcgaaatctataaaacgatagaagagatttctcctttattgtggagcaatatttctcaagatccgttgtctgaaattaaatttaacaatccatttagtttatctcaactgtatactctaattgaaacagatacattgggcttttcaagcaattgtgttgcagtaaataaagaaaacaatgcaagaatgcaatttttgtcaggaaattgtgcattgtgttcccgtcttccaactgaatcagtaagaccttttgatggtgcggtaggtaagatattagaaagacaagcttatgaaattgctaaagcaaagagctctgagataaaagagctagatggtcttaatgatgctgtgataaatgttggtattttgatagagcagaataagtttgagtattctgcatcattagcaacaattaaaaattcaaagtataagaaaaaaattcaaaaaagagcaaaaagtggagttagtcgtcaattagagcagtggaaatcaaaagaacaaagaattaaagacgcttcaagagacctttgtccatatacaggagaaccaatatctgagttatcaaacggagaaattgaccatatcattccaagaagctttaccaaagctagcatgggtacgatttttaactccgaagcaaatctgattttttgcagtaaagatggaaatcagactaagaaagaaaatgtgtatacattaagagatctttcaccaaattaccttaatgaaatattcggtttatctgatattttgaagattcagcaggaaatagaatgcactgtagcaaatgtaaatgaaaaaaatccaagattcttatttgatatgatgactccgaaagagcaagtctgttgcagacacgctttgtttatgccttaaagtaaagcatatcgattagtagtatcgtcattagcaagatcatatagtacaagagtgaatggtactcagtcatattttgtaaaagtaattatttcaagattaagaaatgagttatcttcgtggttaaaatctaacaggaatactttaaatttctttgcttataaagtagatccttcggatgttcattctacaagagatgacttgagcaaattaaatgctctattgaaaaaacaaaaaaatcagccaataacatcacatgctatagatgccttgtgtgtcctatcagcagcaagtactgttgaatatatttccgaaaatatatctgaaaatggaaaaatatcttttctatctaacatagaaaacctaaagaaagttgtcccaaatcaatatagagttatgcgtatagaaaaaaaatcattgtttaataaagatgttcctgaatcaagtaaactctttaaagataagatatatgcagagcatttccttactgttatgaccttaaatgataaattgaaggtagggtttgattggaattcaagcggagaaggaaatgcagttgaaattataaaatgtcagaaggatgtactagagctattatcaccgttctttaccgaaaaggtaagctatgatgacttattccatgcatataggattgataagataaaagcatttagtttcatgcacaagtttttagctcatgagatcgaggataatcagctctctaaaagacaatatgagctgttaaattcattgcactatacaactttgaacactgatgtaagctcaattatctactcagaaactgataaagagtttaaaacagctgatgagatcatgaatgaaaaaaattttgcaatcaaaattaaattcccttcatggttgaagtcagatggaagaaagtcattagttttaccttcaaaaaatgaatgggaaggtattgtttctacttttaaggatctgttaggtaagcaagttaaagatggaaatgaaaagaatattataaacgaacgtctaaatcttagaagaaaaaatacctcagcattgaaacacaaaggaacaaaaaggggattcagtttaccaataattgacggtccatcaggtggaattagaataagacgcaaatcattcaataatcaagatatttatcaaatggtcactgctggttccgcaaaaagcaagggcttttcagttaaaaatggaaaggtatcatgggatgactttgtaatgattgatacttatattagtaataatttaacccctgctgatttgtctggaagttatagtaatagttttatcccaatggatgaagaaagattagtctttaaggatgattctctgtcaatctttatgtctccatcaactgaggataggcgaatgattagaattattcagtcttttgatgattttaatttttgtttaggaaataaatttaaatcaccttttgatattccatctgtcataactcttaaaagtaataaagattgtcatgatcttgacaatttcttatcaaaaattaacaaggattttattggaaagcctagatatggaaatctcaaattactgtcaataggcaataaagtttgctactggtatcaagttgtatcaagtaataagaaaatgcaggaaatatttaataacgctttgaaatagctatgagatatcttactgtaagcgaatatggtacatttttaggcctttcaggagaacggcttattgttaaacaggatggaaaacagataaaagagatccccttatcaagattaagaacgatatgtgttcttaaaaggggagtttctgtttctggtgacttaattttgtcatgctctctaagaggaataagaattctctttttggattggaaaggtcaggctgtatcagctgtcttaggtcagaatcagcatgcggtagtctctttgagaaaatctcagtttgactttattaaagatgaaaaactttgctgtgatgtatctaagaagattattctttctaaggttagaaatcagcgtgcagttgtactttatttctctaagtaccagttgaaaaataatgaagagttaacaacagttgttggcaaatttgtaacatcagttaatcagatcataactcagctcaaaaacattcaaggtccacaatggaaaaataccttatttggcttggagggaaaagctgctgtattgtattggaatctcctcagttctctgtccttgcttccacacgattttgaatgtagagaaggtcgaggggcaaatagcatcactaataaagctcttaattatggctatgcaattttggcaagttttttattatcagccgttgataacgctgggtttgaaatgtacgccggatttttccacgtagacagaccaggaaagccatcacttgtcttagacctgatggaagagtacagagcatgggttgttgatagagttgttataaaactaaggtctagacttgaaagtgcaaaagaatttgattcttcaattaaaaaagcgataagtgatgaaatatacaaaaccatggctacaaggtactcctataacaagaagaaagtaaaacttgaaaatatcatacaaaggcaagtatacagattatctggagttataagtgaaaagggaaattataaaggctattcctttaaatggtagaaaaagatgaatatttaccaaaagtacctcgtctgttatgacattgagaatgataaaactagaaagaagttctttgataaaatgaaggatcttgggttgatatctattcagaaatcagtgttttatggagatttaaatcaagccgagttctctgctatgaagaaagttgttctaaaaatgcttgatcctgaatctgacaagtgcttttggaccaaatgtacattgtctgataaagagcttggtagttgctttggttataaaaattttaaatatatagagccagacggatatgaatcaatttaacttaccggtttcaatgttaagacaatactgtttttgcccaagaatcccttatttctatattgcgcgaaatataacgcctgtagaaaaagagtggatgtctcaaggcattgaagaacacaagcgccaagagatgttatctaaaagaaggaatctctttaggtttggaatttcaacgattggaaaaatttcttttaatgtggaactgtatagtgaccaattatctcttcatggcatatgtgatgcaattttgtctgctgattcagaattaagcatcattgaatttaaaaactcagattatgacaagttcactataggaactgcagtgcaactatgtgcatatgcaatgctatgtgaagagaagtacggtgaaataataaaacaatgttttgttctttacggaagcaaagggaaaaccagaaaagtgaacatcgatgcatctattagatccaaaactttggaaataagagatcacattattaaaaacctcaaaaaggcagacattccaccttctagcgcagaagaaaataaatgcggacaatgcgaattcttcaacttctgtgctgacaggttttaaaaatacatccagatgcttacgcagttgctggacttaatcttgatttttgatgatttcagctcgccataaagacgacttcaagaactttttcaatctatgattttattgtaaagtatttttttcgaaaaatatatttgtttcagtgcaaaaaataatatttctaaacttacatcacattttatatgtgcaacatcttctttttaaagaattttatgttgcagcttcaattatagattgaaaaagtccttaactgaaactgagttggctttgaaccgaagtagcgaacagtctaaagcttcaattatagattgaaaaagtccttaactgaaactctttaatgcgaactctttgcgaccaattaatgaggcttcaattatagattgaaaaagtccttaactgaaactgttgataggtaaggtcagcacgaacagacataagagcttcaattatagattgaaaaagtccttaactgaaaccatttcatcggtgacttttactttgaccttaaatgcagcttcaattatagattgaaaaagtccttaactgaaacttgtttttctcttcacctgcttttttgttgtctgtagcttcaattatagattgaaaaagtccttaactgaaacattaactatgcacccgctttgactcgtggtggttttagaagcttcaattatagattgaaaaagtccttaactgaaactgtgaaggtctatatttttctccttccgttaattctgcttcaattatagattgaaaaagtccttaactgaaacagcaatcggaaaaaatcagattgtgtaggaaaatcaagcttcaattatagattgaaaaagtccttaactgaaactaataatagcacattaaggcttataacatcaactgcttcaattatagattgaaaaagtccttaactgaaacatttttggcctgccgttgctgccattgccggttctggcttcaattatagattgaaaaagtccttaactgaaacgttgcaacttatgatttaactctcgattatcttctgcttcaattatagattgaaaaagtccttaactgaaacgtcatgcctgtaacgtagttaatgatcacgaaattggcttcaattatagattgaaaaagtccttaactgaaactcgttaaatgtagttttatagccaaaagacctatcaagcttcaattatagattgaaaaagtccttaactgaaacagattatgacaatgtaagttacatctgtgccgaccataggcttcaattatagattgaaaaagcccttaactgaaaccacgttgttggggatgtctctgttcttatatactttgtttccattacagattgatcaaaatataaacagaaagcttttttgaaaggcattaagcttattactccatataattcttactgagaatttcaattttgtaaagtactaatgtaaaatagaaacatatttgaatttaaacttttttaagtagaaaacatatgactgagaagttacataaaattttatcccgcgctggaattgcttcacgtagagctcttgagcagatgattgatcagggcagagttaccgtaaatggcaaaatggctaccatcggtgacagatacgaagcagatgacattttagttaaaattgacggtaaggtagtattaacacctgacagtcaaaaagtatcttgcagagtcttaatgtatcataagcctgaaggtgagcttactacattatcagatcctgaaaacagaccaacagtattcgaccatattcctaagcctccaactggtcgctggatctacattggtcgtcttgatatcaatacctcaggtttactcttatttaccaccgacggtgaattagccaatgcactgatgcatcctaaatatgaagttgagcgtgtatatgctgcacgtatctatggtgaagtgagtgaagagcaaatcgatcagttaacccaaggcgtaatgttagaagatggtaaagctcgctttaacaaagttacttacgtaggtggtgaaggacgtaacgcctggtaccacgtaaccttaaaagaaggacgtaagagagaggtccgccgtctttgggaagctgtagggcttaaagtttctcgtcttatcagaattaagtacgcaggtatcgatcttgatcctgacttaaagacaggacagttcagagaacttaccttaaatgaattaaatcgtttaagaaaagctgttcatttagagccagttgaagagttggctcctgcattagacttaaatgcctcatcttcaaataaaggaagaaaagctacaaaagctcctgtaaggaatactgtttcatttaattcttcgaaagaagaaaatgatgataagtcttcaagaagatctccatacggtaagccactatctcgtcctgcaagaggggataagtcagctttccctaagaaaggtaaatcttttggtgagaacaaaggaagaaagttctcacaagattcttcatttgataaaaatgacagaagaaagacttttactaaagatgattcttcaagaaagtttggttctaagtcaaacaactctgaaaagcatttcgtatcacatacaaatctgcgctctgagaaagaaggtcagtcttttaacaaaggctatgctgtaaagagcagaggcagtgctgtatcaaagtcttcttttgtaaagccaagaagaacaaatagaggttcttactaagcttaagagctttcttttaagagataatcgtgaaggctgatatttatgaatgagcttttaaattttgagatattttcaaatgaagagcttgtagcaaaggtaaccgccttttcttcacgaggacatgatgtctatgattttagctatgttccttcttggatagaaaaaggctattctctagatccaacattgtatttcacttctgatattcaacatgtccaagttcttcctccttgcttacaagatatatgtccagatcgatggggaaggttaatacaaaaaagaaagttaggttacactccttcttcaactgagcatttgcttggtgtaagcgactattttcgaatgggagctttacgaattaaaatcaatggtaaatttgttgatgattctacggatagaccaaagttaacaagtttaaatgagttaatcgaagcttctagacaagtagagcttggtaatacgagtgatcatgatataaatttactgtttgctccaagtggcagtttaggaggagcaagaccaaaaggttgtgtagtagataaaggtcaactttttttagctaagtttccatcaataaatgatcaagatattcagttgtcaaagtgcgagaaagtatatttagatttggcaaaagaagctggtatcaaagcttgttcatctaaagttattgaatcgaagtttggtgatgttcttcttttaccaaggtttgacagagatatacataacaaacggattccttttatgtcagcaatgacagctataggcttgtcagagagcgatgagttggataattacagctatgtagatcttgcaatgtcagatttcatgacatccaaggaacaaaagcaagaattattcagaagaatgctctttaatggacttttgggaaatacagatgaccatttgagaaatcatggttttttacgtatcaatggagaatggcaattatctccagcctacgacctaacaccgaatacagttccctacaataaacaacaccacgcattatgttttattgaaggtaaagatttaccatcattagctttatttaatgatataaaagattattttgaggttgatgacaagcttttcaaatcaatgttacttgatatgaagaatgctcaagcatcatgtctatctcttcttaagaagaataaagtttcacaggacaacataaaattgcttgaaaacaattttgagcacgaagattttgaaaagctaaaatccattgtttagctgtcatatctatcaatttgaagcaaaagaatgcacctattgcaattgtgctatgctaattcgttgtttcaactgtaatatatagcaaagcattcgatgttacttcacataattaatacatgttgttaacatttgttgcttataattgctatatttacatcgttatacatacttttgattttatttgagaaattaaaacttaaaatgaacgcagacccgactgtctttagtcacacatttctatctgatttctttttcaactcatttttacagctaggagcttactgatatgcaagatcaagctctagctcatccaactttaatatttgatatgctgtgggtattagatcctacagcctggttaggtttgttaaccttaacagctattcaggttgttttaggtattgataacttactattcattgctattctgtcagcaagacttccagcaagacaaggtaagactgctcgctacatcggtttaggtggtgctttaatcatcagaattatcttgatgatcttcgccgcttacgtaatggcaatgtcagagccattgttcactgtcttaaactttgaagtttcagttcgagacttaatgatgttcttaggtggtgctttcttgatatacaaatctacagaagagcttcattcaaagttagaagaccaaagcaatgaagagtctgtttctgtaagcaagtcagcaggccattcatttgttattgtagccacacagattatgatcctggatgtacttttctccggtgattcaatcatcaccgcagttggtatgaccaatcatgtttacatcatgatcattgccgtaactatagcaatgggattgctgatgtgggcatcaggctttattgcagtctttgtctcaaagcatccaactgttgttattctgtgtttgggcttcctgctactaattggctttagcttgattatggaatcattccatattgaagtaccaaagggatacttatactcagcaattggcttctcattgttaatcgagatcttcaatcaagcatcacgcaagactgttttaaacttgaaacactctaacaatatgcaggcccgtcaggtagcagctcatctggtcttaagactgttaggctcaaaaaatgacgacgatgtgcattcaattaaggaagctattgtttcacgtcctagtgcctatgtctttaacaagcaggaaaaagagatggtatctcgtgttcttgaaatgtcatcactgcctgtaaaggctgtaatgacagcaagaactgatctgcaaacaattaaagttgatggctcaaaagagtacatcttaaacaaggcattatcttgcactaagtcattattgattgcttacagaagcggtcacaaagatcagcctttaggttttgtttcaagagcagatgttttaggcctttttgtcgaagacaaggttgatgttgcccacatggaaaagattgtccaggagcctttatatcttccgcaaacaattaacatcttaagtgccctagatcaatttaggcagtcaaagaaatactttggatttgtctttgatgagttcggaggttttgaaggtattgttactgttcatgatgtggttgaagagatcacaggtgagatgcctgaaaagagtgaaactccagagattgtacgttttggtaaagatggtaagtcatttagagtagatggtgatgctatcttacctgatgttgcaagaataactggtttagacttacctccatcagagcattatcagactattgcaggttacgttttagacagattgcagagagttccaaagcaaggcgaaactttagatgttggtgactggaagattgaagttttcagcgctgatgcaactgcaattaacgtcttaaaactctataggataaagtaggaaaaaacttgatttttatccttacttttgctataaataaagggcttgaagctgatagcgtttcaagcctgttcaagtgtgagcttgaaccttcagtaataaacgagtttattactgatagatatagtggaacttcataaagaaagggaccctagttgaggtcctttttttgtgtttaaaattaaataaattgaggtactaatggcaggaaccattgaagagaaagtagcagagctagtaactcctctggtggagtctatggatcttactgtatggggtatcagattccgtggcggtaatgatcatgcgatgttgcaggtgtttgttgattctgagcaaggtgtaagcgcagataagtgtggcgagttaatggatgtattatctcctgctttagatgcagctgaccttatcgctcctaaatatacacttgaggtatcttcacctggtcttgacagaattttgttcacacttgagcaagctaaggcttatacaggtaaaactgtaaaagctgaacttagaattcctactcagggcagacataagcttcaaggtactttagatgaagtaactgatgatggcatgctgaagattaacgataagatctcaggtcttatcgaagttgcattctcaaatgtatctacagcacg

SEQ ID NO: 120 - DNA, 9304 bp, synthetic construct
  misc_feature 1..9304: note = Synthetic
  source 1..9304: mol_type = other DNA
tgcagtaagactaggtttagctgcaggtaaagttttaggtaagaaacatggcggtaaagttatcattggtaaagatactcgtctgtcaggttatatgctagaagctgccttagagtcaggcttttcagcaggtggtatgtctcctgtaatgttaggccctatgccaactcctgctgtagcttatttaactcgagcattcagagcagacctaggcgttgtaatcagtgcttcacataatccatactatgacaatggtattaagttcttctcagctcatggtaccaagttacctgatgaggttgaacttgagattgagtctgtattagatgctaaggatattcctttagctgcttcatcagactttggtcgtgccttcagacaggatgatgctccaggtcgttacattgagtactgcaagagtacctttgcaagccacttctcattagagggcatgaagattgttttagattgtgctaacggcgctacctatcacatcgctccactggttttcagagagttaggagcaactgttatcaccatcggtgataagcctaatggcattaatatcaatgatggtgtaggttctactcatccagaggctttagttgctaaagtcctttcagaaaaagctgatcttggtattgcttttgatggcgacggtgaccgcgttttaatgtgcgacagtcacggtaacttacgtgacggtgataaccttctgtatatcattgctaacgacactaaaaagcgtggacgtctgccaggtggtgtagtaggtactttaatgactaacttaggtcttgagttagctttaaagcgtgaaggtattcctttctctcgtgctaaggttggtgacagatacgttatggagcagttgttagagaagaactggactctaggcggagagaacagcggtcacatcatcagcttaaaccatgcaaccacaggtgatggtatcgtatcagcactacaggtcctaaaggcttgtatgtatgcaggcaagacagttgaagagttatctgaaggtctgaccatgtacccacaagatcttatcaatgtaagattaacagcaggtcttgatgtaacccgtgatgagaaagttcaggcagttgtagctgaagttgaaaaagagttaggctcaacaggtcgtgtcttattacgtaaatcaggcaccgagcctgttgttcgtgtaatggttgaaggtgaggatgcacaagacgttcatactaaagctcaaagaattgctgatgtgatcatccatcaggcaggctgtgaaaatgcttgaaaaaaagcataataacctgtaatatttgcacagctttgtatacgcaaaataggatgcgtttttattatgtacgaaattggtattgtagttttattactaattgcaattgcaatgattgctttgatccttgttcagcagggtaaaggtgctggcatgggcgcttcatttggtgctggtgcatcaaatacagtattcggttcagtaggatctggtaacttcctgactagatcaacttggactttaattattctgttcttcggtgtttgcttattcttaggttacttacagaagtcagctcacgaagagaagtcaagcttcagcaatatttctgagactcctgcaacagagcaggttgaagagaagactgttgttaacactgatgctcctgtagttgatacagatgcacctgcagtttcagacacaacagatgctcctaagactgacgctccagagactaagtaataaaagtttctactaaaaaagacccaccgtacggtgggttttttattggcgattttagataaattgattagaagacgtagtgcttggtaggagttatgacctcatgcaaaggcatatcccaatgctcaataggtactgcatctaaaagctggaagtcataagctacaccgattaaaagacattgagctgacagtttctttaacattctgtcgtaatagcctccacccatgcctaatctattgcctttattatcaaatccaactaaaggcacaatcaaagcttcaaatttatcaggagtcaccagattctcaggtaaattctcaggctctaaaatgtggaagcggttttcaattaacctgtcaccctttttataagcataaaagtccatatgaccttttacgtgaacatccataaaaggtagggctaattcatggtgttctaaaagatactcattgataggctcagtagataactcaccgcctaagctcaaatatgatcctaccatcttcttttgctggaagtgcttgtggtgacttaagatttttacaatctcaacacccgcttcataggctttaacaggtgttacctgtcttctttgctctaagatctgctgacgcagagacttacgaagaactttgttatcaaaaaaatcagtcattgttagctctttgaagagaagtcttcatctttgtgattagtttcaaagcttcattttcaaatggagttttatcgtttaaaaatcccagtaaggtactctctgagtcaagcgcaattaagatagctgcctgtgtaggagttaaattaggattctctcgcatcatatttgatgctttagtttgcaaagaagctatcgctctttgcaatttttctttttgttcttttgcgcatcttaagttaaaactttcaccaaagagtgcacattgaacaaaatcctgagtgttctgatctgacatatgtaattccttttgctgtagatattgtaaagtcttttatcaaaagatccaaagataaacaaaacgttttttagagcactcttctatactgatattagactataaaaattatttataaaataaaaataatgcgaataatacgtttaaaaatattaaaaaaaataaaatgtgataaaaatattgtttaaaatatagattaagtgctatagtcaagctattaagttgtcattcatcaaaagcagagttttattatgagcaaaaagacagtgtattcaaatattgcaattgatctaggtggaaagtacacaggatgcgtatcatacacatcttcaatattaccatccgcagacgatttcaatgcttttattattgaaatgcctgatgacggtaatggaattaaatatactgtaaaagatagaactcaaaagagacatatggtcagatctttggatagatttaaaaaagcaagaaagctaatctatctagttacagcttcaataataagaagagaactttcctccgatgaaaaagaagcaatttcttctttaatgaaacgaagaggatacacccgactggaagctgagattgatcttgatattttaaaagaatgccctgtagatttatttactttgtatctgaatgatctgtttgatgaaaatcagtctttgtatgatcagtttaatcaaaagtgttgtgacttagatactgctaaagcaatgaaaaaggctcttgcttcagaagaattaagtatagctctgaaatcgtctgatctaggtaagactgaaaaaactctgtacaagtctgcctttaacacaatggttgaggctgcagacaatatcatcaatacatgtgagtttggaaacaaacaccgtaaacaatatttatctgacattaggtttgacataaataaagattcaagactaacagatattgtaaatggtttaggaaatagtgaaaaactatatagatgcatcggaaatatatcaaatctgcaattgagagctttgcgttggtatttcaatgatatcagtatgaaaggcaatccaaagtggatccctgaaaaattcaaaaaagtatgggtaagagcatataaatactttcactaccctaaagaagaccaactaaaggcaagagctctaattgataatttagaaagtagagaagatgctacttctttattattttctattgatcctcttgataccatacctccatatgaggatcagaacaatagaaatcctcctactgatttaacattacttttatctccaaaagcgttagatgctaggtattcaaaagtttgggagaattgggcagagaagtttgctagcttatatccaaatttgacatatcaattagaagatattgttaaaaacaccgatagaaaatcgagaattgaattaaagaattcaaactcatataccaagagtaaagttcttcattcgtacattctgcaacgtttatttgatctatccgcaaataaagatgagcctgttaccttattgagatcatgggtaaaagatccttcaaactcaaagttgttaagcactgccaagataatccattctgtagtcggcgagcgagaggatgacttttataaattagctcaatcatactataacgaagttgaaatggctaagtcaggtctatggacagtagtagaatctcctttacttgaaatttcagaaatacatcctccaatgaaaaataaagttatatcaactttggtaggaaatgtgcttggaattaataacgattttgattatgagaaatttcttgaagtgtggaaatctccaattaagggaagaaaaactctaaagtcaatttgtagagatatagaggaactaagaaaaaattacggcaatacctttaaagttgaatatgattatgcgatttattcagctaaagataagaaaaagactttaacatcagatcagaagaaactagtcgaaatctataaaacgatagaagagatttctcctttattgtggagcaatatttctcaagattcgttgtctgaaattaaatttaacaatccatttagtttatctcaactgtatactctaattgaaacagatacattgggattttcaagcaattgtgttgcagtaaataaagaaaacaatgcaagaatgcaatttttgtcaggaaattgtgcattgtgttcccgtcttccaactgaatcagtaagaccttttgatggtgcggtaggtaagatattagaaagacaagcttatgaaattgctaaagcaaagagctctgagataaaagagctagatggtcttaatgatgctgtgataaatgttggtattttgatagagcagaataagtttgagtattctgcatcattagcaacaattaaaaattcaaagtataagaaaaaaattcaaaaaagagcaaaaagtggagttagtcgtcaattagagcagtggaaatcaaaagaacaaagaattaaagacgcttcaagagacctttgtccatatacaggagaaccaatatctgagttatcaaacggagaaattgaccatatcattccaagaagctttaccaaagctagcatgggtacgatttttaactccgaagcaaatctgattttttgcagtaaagatggaaatcagactaagaaagaaaatgtgtatacattaagagatctatccccgaagtatcttaatgctgtgtttgggacagcagacagtgtaaagatcaagcaagaaattgatagtactgtagcaattttaagtgataaaaatcctagattgttatttgatatgatgaatcaaagagagcaagattgttgcagacatgccttatttatgcctcacagtaaagcatatcaaattgtagtatcagctttagcaagatcttacagtacaagagtaaatggtactcagtcttattttgtaaaagcaattatctcaaaattaagaaacgagctatcttcttggttaaaaactcacaatagtactttaaatttcttcgcttataaggtggatccttctgacgttcattccactagagagaacttgagtaaatctaatccatttttgaaaaagcaagaaaatcagccaataacatctcatgcaatagatgcaatgtgtgttctttcagctgcaagcaatgttgagtctatttctgagaatatttctgaaaatggaagcatagcttaactatccaatttagagagcctagaaaaagttcttccaaaccaatatagaattgtacgtatagagaagaaatcatttttcaataaagacgtccctgaatcaagaaaactctttaaggacactatatatgctgaacatttcctcacagttatgtccttaaaagatcaattaaaggtcggttttaattggaattcaaatgatgaaggaaattctgtagaaattgtaaaagggcagaaagagttccttgaaattttagctccattctttacagataaagtcgttattgatggttcattccatgcctataaaattgacaaaattagggcttttaatttcatccataaatacttatctcatgagattgatgataatcaaatgacaaaacgtcagtatgagttgttaaattctttgcactatacgactttgaatactgatgtaagtacaatctactcaaaaaacaaatttaaagaacgtaaagaaatcatgaagaaagataattttgaaataaaagttaaattcccttcatggttgaagatagctggtagaaagtcattagaattaccttcaaaacatgaatgggaatcagtagtttccaaatttgaagatttgttaggcaaaaaagttgaaaatggtttagatattttctatgaacgcttaaatctaaaaaagaaaaaaaattctgcattaaagcacaaaggtacaagaagagtattcagcttacctgtaattagcaccccatcaggaggaattagaattagacgtcaatcagtagataataaagatgtttaccaaattgttgaagcaaatactcctgaatcagtgctattcaaaggtttttttgtgcacaatgaaaaagtatcttggtctgactatgtaatgttagattcttacataggtaaaaatctaacctatgttggtgagcctgtagcaaatagcgattgctatgtaacaatggatgaagaacgcttagtctttaaggatgactctctatcaatctttatgtcgccttcttcaaaggacagatctatgatcagaatagttcagtcttttgatgattttaattcttgtttaggcggtaaatttaaatcaccattagatgtgccttcagaaataactctcgtaactaatgatagttgccatgatctagataactttttatcagagattaataaggatttcattggaaagcctagagatggaaaaatcaagttgctttccattggcaataaagtttgctattggtaccaaacatcaagaaataaaaaggtaaaagcagtatttgaaaatccattgaattgatatgagatatcttactgtaagcgaatatggaacatttttaggactttctggcgaaagactgactgtaaaacaggatggtaaactgataaaggagatccccttatctcaattaagaacgatttgtgttcttaaaaggggagtatccgtttctggtgacttgatcttgtcctgctctttaagaggagtaagaatactctttttagattggaaaggtcagaccatatcagctgtattaggtcagaatcagcatgcagtagtttctttgagaaaatctcaatttgattttattaaagatgaagctctttgcagtgaagtttccaaaaaaatcattctttcaaaggttagaaatcaacgtgccgttgtactttatttctcaaaatatcaattgaagaataatgaagagttaacggtaatcttagacaaatatgttacttctgtaaatcagatagtaaatcagatcaaaaaccttcaaggtccacaatggaagacttcattatttggactagagggaaaagccgctgtattgtactggaatattcttatttctctgtctttacttcccaatgattttgaatgcagagaaggtcgaggtgctaatagcatgaccaataaggctcttaattatggctatgcaattttggcaagttttttattatcggcagttgataatgctggatttgaaatgtacgctggtttctttcatgtagatagaccaggaaagccttcacttgttttggatcttatggaagagtacagagcttgggttgttgatagagttgtaataaaacttagatcaagactagcctgtataaaagaatttgacgcctcaattaaaaaagcgataagtgatggaatttaccaaacaatggctacaaagtactcttataacaagaaaaaagtgaaactagaaaatattattcaaaggcaagtatacaggttgtcaggcgttataagtgaaaaaggaaattataagggctattcctttaagtggtaaacaaagatgaacatttaccaaaagtaccttgtctgttacgacatagaaaatgataaaaccagaaagaagttctttgagaaaatgaaagatcttgggttgatatctatacagaagtctgttttttatggagatttaaatcaagctgagttctctgccatgaagaaagtggttctaaaaatgcttgatcctgattctgacaagtgtttttggacaaagtgcacattgtctgataaagatttaggcaactgttttggttataaaaactttaaatatatagagcccgatggatacgaatcaatttaacctaccggtatcaatgctaagacaatactgtttttgtccaaggatcccttatttctatattgctagaaatatttctccattagaaaaagtatggatgtctcaaggtactgaagaacataagcgccaagagatgttatctaaaagaagaaatctgtctagatttggaatttcaacaattggtaatgtttctttcaatgttgaagtatatagtgacaacctgtctcttcatggcatatgtgatgccattttgtttacagaatctgaactctgtgttatcgaatttaaaaattctgaatatgagaaattcagcctaggaacggcagtgcaactatgtgcgtactcaatgctatgcgaagaaaagtacggagtagaagttaaacagtgctttgttctttatggaaataaaggaaatactagaagagcgagtattgatgcatccatcagatccaaaacattggaagtaagagatagcatcatacacaacctcaaaaaggctgatataccaccatctagcgcagaagaaaataaatgcggacaatgcgaattctttaacttctgtgcagaccggttttaaaaaatacatccagatgcttacgcagttgctagacttaatcttgatttttgatgatttcagctcgccataaagacgacttcaagaactttttcaatctatgatcttattgtaaagtatttttttcgaaaaatatatttgtttcagtgcaaaaaataatatttcgaaacttacatcacattttatatgtgcaacatcttctttttaaagaattttatgttgcagcttcaattatagattgaaaaagcccttaactgaaacattctgagatatcgt

SEQ ID NO: 121 - DNA, 8207 bp, synthetic construct
  source 1..8207: mol_type = other DNA
  misc_feature 1..8207: note = Synthetic
gttttgtcgtttagatatccttgcaaggtactctctgagtcaagcgcaattaagatagctgcttgtgtaggagttaaattaggattatctcgcatcatagaggatgctttagtttgtaatgaagctatcgctctttgaagattttctttttgctcttttgcgcatcttaagttaaagctctcaccaaagagtgcacattggacaaagtcctgagggttctgttctgacataaaaattccttcttttactcatattgtaaagttatttttcaaattgtccaaaagagtaaaggagcatattgaaataaacttaattttacgtttgtcaggtagtgaaaaattattttgaattaaaaccaatacatataatacatataaaaaagttattaaaatgtgaagctgttactgtttaacatgttgattaagtggtacattcaaagaaaattattatccatccacaaacagagtttattatgaataaaaagacagtatattcaaatattgctattgatttaggtggcaagtatacaggctgtgtgtcctatacatcttcaattttaccatcagctgatgacatcaatgcttttattattgagatgcctgatgatggtaatggtattaaatatacagtaaaagatagaactcaaaagagacatatggttcgatctttggatagattcaaaaaagcaagaaagctaatttatcttgtgataagttcaatcattcgtagagaactgactgctgatgaaaatgaggcaatttcttcattaatgaagagaagaggatatacaagactagaggcagaaattgaccttgatattttaaaagactgccctatagatttatttgcttcatatatgaagaatttgttcgatgaatcgcaatctttatatgaacagtttaatcagaagtgctgtgatttagattcagctaaagctatgaagaaagctctttcttcagaagaattaaaacaggccatggactcttctgaactagataaaatcgaaaaaaaaatatacaagtcagcttttaacactatggttgaagctgctgacaatatcatcaatacctgtgaatttggtaataaacaccgtaaacaatacttatcagacattaaggtagacataaataaggattttagattaactgatattgtcaaagcttttgccagcagtgaaaaactttacagatgtattggtaatatttcgaatctgcaattgagagcattgcgttggtattttaatgatatcgacatgaaaggagagccaaaatggatttctgaaagattcaaaaaagtgtgggcaagagcctataaatactttcattatcctaaagaagatcaaacaaaagccagagagctaattaaaaaaatcgaaagttcagaggatgctatctcattactaagctcaattgatcctctaaaaacaattcctccatatgaagatcagaacaatagaaatcctcctacagatttaacgttactcctgtctccaaaagcattagatgacaagtatgctgatttatgggatgcatgggctgagaagtttgctaacttatatccaaacctaacttatcagcttaaagatatagttaaagctacagacagaaaatcaagaattgaacagaagaactcaagttcatatacgcaaagtaaaatatttaattcatatgtaatacagcgattgcttgatttatccacaaatgaagacgaaccgattacattattgagaaaatgggtaagggatccatcaaatccaaatttggcaagaactgtcaagataattcagtcagttgttgaagatcatgaggatgatttctataaactggctcagtcatattataacgaagttgaaaaggctaaatctggtctatggtcagtagttgaagatcctcttcttgaaatttcaggaatacatccgcctatgaagaataaagtgatatcaacactggtaggaaatgtgcttggaattaataacgattttgattatgagaaatttcttgaagtgtggaaatctccaattaagggaagaaaaactctaaagtcaatttgtagagatatagaggaactaagaaaagattacggcaatacctttaaagttgaatatgattatgcgatttattcagctaaagataagaaaaagactttaacatcagatcagaagaaactagtcgaaatctataaaacgatagaagagatttctcctttattgtggagcaatatttctcaagatccgttgtctgaaattaaatttaacaatccatttagtttatctcaactgtatactctaattgaaacagatacattgggcttttcaagcaattgtgttgcagtaaataaagaaaacaatgcaagaatgcaatttttgtcaggaaattgtgcattgtgttcccgtcttccaactgaatcagtaagaccttttgatggtgcggtaggtaagatattagaaagacaagcttatgaaattgctaaagcaaagagctctgagataaaagagctagatggtcttaatgatgctgtgataaatgttggtattttgatagagcagaataagtttgagtattctgcatcattagcaacaattaaaaattcaaagtataagaaaaaaattcaaaaaagagcaaaaagtggagttagtcgtcaattagagcagtggaaatcaaaagaacaaagaattaaagacgcttcaagagacctttgtccatatacaggagaaccaatatctgagttatcaaacggagaaattgaccatatcattccaagaagctttaccaaagctagcatgggtacgatttttaactccgaagcaaatctgattttttgcagtaaagatggaaatcagactaagaaagaaaatgtgtatacattaagagatctttcaccaaattaccttaatgaaatattcggtttatctgatattttgaagattcagcaggaaatagaatgcactgtagcaaatgtaaatgaaaaaaatccaagattcttatttgatatgatgactccgaaagagcaagtctgttgcagacacgctttgtttatgcctcaaagtaaagcatatcgattagtagtatcgtcattagcaagatcatatagtacaagagtgaatggtactcagtcatattttgtaaaagtaattatttcaagattaagaaatgagttatcttcgtggttaaaatctaacaggaatactttaaatttctttgcttataaagtagatccttcggatgtccattctacaagagatgacttgagcaaattaaatgctctattgaaaaaacaaaaaaatcagccaataacatcacatgctatagatgccttgtgtgtcctatcagcagcaagtactgttgaatatatttccgaaaatatatctgaaaatggaaaaatatcttttctatctaacatagaaaacctaaagaaagttgtcccaaatcaatatagagttatgcgtatagaaaaaaaatcattgtttaataaagatgttcatgaatcaagtaaactctttaaagataagatatatgcagagcatttccttactgttatgaccttaaatgataaattgaaggtagggtttgattggaattcaagcggagaaggaaatgcagttgaaattataaaatgtcagaaggatgtactagagctattatcaccgttctttaccgaaaaggtaagctatgatgacttattccatgcatataggattgataagataaaagcatttagtttcatgcacaagtttttagctcatgagatcgaggataatcagctctctaaaagacaatatgagctgttaaattcattgcactatacaactttgaaaactgatgtaagctcaattatctactcagaaactgataaagagtttaaaacagctgatgagatcatgaatgaaaaaaattttgcaatcaaaattaaattcccttcatggttgaagtcagatggaagaaagtcattagttttaccttcaaaaaatgaatgggaaggtattgtttctacttttaaggatctgttaggtaagcaagttaaagatggaaatgaaaagaatattataaacgaacgtctaaatcttagaagaaaaaatacctcagcattgaaacacaaaggaacaaaaaggggattcagtttaccaataattgacggtccatcaggtggaattagaataagacgcaaatcattcaataatcaagatatttatcaaatggtcactgctggttccgcaaaaagcaagggcttttcagttaaaaatggaaaggtatcatgggatgactttgtaatgattgatacttatattagtaataatttaacccctgctgatttgtctggaagttatagtaatagttttatcccaatggatgaagaaagattagtctttaaggatgattctctgtcaatctttatgtctccatcaactgaggataggcgaatgattagaattattcagtcttttgatgattttaatttttgtttaggaaataaatttaaatcaccttttgatattccatctgtcataactcttaaaagtaataaagattgtcatgatcttgacaatttcttatcaaaaattaacaaggattttattggaaagcctagatatggaaatctcaaattactgtcaataggcaataaagtttgctactggtatcaagttgtatcaagtaataagaaaatgcaggaaatatttaataacgctttgaaatagctatgagataccttactgtaagcgaatatggtacatttttaggcctttcaggagaacggcttattgttaaacaggatggaaaacagataaaggagatccccttatcaagattaagaacgatatgtgttcttaaaaggggagtttctgtttctggtgacttaattttgtcatgctctctaagaggaataagaattctctttttggattggaaaggtcaggctgtatcagctgtcttaggtcagaatcagcatgcggtagtctctttgagaaaatctcagtttgactttattaaagatgaaaaactttgctgtgatgtatctaagaagattattctttctaaggttagaaatcagcgtgcagttgtactttatttctctaagtaccagttgaaaaataatgaagagttaacaacagttgttggcaaatttgtaacatcagttaatcagatcataactcagctcaaaaacattcaaggtccacaatggaaaaataccttatttggcttggagggaaaagctgctgtattgtattggaatctcctcagttctctgtccttgcttccacacgattttgaatgtagagaaggtcgaggggcaaatagcatcactaataaagctcttaattatggctatgcaattttggcaagttttttattatcagccgttgataacgctgggtttgaaatgtacgccggatttttccacgtagacagaccaggaaagccatcacttgtcttagacctgatggaagagtacagagcctgggttgttgatagagttgttataaaactaaggtctagacttgaaagtgcaaaagaatttgattcttcaattaaaaaagcgataagtgatgaaatatacaaaaccatggctacaaggtactcctataacaagaagaaagtaaaacttgaaaatatcatacaaaggcaagtatacagattatctggagttataagtgaaaagggaaattataaaggctattcctttaaatggtagaaaaagatgaatatttaccaaaagtacctcgtctgttatgacattgagaatgataaaactagaaagaagttctttgataaaatgaaggatcttgggttgatatctattcagaaatcagtgttttatggagatttaaatcaagccgagttctctgctatgaagaaagttgttctaaaaatgcttgatcctgaatctgacaagtgcttttggaccaaatgtacattgtctgataaagagcttggtagttgctttggttataaaaattttaaatatatagagccagacggatatgaatcaatttaacttaccggtttcaatgttaagacaatactgtttttgcccaagaataccttatttctatattgcgcgaaatataacgcctgtagaaaaagagtggatgtctcaaggcattgaagaacacaagcgccaagagatgttatctaaaagaaggaatctctttaggtttggaattccaacgattggaaaaatttcttttaatgtggaactgtatagtgaccaattatctcttcatggcatatgtgatgcaattttgtctgctgattcagaattaagcatcattgaatttaaaaactcagattatgacaagttcactataggaactgcagtgcaactatgtgcatatgcaatgctatgtgaagagaagtacggtgaaataataaaacaatgttttgttctttacggaagcaaagggaaaaccagaaaagtgaacatcgatgcatctattagatccaaaactttggaaataagagatcacattattaaaaacctcaaaaaggcagacattccgccttctagcgcagaagaaaataaatgcggacaatgcgaattcttcaacttctgtgctgacaggttttaaaaatacatccagatgcttacgcagttgctggacttaatcttgatttttgatgatttcagctcgccataaagacgacttcaagaactttttcaatctatgattttattgtaaagtatttttttcgaaaaatatatttgtttcagtgcaaaaaataatatttcgaaacttacatcacattttatatgtgcaacatcttctttttaaagaattttatgttgcagcttcaattatagattgaaaaagtccttaactgaaacaagctggagaatgtcatccgcattttcactgtctccgcttcaattatagattgaaaaagtccttaactgaaactctttctcctgtctaaaaaaaatcaaaatttttgtgcttcaattatagattgaaaaagtccttaactgaaactctctaatagctctggcgatagagtactcataaggcttcaattatagattgaaaaagtccttaactgaaactacctttctatgtctaaagggattggtttggataccgcttcaattatagattgaaaaagtccttaactgaaactatcttccaatctgccaagaattaacatcatttaagcttcaattatagattgaaaaagtccttaactgaaactgttactgtaatggttttacctgagatagcgatattcttaagcttcaattatagattgaaaaagtccttaactgaaacgagtaaaacggcagacattgctaaagtgctctaagcttcaattatagattgaaaaagtccttaactgaaacttccattttttcatattacccttcacaaattttttctggcttcaattatagattgaaaaagtccttaactgaaactaaataaagttctcacctcggacaaatacaaagagcttcaattatagattgaaaaagtccttaactgaaacgtattctcatagcttgatagttacccatagctatgcgcttcaattatagattgaaaaagtccttaactgaaactataaaggcataggacgtatgcacttcaaatcaaagcttcaattatagattgaaaaagtccttaactgaaacgttcttcttgctccacatgattatcgtgctgttgttgcttcaattatagattgaaaaagtccttaactgaaacacggcttaatgtttgcctatgagagtggaatgctagcttcaattatagattgaaaaagtccttaactgaaactgctgataggtaaggtcggcacgaacagacataagacgcttcaattatagattgaaaaagtccttaactgaaacccgtcaactactactcatgattatgttgatcctatggcttcaattatagattgaaaaagtccttaactgaaactcttagagtttaagcgtcagcgcactttacttggcttcaattatagattgaaaaagtccttaactgaaacttaaccctgcattgaataaagccttactaagtacagcttcaattatagattgaaaaagtccttaactgaaactattacctgtatttctttctgcgtttgttgcaagcttcaattatagattgaaaaagtccttaactgaaacgtgaacagcgtaccgagtgatttgatcctctgtagcttcaattatagattgaaaaagagatcggaagagcgtcgtgtagg

SEQ ID NO: 122 - DNA, 24287 bp, synthetic construct
  misc_feature 1..24287: note = Synthetic
  source 1..24287: mol_type = other DNA
ctgaacaagaagatggatgacctttctatggataagctcttggtcgatgagctcgaagagtacaaacgtcttcttgatgagattgacgctgaagtcattcgcagcgcagaggcagaagaaacgcagcgggaactgcagaaacggattgagtcctctcgctctgctttattagacgttcaaaacgtcattgccgctcttaaaaacgaggagcttgccgtcacgggcgaactttccatgaaggagcgcatgctttccaagtctttaggaatagaaggcgtcgagacgctggctgcggaactggacaatcagaatgaacgcttaaatgccctagacgcgcttcaaggaagaattgttctcttggcagaaggacacgaccgattcaatcaggtaaaagcagggctcgagagcaccaagcacgccttgagactcgcgacggttgctttgaatgcggctcgccaggcctatatcgacaagacagccgtcgtcaattcagctcagcaggcttattccttctatctcgaagtactgtcgctgaatgaaccgcgcgaaaagttagccaacggcaagccgtgtcccttgtgtggcgcgattcaccatccctactccgtcaaactgccgtttgaccgttcgttggaagacaaactcgctaaagcaaaagaagacgctcagctcgcgctcgtcgaatcggaaaaatgcaaagctgaatttgcgcagcttcagctgcagcagacagaagccgaaaacattctgaatacgcttacgacagaactcaatgaagccaagggcgagattttgtatatcgcgagcgagctcaatattgtcggcttgagagagaagaaaccgatcacttgggcggctgtactcaagcaaaaacaaacttctttagccaatcgtcgagatgaccttgaagcacgattagagaaaattcaagggctcacggaagcgattgaatcgctgaaagaaaagcgcgaagatgcagcgcttaaaaccgctcgtaaaaaagaagaacaggcgtctttggaagaggctttgaagaacttcgccaacatgtctgccgagctagaaaagaatcaaaaagactctgaacttaatcgcgtctccctgacgcgtttgctcgagcgagcctttgcccgcttcggcctgaaggcctctaacccggccatcatgaagcagaaccttccaacgctcgaaaaacgccgcgaacagtggatcaactggagcgtcgagaaaaaacagatcgaagaagaaacagcggagagcgaagaagccctccgaaatactgtcgcgtctctgactgctcagaagaagagcgcagaaaccttagaaaaggacatcgaggctctcactgaacagatcaaacggttccaaaaagaacggcatgaagcaattgccagccagacaccggaagaagtaattgccgcgattgaaacagaaaaggccaatgccacacgtcttgccgaagaagctaaattaagtcttgcttccaaagaggaagccttgctttctacgcagaacaaaattaatactctcgaagcacatcgcagcgaaaccattaaatccattgaatcgctttcggacgctttcaaccaaaaacttcaaaaggccggtttcccgaacgagtccagcttcctttcttctcagatctcgactgcacagaaagatgacctcatgcgtcaaaacgatgaactgctcgaaaggtatcgtgtcgtaaattcgcagtacgaagaaaaacagcaggcattaaacagtcttcaggagaagaacctgacgacgcgcactcgtgaacagctcgaagaagaactcttagaaaaatccgatctcttccacacagccactgctcagctcacaggcctacgtgagaagatggcaaaaaatgcgaataacaaaaatcgccgaaaacgggaagaagcagaattccaaaagctgcagacctcgcttgagcgatgggaatctctctgcgccaatgctgaggaaccggggggaattgcgcgtttaggtttgtcgcttgcagtcgcctacggctcttcagacattgatgccttcatccccggcgccaagatcaaactccgtgatgaaggtgtgaaattatttgcacccgagctctcggacgcttcaggtcttgcgggcatgaagacaatttctgccgatcagcgtttcttcgtggcactttctctgctcttgggaagaagcgaattgtttgcccgtcgaagcaaacctgagtttgtcattcttaagcaaaatcagaatgaagctttcccaagccagacgtttacaggtttagagagcttaaatttaacaatcggcgtagcgagataagccgttactcttcgacgaattcaatgagaagagctccgcgcgtgagctcttccaattctttagcaaaagtctcagcgagatcctcggggatttcgacatcaaaatccgcacccatatcaaaattcttttctagaattcgaccgtttacggcttcgatcttgcgcagaacctgattcacaaatcgatgttcaacgctgaatttgatgcgtttcgttttggtacgaactcgcgtgggcactccctctaacgccattttgacggaagactgataggctttaactagtcctcccgtaccgagcaaaattccgccgaagtaacgagtcacaacaacggtcacttctccaatgccgctgtgcgtaacagccgtcagcatggggcgtccggcggttccgtgaggctcgccgtcatcgcttgcgccgatacgatcggtagatccggcggctccggcacaataagcccagcaattgtgccgggcatcttcaaattcggctttaatttgttcgatgaaagcttttgcttcttcgacaccgggagtgtgtccgacagaagcgataaagcggctgcgctttatcgtctgttcgacacgaaaaacctctcccggacgcaggtccggaatgttgtagctgacatctgccatccggggactctctttatgtgttacttgtgaagcttgttcactattttaaagagagtttcgttttccatgacaaggggagaatctttggcaaaaaacacaatgccgtcttcgggtgcttcggtctgggcgacggtcacgccggtaagcggatcaatgatgtccgcaagaacttgtccgcgttcaacggaatcaaaggatttcacgtgcggaatgtaaagaccggaagcagttgaacgcagcgacaccagctcttcttctataagaacggtcgattcatagccgccgtaaacgttgtaatttaaaacgttcattcggcttaagaagcggcaaaccgccgcaatcgccatgtccgcacccttcttatcgatcttctcggtagaacggctgtaaagagaaaaggcttttgtatcccacacctgccagttgaagtttaaggttgtggtatcaaagggaacgggtttgcgaagaacgacaaaaggcattccgaaaagctgagccaagccagtgtcctcataatccgtcttcatcatgcgcacatgagagacgaagtctccgggcatataaaaagaggaaaactgcacgccgaagcggtagccctgaatcttttcaaaaataccggcagctattcgctgagtagtctcacctttgttgtatccgggatacattcgattgatatcggagttatccatcgcccagaagcgcttaccgacattaacggagtacggattggcacacggaatcaccgtcacaccgtgacggcggataaaccgcccttcttcctcaaagcgctttaatgttcgaaccatttggccggcaatatagagctgctgaatttcattgccgcgcatattgccgataatgcacatggtcttttcagggccgccgaagtgataactttttacttcaaagtcttcgcggtaggccgactccattctgaaaataacttcttctttcatcgacgttcttcctgaagaattcgggcaatcagagaccccttatttacgataggatattcacgaagcgtgaagagcaaaccatcgacttcggagacgcattcctgacgaacctcacctgaaagcgcatctacaattcggccaaaaatctcgcctcgtctaacgttatcgctgtggcgaaccgtcgggacaaacacacccggctcttcagcattcacaaaactcacggagcgatctaaggaaacgatcggctgtttaacaggctggacggggccgtcccacataccgagattctgcataagattcagaattccgttcacaagccgttgacaataatcctgagtaattctcatgccgacgcccgcctctacgacaagagttttaacgccgatggaatttaagctgtaagccaacgttgattcgagcacagtagaagcttgatgcacccaaacaaaatcgacatcgagcatgctcgcgtatttaacgagtttatctgccgtattgatattgacgcgaacctggggaatctcgcgcaggaagatattgctggcgtgaatatcaatcgccatttctgcgcctttgaattcctgaatcaatttgcttgcaacccactccgtcgccgctccgtcggtacgtcccgggaaaatccggttcatatccaaatcaaaaccgggaaatcctcgctggatcgtatcgatgcccatcgggttcaatgccggatagacatccaacacccctttaaggtgctcactcttttcacgaacgactttattaagcaaataacaaatgtactgtccttcaagctcatcgccgtgaattccggaaacgacgcaaagtcttttaaggccttctgctgacgcaacgttatcaggcaagtggcggttcttgcgaatcaccaaagactcgccgaccggcatctttacttttatgacgtcttcaatcattctcaaatttcaaccaacttacactttgccgacatactttgatccgctgcgcccataaagacgcctctttctaaagcgcaaaaactaaagtctggtccttgtgaaatcttgacgtaattatcgtcacagaatctctgatgcgtaggatccactccgatccatgtttcaccgtcaaaaacttctacccaagcatgagaagcaccttcaccggtggtcagtccagcaacgtagcgacaaataacgttctgagctcgtaagaaagcaagaagaatgtgcgcaaaatcctgacaaactccggcgccgagctcccacgcttcatgggccgcagttactgttgtcgtaacgcctttttgatagcggaagtctgtaccaatttttgttagccagtattcagcaagggcgatgggtgcgccttcaactttattggcttcaaaataatctttgagcgtgccggtcagcgtcgtaagctgagtcggatatcgatagtaggcagccgcaccgaaactgctgcgctgcgaggaatcgaccaatacttctcctgtcgagcaaaaagaaaagaaggtatgtttattctcgatgctgcccaggaaaactttattgccttgtccgtcaaaggtttctgacagccggcagcccggctgacaggttaaagagatgcgcatcggctcctgtcccggctccgagagcgggacagagcgaagcacaaatgtgtgattcgaaacgggttcggaaaacaacagatccgccctaagcgaatacaaaaattttttcattgtatcgagtttttaattattcaagagcttctgaactgtttccaaagccaccagccgggtctccggatcatcatcagctaactgggcaaaatttttcagaacacgcattttttgaccgctgtaggcaatctttgcgccctgtaatctgcgatccagtttaccgatcgtcacgccgattgtttcccagctttctcccaatctcagctgcatgtccaggcgctcaaggtaacggccggctttaacgagacagcgttcttgacctgaagagagatattcgtcaatactgccccagaaagccaacaagcgatcgatgacttcaaaagaacacagagctccggaaccttctgccttcgcatcttccatcgcatcaagtgccagctgaatataagccaaagagcgagtcgagatggtattccgcagcaaaattccgtcgtcgtaggctcgagaaagattgctgtacaccgaatcagggttgagctcgtcgaagaagtaactcgtcataaagtcagacgcatcttcgtaaacatcaggaatgtttaaagcggcacaaaattctttataagccgtctcatctgtatcaatcagaacatcatagaggccttcgagataattcagcgtacggtagacacgttcaacgtagcggccgagccaaaataagttttcgcctttttctatcgagataaaatccatgtgtctttaaagcctccgccttgagaagagttaacgacgaacgaatccggcttgcgggaaaaacgagtaagaccgctgtgccaaactttcgttccgttggttgaactaatgacaaatgcacgaagatcgcatttgcgctctacgaccgttccgtcttcgagaaccggcaggtcaataaagtcgatcacttcctgaagaataaagcgacgtgattcagtctgaattcttactttccaggcttcaagctcttcttggtttaaatctttaccaaagagaactccgtaaccgcctgcttcggcaacatctttaataactaagcgttcgatgttcgccagacagtactctctgtcttcttcgtagaaaggcagataagtcggtgcgtttttgaggatcggttcttcgcccagatagtaacgaatcatcttgggaacgaagtaataaatacccttgtcgtcggcaacgccatttccgggagcattgataatcgcgaggttccctgcccgataggcattcataatgcccggaacgccgatgagtgattcaggtttaaaggtcaaaggatcaagatagtcgtcggagattcggcgatagagagcgccgaccgactgtggagaacccgatctgctcttgaaatagagcttattgtcttgtacgaacaagtcattgtgcataaccagaggacatccggtcatctcagccaaataagcatgctcgaagaaagcagcgttgtaccttcccggtgtcatgatgacgcagcggccgccgggattcacgctttccattgcttctcttaaaaggagtccgtaatcatcgttgcgatcgaccgagttatttttaaatgtctccggcgaagcacggcgagcgagttttctggcaattaaaggataggaagcgcctgaaggaatgcgtaggttgtcttcaagaacgtaccaagttccgtctttagcttggacgaggtcaatgcctgaaatatgagagtaaattccgttcggcggaacaaagttgtcacacgccggcaggaagcagcttgacgaaaaagcgaagtcttccggaatcacgccgtcagcgacaattcgcttttccgtgtagatgtctctcaagaaggcgttgagcgcatcgacacgctgaatcaagccggcttcaatttcagcgaactcatccgcaggaataattcgaggaagcgaatcgtagggaaacagctgctcatgaaactcgccgtttttatagataccgaacttcacgccaaagcgcgcaagaagcccgtttatagcggcgggattggatatcagagaatccattatttctccgtaaatttctgaggttgttagatattcttcaaaaattatatgagagaggagaaggccgacaccctttaatttgcagaaatttcagttggaaggaaatgaggaagggtaattaccaaggaggattgtattaatccacatctaacttgaggacagatctaatctaaaaacgccaaaccggctgttgacgtgttcacatcaatgcaaccggctttttaaacaaaaatgatttcaagttgctttgtgtagaaagtgttaggcggcttctttatctttagcttttttcagattgttcattgcataggcagcgctgttaacgatttttacttcgccgttttctacgataaacgtcacattagagcgatgaccgttttcgatgcctaaaattttcaaaatatgcttcggcagagtgacctgtccgtcgacccaaacgatcgaatcagaagagaaattcgcagacatattgatcctcctttaattttcacctggccgacagaacattttgttaatcctttgacctaggaaaatcactaattccctcaaatttcttacctatgattttacctgttttatgtgattatttagatgtaaaccctaatctgagtaaaaaaacgaactcgtttctacgaagagaagaaacaattgatatcgaagacttgaagaaagaaaaaagcagctttttgaaatttatattagaatgcgacttcttggcggcccgatggtgaaattggtagacacaagggacttaaaatccctcggcgcaagctgtaccggttcaagtccggttcgggccaccaaatcaccctcttctcctcatcataattttcttccctcacaatatttgttggggtcgctcaaccgtttggttcatcacaagaatcattgaacgttattggtctatgcattttcctgaaacttttgggaaatgcgaaccatctacagctccctgcaccatttcagaaagaccacagtccaaacctttttcctagcgaatttaggggattcttctcactttcccaacaaaaccgttacaacagacaaaaataaaacctaattttcgaaacattcgaaaatcttcggaaagtaaggctaacgcgataaaaaaggaattgctttgaaaccaaagtaaattccttctaatggcttaactgaatctatgtcggttcggtcaacacaaaaagcctcgaatagaggctccttgttaatccggataaggccaagaggcctcagtagccggatctaatatttaatcaaattgatttcagctcgccctaaggcgatttcgttgttaaaagaatgtaactagatattgccacaactatcaaaaacagtcaagcaatcaccccaaattttcgaaaataatggcactttttgtgcagatcgaccattttcgaaaaacagaccagaaaccaactgtcaaaaatcgtttattttcaatcagttggtttcggagcttcaatcgtacattctttcaataacaactgaaacgtgattcaactgattttttaattccgtctctttccgcttcaatcgtacattctttcaataacaactgaaacattatcacgctattatctttaacctacctcctctcggcttcaatcgtacattctttcaataacaactgaaactcttggacgctttcttaagacgttctaataatgggtgcttcaatcgtacattctttcaataacaactgaaacgttccatctaaatctaattcttcaagattttcgaggcttcaatcgtacattctttcaataacaactgaaacaatcgtcacgctgtgtggtcgtgagattgacgccgggcttcaatcgtacattctttcaataactgaagcacatactattgccggaatccacacaaaaagggcgtcgaagcacccttgcatgtaaacgaagacatcaagtcaaaaacacgaagtagaaactaaaagaaattaaaagcagaagcaataaaaacataacaaccgagaaaatagtggctaagccattaagcaacccgtctatcaatgccttaaaaaatcgcacaataagtcacctctccctttgttacgcctctttccttcttactctttcgatccaatctcagttcaaagagaggatcgttccgtcattccaaaaaagggaaaattccgcccctgaccaaactcagcctaatttttagcagatagtcaaagtcaggaaaatagtttcctctttaattgcgtattctttcaacagaagtcgagaaatgcagctacaaagcattcaaactgtttcgacccacattcttttgaaaaatggactcgtatttgtggactcactgaaataaatatattcaaactttctaattcaacctataattttgtaactaaataataaattcttgaggagggaaaatggggaaaactcacattattggcgtcggtcttgacttgggaggaacctataccggcacttttataacctctcatccatctgacgaagctgaacacagagatcattcgtctgcctttaccgtcgttaatagtgaaaaactttctttctcatcaaagtccagaactgcagtacgacaccgggtccgctcatacaagggattcgatttaagaagaagattattgcttttagttgcagaatatcagcttctccaaaagaagcagacattagctccggaagaacgcgaaaatctccgtatcgccttgtccggctacctcaaaagaagaggttacgcccgtacagaagctgaaacagacacatctgttttggaaagtctagacccttcagtattttcctccgcgccgagtttcactaatttcttcaatgattcggaacccctgaatattcagtgggaagctatcgcaaactctcctgagaccaccaaagctctcaataaggaattgtccggacaaaaagaggcagactttaaaaagtacattaaaaccagcttccccgaatacagtgcgaaggagattcttgccaattacgtcgaaggacgccgcgctatcctagacgcctcaaaatacatcgcaaatcttcagtctttaggacacaaacatcgctctaaatatctcagcgatattcttcaggacatgaagcgagattcaagaattacacgtctatccgaagcatttggctcgacagataatttgtggagaattatcggcaacatctctaatctccaagaacgtgcggttcgctggtatttcaatgatgcaaaattcgagcaaggacaagaacaattagacgcggttaaattaaaaaatgtcctcgtccgcgctttgaagtatcttcgatcagacgataaagaatggtctgcttctcaaaaacaaatcattcaatctttagagcagtccggcgatgttttggatgtgctcgcaggtcttgatcccgaccgcaccattcctccatacgaggatcagaacaacagaagacctccggaagatcaaacgttatatctgaacccgaaggctttgtcttctgaatatggagagaaatggaagtcttgggcgaacaaatttgccggcgcctaccctcttctcacagaagatctgactgagatcttaaaaaacacggatcgtaaaagcagaataaaaatccgatcggatgtcctgcccgactctgattatcggcttgcctatatcttgcagcgagcgtttgatcgaagtatcgctcttgatgaatgctcgattagaagaaccgccgaagacttcgagaacggagtcgtcattaaaaacgaaaaattagaagatgttctctcgggccatcagctggaagagtttcttgaatttgccaatcgctactatcaagaaaccgctaaggcaaaaaatggtctttggttcccggaaaacgctttgctggaaagggctgacctgcatcctccgatgaaaaacaaaatccttaatgtgatcgtcggacaagccctcggcgtgtcacctgcagaaggaactgactttatcgaagagatctggaacagcaaggtcaaaggtcgttcgacagttcgctcgatttgcaatgcaatcgagaatgaaagaaagacttacggtccttatttttctgaggactacaaattcgtcaaaacagcactaaaagaaggcaaaacagaaaaagaactctccaagaagtttgctgccgttatcaaagtgctgaagatggtcagcgaagttgtcccctttatcggaaaagaactccggttgtcggatgaggctcagagtaaatttgataacccgtattctttggctcagttatataacctcatcgaaaccgaaagaaacggcttctctaaagtctctcttgccgcccacttagaaaacgcatggcgtatgacgatgacagacggctcggcacaatgctgtcgcctccctgcggattgcgttcgtccattcgacggatttattcgcaaagccatcgacaggaattcttgggaagttgctaaaaggattgcggaagaagttaaaaagagcgtggattttactaatggaaccgtaaagatcccggtcgccattgaagccaactcttttaatttcaccgcctctctcaccgacttgaagtacattcaacttaaagaacaaaaactgaagaaaaaactggaagacattcaacgcaatgaagagaatcaagagaagagatggttaagcaaagaagaaagaatccgtgctgacagtcacggaatttgcgcttataccggaagaccgctcgatgacgtcggagaaatcgatcacattattcctcgcagcctgacattaaagaagtcagaaagcatctataacagcgaagtaaaccttatctttgtcagcgcacagggaaatcaagagaagaagaacaatatctacttactctctaatcttgctaaaaattatttggctgccgtcttcggcacctctgacctgagtcaaattactaatgagatcgaaagcactgtgctccagctaaaagctgcaggcagacttggctatttcgatctgctttctgagaaagaaagagcatgtgcccgtcacgctttattcctgaactcagactccgaagcccgtcgggcagtcatagacgttctaggttccagaagaaaagcctctgtaaatggtacgcaagcttggttcgtccgctcgattttctctaaggtcagacaagcactagcagcctggactcaggaaacaggcaatgaactcatttttgatgccatttcagtccctgctgccgattcgagcgagatgcggaaacgctttgctgaatatcggccagaattccgtaaacctaaggtgcaaccggtcgcttcacactcgatcgacgctatgtgtatttacttggcggcgtgctctgatccttttaaaactaagaggatgggatcgcagttagctatctatgagccgattaatttcgacaatctgtttacgggctcatgccaagttatccaaaacactccaagaaacttttctgataagacgaatatcgccaattctcccatcttcaaagaaacgatctatgccgaacgattcttggacatcatcgtctctagaggagaaatctttatcggctatccttctaatatgccttttgaggaaaagcccaatcgcatttctatcggaggaaaggatcccttcagcatcctcagcgtcctgggagcttacttagataaagcgccaagcagcgaaaaagaaaaactgacaatttatcgagttgttaagaacaaggcgttcgagcttttctctaaagtagccggctccaaatttaccgctgaagaggataaagccgcgaagattctagaagcgctccatttcgttactgtaaagcaagacgttgccgcaaccgtttctgatctcattaagtctaaaaaagaactttccaaagactcaattgaaaatctagctaaacaaaaaggctgtctcaaaaaagttgaatactcttcgaaggaatttaaatttaagggatctcttattattccggcggccgttgaatggggtaaggttctttggaacgttttcaaagaaaatactgctgaggaactcaaagacgagaatgccttgagaaaagcattagaggctgcttggccctcttctttcggaacaagaaatcttcattcgaaagcgaagagagtattcagcctacctgtcgttgctactcaatccggggcagttcgaatcagaagaaaaacagctttcggagacttcgtttatcaatctcaggataccaataatctttactcctctttcccggtgaaaaatggaaaattagactggagctctccgatcatccaccctgcactacaaaaccgcaatctaaccgcttacggttaccgctttgtggatcacgacagaagtatttccatgtctgaattccgagaggtttacaacaaagatgacttgatgaggatcgagcttgctcaaggcacttccagtcgccgctacctacgcgttgaaatgcctggagaaaaattcttggcctggttcggagaaaattctatttctttaggaagttcttttaaatttagcgtctcggaggtttttgacaacaaaatttatactgagaacgcagaatttacgaagttcctccctaaaccaagggaggacaataaacacaacggaacgattttcttcgaattagtcggaccaagagtgattttcaactacatcgtcggaggtgcagccagttcgctgaaagaaatcttctcagaggccggtaaggaaaggtcatgagacacctaacagtctcgggatttggcgatttcctaggtgttcacggaaatcgcctgatcgtacgcaacggcgataacgtaatcctagaaactgcgctttccagactcagaaccatccgaatcgataaaagcgtttccttatcttctaaccttatcctggcctgcgcagcaagaggtattcgaatctactttctcgactggaaaggcgtaggagttgtcgaagtatccggcatgcaccgccatgccgtcgtcggcgtcagaaaatcccaattcgaatgcctcaaatctttgcaagcccagcttctggctaaggaaatcattttttcgaaaatccgaaaccaacgggccgtcctcctttatttcagcaaatacctcatgaaaagagaaacggcttacggtcttttacttcggaatgccggaactcgattagaagagatcagtaacttactgaacactcgagcctcaggccccgactggaagaatacggtaatgggactagaaggaagcgcttcactcatttactggaacgctttaaaagaagcaagacttttgcccgagacgttccaagaacgcgaaggaagaggcagcactgaaatcaccaacgctgcacttaactatgggtacgcaattcttcatagttatattcaaaatgcgctaggcaacgccggtctggagatctacgccggactgctccatgcagatcgagccggaaagccatctttggtacttgactgcattgaggagtacagagcgtgggtggtcgatagaaatgtcatcagtctgagatgcaagcttggttctgagcaaaactttttggacactgcgctgaagaaacaattggtggaacttatcgataaaacgatgagcacaaaaatcaattactcacagaagcaatgcaaattagagaatgctcttcaacggcaggtctataaacttgcaggagctatcgtagaaggcaaacgctatcgtggtattcgattcaaatggtgagttatgtacacacattttttgatttgttacgacattcccaacacgccaaaacgcaccaagtttgctgaaatgctgaaagatctgggacttgtcgccttacagaaatctgtcttctatggggcacttaccgccacagaaaggcatgctttggacttctcatctcgaaagctccttggagcagaggataaatgtctttgtattccttgcgtcctgaaacctgaagagttcaagaaatcaattggttacgaggattttgaatacagcgagcccgatagctatggattcatctaaccgcgaaagtctacctgtttcttacatacgacaattttgtttttgtccgagaatcccttttctgtccgtatttttggagattaaaccgccgtcacctttgtgggtccaagacggcgtggactttcatgaaaaggccgcgatgcttcaaaaaagaaggaagctgtcaaaatttaacttgtcgggaaaaggagtgttcaagtcaaacatttatttgaagagctctgtttatccgattcatggaatcgccgacggtatttttatcatggaggatggcgagattattccgcttgaattcaaggctcaggacaattttgtcgcttctcgcggacacattcttcagctaaccggctatgccattcttctagaggagaaattccaaagagaggtaaagcaagggttcattctttacggcaagaaaggcaagagcctgcgcgttgaattcacggaagaaagaaaaaagaaagtgatagaaatagctcaaaagattattagtagtttcgaaacaggccttcttccagactcccccgccacttcagcacaatgcgggcaatgcgaatttttgaatttttgcggggaccgcttctagcaacacaaaaagcctcctcggaggctcttcgttaatccggataaggtcaaagacctcagtagccggatctaatatttaatcaaattgatttcagctcgcccgaaggcgacttcgttgttaaaagaatgtaattaaatattgccagaaatattctaaatagtcaagcaatcaccccaatttttcgaaaataacggcacttttcgtgcaggtcgaccattttcgaaaaacagctccgaaatcaacctatcaaaatcctttgttttcaaataattgagtccgaggcttcaatactacattcttctaacaactactgaaaccatgccatgtagcgaagactgacgccacgctttctagcttcaatactacattcttctaacaactactgaaacagatgagaatctgattgattcgattccggttctaagcttcaatactacattcttctaacaactactgaaaccagaaagggccgtctgtcgaggttggactaactgggcttcaatactacattcttctaacaactactgaaacatatagtgtgctgatgaccttacagagttagacccgcttcaatactacattcttctaacaactactgaaacgcgattagaccgaacaacttgagtgcgttgtcattaagcttcaatactacattcttctaacaactactgaaacatatagtgtgctgatgaccttacagagttagacccgcttcaatactacattcttctaacaactactgaaacgcgattagaccgaacaacttgagtgcgttgtcattaagcttcaatactacattcttctaacaactactgaaaccaaggagtctcagagaattaacctcaagatcattgagcttcaatactacattcttctaacaactactgaaacgagatcaattcactttcgtgattattccggcggaagagcttcaatactacattcttctaacaactactgaaactcgaatgacggggacggcccacgaattgccgatagcgcttcaatactacattcttctaacaactactgaaacgatacattgaagtttttaaaagatccgcctgtcacgtttcaataactattgaaactccagtcctcggcgttgaactcgaactctaaggtttcaatactacattcttccaaggattactggaactgtctagtggcgtagccagaatctttttctaaaaagtctccgaatcacattcttctaactgtcgctgagaccaaatattcggcgtccaagagcgagacaaactttcgtttacaccctactccacttcggtacaatcatccacgttgtaaacaaatgccactctcgtcaaaaagatagttgcctaatctttgtcagtttgcgaaaaactcgctctcgcctttctggaatagtggatgagaaacggatgcttcgagggaacggcaagaaaagcaacagcgccaagaatcgatgccccgccaatacactcccaagaattaacgctcaccccaagaaatatcatgctcagtagagttgcagctactgggtcgaaggtctccatcatgccggcaatatctgccgggataatttcggcagccgcttgaaaaagccaaaacgccgcaatcgttccgaaaagcacaataaacgcataagccaaaattgagtagacggtccagtccaaaggttcgttccaaaagtgactgaacaacgtcacagtaacgccggtaagcaaaagtgcccagctcgttgctaacccggaaccgacacgcgcaataaatttttgaggcaacagaacataaaaagcacctgtgattccagatccgataccggcccaaaagccgatacctgagacgttgaagtttttaaatgatccgccggttacgactagaaccactccggctacagctacaagtccgcaaaaaacttctttcacagtgagccgtttatgctgaaataccaccatgaaaatcatgatccacaatggaacagttgcagttaaaacagcggcaaaaggtgcgtttgcgtattgaatacaaacaaagaacgttaattgcgttccgataattgttaacgtgtaaattatcagatcgataatgttctgcttggtttcaaatactttcagagcccccttctttaaaagaaagaactcaatgccaacgaagatcgagcctgcaaggagcatgcgtatagagatcaaatccatcggtgtaaagtgacaattttgaagtaaatactgtcctgcaacacccattgatccccaaaaaacagccgctagtccggccatcgccatgccttttaatgttttattcatcctcgtctcctctggttcttgagtttgccagttttgtgatgggatagaacgagttcctactctttttaagaaatcctatttttcagaaaattccttacttttttcagcaagataaaagccatgaataatgcgaaaattcgcctatgaatttcgataactatcgccgaatacttcacctcgacctcgacgcttttttcgcttccgttgaacagcgagataatccttcgcttcaagggaaggcaattgccgtcggattaaattccgctcgaggtgtcgttgcgtctgcttcttacgaagcaagaaagttcggagtacgttccgcaatgccctcctcagttgccgcaaggctatgtccaaatttgatttttgttcccggacgaatggacgagtacaaaaaagcatcagccgaagtcttcgaaattttttctcgctacacaaatctcattgaacaagtctctatcgatgaggcattcttagacgtcacagacgtctggcgcgactatggttatgcgatggaaatcgcaaagctcatcaaagaagatgttcgtcgtgaagtcggtctcattatttctgccggcgtttcctacaacaaattcctcgccaaaatcgcaagcgactggcgcaagcccgacggcttatgcgtgatccatccgaatgcggcacttaagttcattgatcgtcttcctgtgaaggctatttggggcgtcggtccggtgacctcgcaaaagatggaggccctcggcatctttaccggaaaagatttgcgagaaaaagatctttcatttttagtcgagcaattcggcagttcgggactgtcgtattacaactttgcccggtgtattgacgatcgtcctgtcagaaccgaacgcatccgcaaacaggtcagcgctgagatcacgctctccaaagacgaaggaaatctcaataagttagaagatacgctctcggaactgacggactatctgatgacgcgtctgcgtaaaaatgatttcctcggtcgctcgctgacgttaaaagtacgtttccataacttcaagacaatcacaagaactcagacgtctaactcagtctttaatgagaaatctcaaatcctcaaaacagctgagtctttgcttgaaaaaatcgatttcaaccatcagaccgttcgcctcctcggaatcgccattggaaaccgcctggaagaagacaccgaaaacatgttgaatctcggcgatatggacgagcttacacccaggcttctttaaggcgccgacggacttgactgagtcgagacgcggagcgccgtaaaaattgcaaaggtctgaagaatcgcaacaccgaaaagaacggctgtaaacataccgacgtcaagaagcggtccaaacaaaatcggtgtcagagactgacccacatccattccgcaataagtaaaaccgtaaacgcggccaaatgatttctttcctaacttcgcaaccgtcgctccgcgaatcataatgtctcggctcggtgctgccacacctgttcccagacccatcagacacattagaacgactgcccaatacccggtcagaatctgagacgccaaaatagctgccatcacggcagcaaacgtaaggcacagagcaacaacacgattgctcgagatcttatgctgattcgttaaaaacccgccgatcaaagcgcccgcgccggcgcccaagagataagctgtcagagccgccgaagctccggtcagattcaagtgataggcattcttgaagatcgtctgcgaaaagctttgaagaacgccgaaggccccagacgtaaagaagaaaaacatgaagcagtaccatacatccggcactcgcagaaatccgaaagtcccctcttctttctctttcggagtcggcggtgtagtgtcacgaacggaatctcgagagaaaacgcctctaaatacaagctcgatgacaagaacaatcagcgctaccgaagaagctgcaaacgccgcacctctccagccgaacaagcccgctgtcgttaccatgaagaaaggacaaattgcccagccgatattgccggtgatgttatgccaggcaaaagcgtgacccaagaagcgatcacgaatgttgtagttcatcagcgaataatcgctcggatggaacaccgagttgccggcgccggccagcatcgccgagagataaagcatcggcacattttctgccatgcctaaagccacggcactggcaatcagcaaaaccaggcctgtatacattgaggtccggccgcccactttatcaaccagaaagccgctcatcgactggccgactgcgctcgtgacaaagaacgttgtcatcaaggttccgccctgaaggaaattcattccgaagtgcggaagaatccaagggaacaacgacggaatcactaagtgatagaaatgagagctggcgtgggcgatcgaaacgagaaaaatcgcgaggatgtcgtgaccgcgagttccttgtgcgtacatggcgtggcttaagagtgttttttcttattctatccctcgcgtcttccaaaataagttagggccgagagattgttggtctctcagcctcttaactcagatttgatcagacgatcttatcgattgtctttacggtcttcaaaaatgaattttccgtcaacatagtccacaaacaccgtgtctcccggagcgtatttacccttaaggatatccaccgcaatctggttctccagatagtcttggacagcacggcgcagcggacgtgcaccgaacagcggatcaaagccgaccttaccgatttcgtccagagccgcttcggtaacatccaaaccaatattctgctgctccatacgtttagcaagcttacggatctggatacgggcgatttcgcgaatagccttctgatcaagggcattgaagacaacgatttcatcaatacggttaatgaattcgggtctgaagtgcttcttgacttcgtccattacggcttccttcacaacttcaggatcttcaccctgacggttcataatttcctgagaaccgaggttggaagtcataatgatgacggtgttcttgaagtcaaccgtgcgtccctgaccgtcggtcatacggccgtcgtccaatgcctgaagcaggatgttgaagacatccgggtgagctttttcaacttcgtcgagaagaatcacgctgtaaggtttacggcgtacggcttctgttaagtagccgccttcttcatagccgacatatcccggaggcgctccgatcaaacgagccacggagtgtttctccatgaattcgctcatatcgatacggatcatggcgtcctcagtgtcgaacaggaattcggccaaagccttggtgagctccgtcttaccgacgcctgtcggaccgaggaagaggaaggaaccataaggacggttcgggtcggacaggccggcacgagaacgaaggatggcgtcaacgactttatcaaccgcttctttctgtccgacaacgcgcttgccgatgtacttggccatatccaaaagtttctggcgttcgccttccatcatcttggagaccggaataccggttgcgcgggaaaccacttcagcgatttcttcagcgcctacctgcgtacgcaggagcttcggtttttcatcgtagagcttggtttcttctttttcttccttcaccagctgtttttcaagttcgggaagtttgccgtactggatcgcagcgagttcttcatacttgccggaacgacgaagctcttccatcttggtcttgagcttgtcgatttcgtcacggacttctttagatcccaacgcggcgttcttttctttcttccagatttcttccaaatcggaatactcgcggcttaacttagcgatttcttcttccaaaccgctcaagcgtttcttgctggcttcgtctttttctttcttaacggcttcacgttcaatcttcaattgaatcaggcgacggtccagcttatcgagttcttcaggcttggagtcaatttccattttgatgcgcgctgccgcttcatcaatcaggtcaatagccttgtccggaaggaaacgatcggtaatgtagcgggcggaaagttcagcagcagccacaatcgccgggtcggtaatttcgacaccatgatgaacttcgtacttttcctgcagaccgcgcagaatagcaatcgtgtcttcgacgctcggttcgttgacgatcactttctggaaacgacgttccagagcgggatctttttcgatgtactttctgtactcgtccaaggtcgtcgcaccgatcacatgcagttcaccgcgggaaagtgcaggtttgagcatgttgccggcatccattgcaccttctgtcttaccggcacctaccactgtatggatttcatcgataaacagaatgatacggccttcttcggcaaccacttctttcagcagtgctttcagacgttcttcgaattcgccgcggtatttcgcaccggcgacaagtcctgccatatcgagacttaagacgcgtttgttgcgcagtgtgtcgggcacttcaccgttcacaatacgctgtgctaagccttcaaccactgcggtcttaccaacaccgggttcgccgataagaacaggattgttcttacttctgcgctgcagaatctgcatcgcacgacgaatctcgtcatctcgcccgatcacagggtcgagctttccttctttggccttttcggttaggtcaaccgtgtatttctttagggcttcacgattgttctcagcttcgggattgtccactttttcacctccgcgcacggataaaattgcattttctaggctcggtttattgaggccttcctcttgcgcaaggtgtgcggcgtcacacttgctgtcgcataaagctaaaaggaagagatcggtggaaatgaatttatcgccgagtctttcggcctccctttccatcgaattaagaattgccatcaactcacggctgatttggacattgtcggcagctccggaaacttccggcagtttgccgatcgcttccttcaccttacgttcgagttctctgactctcacgccggagcgctctaagagcgtccttccggtgccctcggtgtcctttaataccgcaagcagcaagtgaagcggatcgatgtactgctgggaacgctcaacagccatcgattgtgcttctccgagcaactcttggaaccgagttgtaaattgatcttgacgcataagagtttgaatctccttttgttaaggaaacattcggaatcaactcctgttcccctatgcgtctattctgaagagtccgcggagacggacgtgcgtttttctcttattttgagcttatttggtccacctggattttgcagcttcgtcggtctctttggcctgtacccaacgggtgccctcgcccaccttttccttcttccagaacggggcttcggtctttaagtagtcaataatgaactcgcaggctttaaatgcttccccgcgatgggcgccggaaacgccgacaaaaacgatctgatccgtggcgaataattcgccgacacgatgaatcacggtcgcatccataatgtcccagcgcttctttgcctcttccacaatggccgtaagggctttttcggtcatgccgggatagtgctccagcgtcatggaagcgacctcgtcaccttcgttaaggtcgcgaaccgtgcctaaaaacatcacgacggcgccgactttgggagacgcatgcagtgccgctacttcagcctgaacatcaaagtcttctgtttgaactgcaatcttcattgacgcctcttataagttgaattctgtgaatgggatgtaggtcaccaaatcgcccttcttcaagtcagcttcagccggaatgtcggctaagccatctgcccagg

SEQ ID NO: 123 - DNA, 23045 bp, synthetic construct
  source 1..23045: mol_type = other DNA
  misc_feature 1..23045: note = Synthetic
cggcgacaacggataaataccttgtggcagacaaggccacgtttgatgaaattgaccagcttactaagacagactcgctgagccaaatgccggtatcaaatcctggtttcacaaaagctcgagcttctgactatcacgaacctctgagctttgatatggcgataatttcaaaccatatttcttcagttctgagattttgctatatcgctccggtcgctcaagatatcgccaagctgcttattaataaggacctgaaggaaagaatcgattctcaggatcccacgacaatgaaagacatgcttaagccctggcttaaacggtcctatacccaagatgtcagtgacgggaaaagcggatggatcagcaagaagctcaacgaactcagaggtatcgccggtatcaacatcatgatgggccatgtcgtgaacgctcttcagcaatttactgggttctcaattgcgctcactaaggtttccggacgaaatcttattgacgctgccggtgtctttgccagagacccgagaaaagtaacggagcaaattactcagctttctccattcatgatgtctcgcctcaatgaccgtgctatggagtttcagtctcaggtctataagatttcttctactcaggacaatcgtgttacgaagcaaaagggaatcttcaataagacagtagcggctaaggctaaatacattcagccggtacatgacttcctgatgcgaaaaggatacttcctgcagtctttctgtcagattccaattgatgcgatcacttgggtcggagcttataaccaggcgctgcagaaaggacggactacagaggaagcggtcctggatgcagactcggttatccgcacgaccatgtccgacttttctccggaaaacgttgctaatgtcgaaacaggaaatgctttgtaccgatccttcctcgttttctacaactacttcaacatgcagttcaatctgctcaacgaacgcttccacgccgacagcatggagaagaaactgattagacgttacggcatgtatgcgcgagacgctctcttagttgtaacgattccttccgttgttgcaaaactcattgaagcagtggtcttcggagatccggacacaggcgacgatgacgaattcggcatggacgatatgttgagaatgctggcctccgaatcctttaagaatgtcgtggcgatggctcctatcgcgggacaatttattaacactgccggcgcaagcttagccaaagatcaaaaaggcggagcagtttcggacgttgcgcgattcatctgggggaccgatccttatgttggcaggattatgaccgctccggcttatggccttatcgaaggaagcggcaaggcgattcaacaaaccgttgagattctcaacgatgaggatgtgaatgcccggtcctacacgcgcaatatgctagatcttctatctgtggtaactggtctgccgcttggcttcttaaagaaaccgctgggttacatggcgggagttgaagcgggagacatccagccggcgaacgctggtgaatttattcagggagttctttccgggaaagcgaagaaggactgagaacccgtccataaacctccttgctgtcaaatgaaaattgatggcaaggagatcgctaatgtcaatttctcaagaacttcggagagccggtccttatatcagtgatggctcaacaaaggccttcacattcagctttaaagtgatgaagggttccgacttgtccgttgtcgttgctgacaataaggacacttcggtctcggaaacgcttgcctctacaaactacacggttacgcttaacgataaccaggaaaattctcccggaggtacagtcactttaaacaatgcgcttccatccgggaaggcgctggcgattctctcgaatgctcctttcctccaggaaaaggtatttaccaatgccgggggcttctatccggaagttctaaatgacgctctcgacactttgactatttactgccagcagctgaaggaagccctcgggcgatgcctgattgttccaagcacatcggagcacacaccgcaggaggtattggcagaagtccttgagatcgcttccactgctaatgattacgcgcagcaggcacaagccatctatgacacagtcaaaggtgatgttgcggagatcaaagcgctaaagagtgagatcgaccacctcgtccttaccttccagacgatcgagcaactcgcggcgcaagctcaggccaacgcgcactctacgaacgacgacaagctgacatgccaacaggccctccagcagattcaagcaatcgcggcgcaaaccggattctctacccggacaagtccgacggtatccgagtcggagacttttccgctttctaatctcacgccttctgcctacgccaaggtcggggacttggttcttaattcgaccaacggtgacttgttccggattaccgcggtaacggcaacgacagccacagtgggagcaaagatttcaaacctgcgcggccctcgcggtgagcgcggtttgcagggcagtccggggcccgcgggcgagcgcggtgaagcggggcctatgggtcaaagcccgtatgcgacttgcttcggtcagttccaagtaaacggagagggaatgcttcagctcgaatacgtgggtcttgcacctgctgaattttcaatcaacgataacggggaggtagaagctacctatgccaacacttaatatcggaaaagtgcgctacacgtggaaaggcacgtatagcgcaacaaccgcatacagcattcttgaccgagtgaaggacgccgacggttatgtctatgaagcgattaaagccgcgcccgcgggaactgcccttaccaacgaaagctattggataaaactttccgttcaaggcccgaggggtgataagggggagacggggaatgacgggccgaagggtgatacgggcgaggcaccgacggccattttgtacacagagcagaacaacctgacagacgctcagcgggcgcaagctcgaacaaacatcggctgggccgcggcgtttgccgcatcttttgcttcggcgatagctacttgggcgaccagcactttgggctcaaagatcgaggcctatctcgtaccgattttgaaacagctctgtctcgataacggcgccactcaggcagagatcgacgccctcgaagctgaagaaacaagcgaatctgattcataaggagataaaacatgaacactcaagagattagagaagaagcaagaaaatcctgcaaatatccggtcatcagtcctgaagcggttgataccatgatcgaccgcgcagactaccaccgcgtggaaggtacgggaacgatggtctgcacactgattctcaagaatggtttcaccgttaccgacacttccgcatgtgtggacgttcgcaactttaacgaggaaaccggcaagaagatttcctactccaaagcccgtgacaaagttttccatgtcctcgcttttgcctactgcgacgaacattacggagaacaggcatgacaacacttgcagagattaaggccaaatacctctctgaggctttggcaagaaagatcgagaagtactgcattaaagaccacacgggccgcattgttgcacggagtaattctcccgttgtccacgtattcaataatgaagaggatgacgcatacgccgctgagcactacacgctaaaagaagtttttaatggcatgaagttttggcagggcgaactctctcccgctggattgttccaatccgccgacggtcagttctacacggaaaccgagttgcccgaaaacaccgacgcattctgcaaagaacgttacagcaacgagatcagagcagagcgcaatgctcgaatctcggatacagacgactatgtgaaactgcctgatattaccgtggcaagaagcgcaggagccaagcgcagtgctttagacgacgctgacagaacggcccttgagacctacagacaggcgctccgaaacttgcccgaggcgcagggtttcccgttcgtgccgtggcctgagtttcctaccgctttggtttacgagctacagcagaaagttgacgcaagacaaaacatgagacaaggaggtttataaatgaccttgaaatctttaattcagcggctactcgatagccgaacgacaccgagtgaggctagtcactcaagctaccctgatgacggaaccgtcactcagttttctccctcggcaacttcagtgtcaagctggacgaaggtggttaactccaccattgctccaagcgatggctatgtgattgttcgaggaaaggcgacaggagaatcctatgtacaaataaccgctggggataatcctccacatatggagagaagcacttttgctaaagcagctttgaatcaatacgcgattctcaatctgccaatcgcaaaaggaaaaacattcaaagtgtttgctgaaaatacagctgagataactgttggcctgataaagtcaattgggggggggtactacttcttaagaacgctcttctgcaaggaggtggcctatgcttaaacggcttatccagttctttgcggagaagttcttggttagcaagaaggagtgggtcggaagtcaaggtcttttctcaaacccaaatcccggaacaacgttctttgttaaccacgctcaggctcagctttatacgcctccaagtgatggatggattacattcggcggaaaccgaccatcgatcaatgtcggcattactggaaagttgggaacgtgttgcattaactctcaaggctatctcagaattacaactccggttcggaagggggataccgttagtctctattgcgagacggacgatcagcaaccgcttgaagcaaaattcgttcccagcgaaggggcagcgtagcacttcacttgtaggaggtgcgtcatgctgaagtcgctcctccaactgctcctagagagtttccataaaagccataggtcaatgccccgtttgacgggattgcaacattcaaccgtcaccgttccatcgcctttatctaccaacttgataaccatcaccacaggtgtagcaccttgtgatggttggttacgagtacaactagaggacaatcaagcaaaggacatcactatgtttctccaaaacagtataggcgcagactctggcttttgctattcaaaagattgggggtggccgtcatgttctatgccaatagcgaagggagattcatacacggtaaaaattagatatggaacgccgccgaatgtggcctcaatactgcacgttgatttttatccgaactttggcgcctcttaaccatcccgcccctcaatccgaggggctttttgctaggtgtgcgcattgaaagaaaaagcgctcataacatgtccaaaaagagagataaacatggaaacagatttcagcctcagcgagtttgccagcacggtaaacctaatagtgttcacgctcattcttatatgtgcggcatcgggttctgctatgccgtacgtgcgagcggaacgggactggaattttccgcgctggttcattgagtttgttacgtcatgcgcggccggattcattgtctatctgatcctccgcacctcgaaactcagttgggagtggatcggggcttgcagcggagtgtcttcttacttcggcctgaagatcatgaacactctttacggtgtcgtcacaggcaaattaaaacttaccgtacacaatggagcgaaccatggcaattagtatgcgctcagttatcgcagggctgattaagctcattcttttctttgctttttatatggcagggtggcttacaaactctcagttgaatcagtacacgatcgtgtcccagcaagaccggatcaacatgttggagaacgaaaccgcgctccagcgcctccagattaacgagctaaacagacgagcaacttcaaacactgagaatctgaagcagcttgaacgcattagttcagatattgaatctctcaaaaaagaagttcagcaactgcacggcttacacaatacgaaggagcctaaatgagaaagcaagatattttgttgtacccgcctgaattagcaactcagttcatatctgagtttgagcaaggtcccaaaggcggaccggcccttgaatcctacaaatgccccgctggggtctggaccatcggttttggccacaccaaagatgtacatcctggagagcacattacgcgggccgaggcttacgacctactggacaaagacctcattcataaacaagaggagctggcagcgctcgttcacgtacccgttacagagaatcaatttattgccctgatgtctttcgttttcaacttcggcattacgaagtgtcgaaggtacacactcttcaaaatgattaacgcagagaacgaggacgggattagggaatggtggcctaaatatgtcaaccctggctcgaagtttgaagacgggttgagaaggcgccgaaacgcagaactagaactatttttcagaaaatgatccgagtaattttgattattgccgccgtcatgttctccagtctcttgggttaccacttcggccagcaggaaacggagttgcgctggacgcaggagcgggagcaactgcttgctcaccagattgaaacgttacaaaggaaagatcgtgagattgctcagttggaaaagtctattggtgtccttaacgattctgctctccgggtgcgcgagcgagacgccgcgatacagcgaaagttacaacgcgagcttggagagtgtggtcgatttagacgcgcactggagctctcttcaaaaactcttgcagaatgtgcagagcgcgcagtcagcgatagaagaatcattgaaagatgtgcaatccaactcagatagaggagagaaaaaatgactgaactagaaaaactcggtatccagaacagtgaacggacgaaatgtgagatctggacccgcgttatgggctaccaccgcccgattgacagcttcaatgttggaaaacagggagaggttgcagaacgcaaatacttcgatgagaaaaagtgctgctgtcgcaaataaataaatggatagggcttagaaaggcaccagctttctaagcccaaggaaggcgccagaagggaatttaggcaccacgttttcttaaaaacagtttaattataccctttcacttttcagaaacatcttgtaatattccctctgtcgctactcaagtccagttttgaagcctcagtgagcactgtacgcgaggctaactcgttacgatgcctcaatttatgaacgcgaccgcgggatccacggatcccgtttttattgtctggtgaggtaggcaatacggtaggcaaaaatttttatccttctgaatgccttgagcctcaactccatttggttccggttcgggccaccaaatcaccctcttctcctcatcataattttcttccctcacaatatttgttggggtcgctcaaccgtttggttcatcacaggaatcattgaacgttgttggtctatgcattttcctgaaacttttgggaaatgcgaaccatctacagctccctgcaccatttcagaaagaccacagtccaaacctttttcctagcgaatttaggggattcttctcactttcccaacaaaaccgttacaacagacaaaaataaaacctaattttcgaaacattcgaaaatcttcggaaagtaaggctaacgcgataaaaaaggaattgctttgaaaccaaagtaaattccttctaatggcttaactgaatctatgtcggttcggtcaacacaaaaagcctcgaatagaggctccttgttaatccggataaggccaagaggcctcagtagccggatctaatatttaatcaaattgatttcagctcgccctaaggcgatttcgttgttgaaagaatgtaactagatattgccacaactatcaaaaacagtcaagcaatcaccccaaattttcgaaaataatggcactttttgtgcagatcgaccattttcgaaaaacagaccagaaaccaactgtcaaaaatcgtttattttcaatcagttggtttcggagcttcaatcgtacattctttcaataacaactgaaaccttccttgggcgtcatctgcgcggcttccgtggggcttcaatcgtacattctttcaataacaactgaaaccttcgatgtcacaaactatgcggcagacaaaacggcttcaatcgtacattctttcaataactgaagcacatactattgccggaatccacacaaaaagggcgtcgaagcacccttgcatgtaaacgaagacatcaagtcaaaaacacgaagtagaaactaaaagaaattaaaagcagaagcaataaaaacataacaaccgagaaaatagtggctaagccattaagcaacccgtctatcaatgccttaaaaaatcgcacaataagtcacctctccctttgttacgcctctttccttcttactctttcgatccaatctcagttcaaagagaggatcgttccgtcattccaaaaaagggaaaattccgcccctgaccaaactcagcctaatttttagcagatagtcaaagtcaggaaaatagtttcctctttaattgcgtattctttcaacagaagtcgagaaatgcagctacaaagcattcaaactgtttcgacccacattcttttgaaaaatggactcgtatttgtggactcactgaaataaatatattcaaactttctaattcaacctataattttgtaactaaataataaattcttgaggagggaaaatggggaaaactcacattattggcgtcggtcttgacttgggaggaacctataccggcacttttataacctctcatccatctgacgaagctgaacacagagatcattcgtctgcctttaccgtcgttaatagtgaaaaactttctttctcatcaaagtccagaactgcagtacgacaccgggtccgctcatacaagggattcgatttaagaagaagattattgcttttagttgcagaatatcagcttctccaaaagaagcagacattagctccggaagaacgcgaaaatctccgtatcgccttgtccggctacctcaaaagaagaggttacgcccgtacagaagctgaaacagacacatctgttttggaaactctagacccttcagtattttcctccgcgccgagtttcactaatttcttcaatgattcggaacccctgaatattcagtgggaagctatcgcaaactctcctgagaccaccaaagctctcaataaggaattgtccggacaaaaagaggcagactttaaaaagtacattaaaaccagcttccccgaatacagtgcgaaggagattcttgccaattacgtcgaaggacgccgcgctatcctagacgcctcaaaatacatcgcaaatcttcagtctttaggacacaaacatcgctctaaatatctcagcgatattcttcaggacatgaagcgagattcaagaattacacgtctatccgaagcatttggctcgacagataatttgtggagaattatcggcaacatctctaatctccaagaacgtgcggttcgctggtatttcaatgatgcaaaattcgagcaaggacaagaacaattagacgcggttaaattaaaaaatgtcctcgtccgcgctttgaagtatcttcgatcagacgataaagaatggtctgcttctcaaaaacaaatcattcaatctttagagcagtccggcgatgttttggatgtgctcgcaggtcttgatcccgaccgcaccattcctccatacgaggatcagaacaacagaagacctccggaagatcagacgttatatctgaacccgaaggctttgtcttctgaatatggagagaaatggaagtcttgggcgaacaaatttgccggcgcctaccctcttctcacagaagatctgactgagatcttaaaaaaacacggatcgtaaaagcagaataaaaatccgatcggatgtcctgcccgactctgattatcggcttgcctatatcttgcagcgagcgtttgatcgaagtatcgctcttgatgaatgctcgattagaagaaccgccgaagacttcgagaacggagtcgtcattaaaaacgaaaaattagaagatgttctctcgggccatcagctggaagagtttcttgaatttgccaatcgctactatcaagaaaccgctaaggcaaaaaatggtctttggttcccggaaaacgctttgctggaaagggctgacctgcatcctccgatgaaaaacaaaatccttaatgtgatcgtcggacaagccctcggcgtgtcacctgcagaaggaactgactttatcgaagagatctggaacagcaaggtcaaaggtcgttcgacagttcgctcgatttgcaatgcaatcgagaatgaaagaaagacttacggtccttatttttctgaggactacaaattcgtcaaaacagcactaaaagaaggcaaaacagaaaaagaactctccaagaagtttgctgccgttatcaaagtgctgaagatggtcagcgaagttgtcccctttatcggaaaagaactccggttgtcggatgaggctcagagtaaatttgataacccgtattctttggctcagttatataacctcatcgaaaccgaaagaaacggcttctctaaagtctctcttgccgcccacttagaaaacgcctggcgtatgacgatgacagacggctcggcacaatgctgtcgcctccctgcggattgcgttcgtccattcgacggatttattcgcaaagccatcgacaggaattcttgggaagttgctaaaaggattgcggaagaagttaaaaagagcgtggattttactaatggaaccgtaaagatcccggtcgccattgaagccaactcttttaatttcaccgcctctctcaccgacttgaagtacattcaacttaaagaacaaaaactgaagaaaaaactggaagacattcaacgcaatgaagagaatcaagagaagagatggttaagcaaagaagaaagaatccgtgctgacagtcacggaatttgcgcttataccggaagaccgctcgatgacgtcggagaaatcgatcacattattcctcgcagcctgacattaaagaagtcagaaagcatctataacagcgaagtaaaccttatctttgtcagcgcacagggaaatcaagagaagaagaacaatatctacttactctctaatcttgctaaaaattatttggctgccgtcttcggcacctctgacctgagtcaaattactaatgagatcgaaagcactgtgctccagctaaaagctgcaggcagacttggctatttcgatctgctttctgagaaagaaagagcatgtgcccgtcacgctttattcctgaactcagactccgaagcccgtcgggcagtcatagacgttctaggttccagaagaaaagcctctgtaaatggtacgcaagcttggttcgtccgctcgattttctctaaggtcagacaagcactagcagcctggactcaggaaacaggcaatgaactcatttttgatgccatttcagtccctgctgccgattcgagcgagatgcggaaacgctttgctgaatatcggccagaattccgtaaacctaaggtgcaaccggtcgcttcacactcgatcgacgctatgtgtatttacttggcggcgtgctctgatccttttaaaactaagaggatgggatcgcagttagctatctatgagccgattaatttcgacaatttgtttacgggctcatgccaagttatccaaaacactccaagaagcttttctgataagacgaatatcgccaattctcccatcttcaaagaaacgatctatgccgaacgattcttggacatcatcgtctctagaggagaaatctttatcggctatccttctaatatgccttttgaggaaaagcccaatcgcatttctatcggaggaaaggatcccttcagcatcctcagcgtcctgggagcttacttagataaagcgccaagcagcgaaaaagaaaaactgacaatttatcgagttgttaagaacaaggcgttcgagcttttctctaaagtagccggctccaaatttaccgctgaagaggataaagccgcgaagattctagaagcgctccatttcgttactgtaaaacaagacgttgccgcaaccgtttctgatctcattaagtctaaaaaagaactttccaaagactcaattgaaaatctagctaaacaaaaaggctgtctcaaaaaagttgaatactcttcgaaggaatttaaatttaagggatctcttattattccggcggccgttgaatggggtaaggttctttggaacgttttcaaagaaaatactgctgaggaactcaaagacgagaatgccttgagaaaagcattagaggctgcttggccctcttctttcggaacaagaaatcttcattcgaaagcgaagagagtattcagcctacctgtcgttgctactcaatccggggcagttcgaatcagaagaaaaacagctttcggagacttcgtttatcaatctcaggataccaataatctttactcctctttcccggtgaaaaatggaaaattagactggagctctccgatcatccaccctgcactacaaaaccgcaatctaaccgcttacggttaccgctttgtggatcacgacagaagtatttccatgtctgaattccgagaggtttacaacaaagatgacttgatgaggatcgagcttgctcaaggcacttccagtcgccgctacctacgcgttgaaatgcctggagaaaaattcttggcctggttcggagaaaattctatttctttaggaagttcttttaaatttagcgtctcggaggtttttgacaacaaaatttatactgagaacgcagaatttacgaagttcctccctaaaccaagggaggacaataaacacaacggaacgattttcttcgaattagtcggaccaagagtgattttcaactacatcgtcggaggtgcagccagttcgctgaaagaaatcttctcagaggccggtaaggaaaggtcatgagacacctaacagtctcgggatttggcgatttcctaggtgttcacggaaatcgcctgatcgtacgcaacggcgataacgtaatcctagaaactgcgctttccagactcagaaccatccgaatcgataaaagcgtttccttatcttctaaccttatcctggcctgcgcagcaagaggtattcgaatctactttctcgactggaaaggcgtaggagttgtcgaagtatccggcatgcaccgccatgccgtcgtcggcgtcagaaaatcccaattcgaatgcctcaaatctttgcaagcccagcttctggctaaggaaatcattttttcgaaaatccgaaaccaacgggccgtcctcctttatttcagcaaatacctcatgaaaagagaaacggcttacggtcttttacttcggaatgccggaactcgattagaagagatcagtaacttactggacactcgagcctcaggccccgactggaagaatacggtaatgggactagaaggaagcgcttcactcatttactggaacgctttaaaagaagcaagacttttgcccgagacgttccaagaacgcgaaggaagaggcagcactgaaatcaccaacgctgcacttaactatgggtacgcaattcttcatagttatattcaaaatgcgctaggcaacgccggtctggagatctacgccggactgctccatgcagatcgagccggaaagccatctttggtacttgactgcattgaggagtacagagcgtgggtggtcgatagaaatgtcatcagtctgagatgcaagcttggttctgagcaaaactttttggacactgcgctgaagaaacaattggtggaacttatcgataaaacgatgagcacaaaaatcaattactcacagaagcaatgcaaattagagaatgctcttcaacggcaggtctataaacttgcaggagctatcgtagaaggcaaacgctatcgtggtattcgattcaaatggtgagttatgtacacacattttttgatttgttacgacattcccaacacgccaaaacgcaccaagtttgctgaaatgctgaaagatctgggacttgtcgccttacagaaatctgtcttctatggggcacttaccgccacagaaaggcatgctttggatttctcatctcgaaagctccttggagcagaggataaatgtctttgtattccttgcgtcctgaaacctgaagagttcaagaaatcaattggttacgaggattttgaatacagcgagcccgatagctatggattcatctaaccgcgaaagtctacctgtttcttacatacgacaattttgtttttgtccgagaatcccttttctgtccgtatttttggagattaaaccgccgtcacctttgtgggtccaagacggcgtggactttcatgaaaaggccgcgatgcttcaaaaaagaaggaagctgtcaaaatttaacttgtcgggaaaaggagtgttcaagtcaaacatttatttgaagagctctgtttatccgattcatggaatcgccgacggtatttttatcatggaggatggcgagattattccgcttgaattgaaggctcaggacaattttgtcgcttctcgcggacacattcttcagctaaccggctatgccattcttctagaggagaaattccaaagagaggtaaagcaagggttcattctttacggcaagaaaggcaagagcctgcgcgttgaattcacggaagaaagaaaaaagaaagtgatagaaatagctcaaaagattattagtagtttcgaaacaggccttcttccagactcccccgctacttcagcacaatgcgggcaatgcgaatttttgaatttttgcggggaccgcttctagcaacacaaaaagcctcctcggaggctcttcgttaatccggataaggtcaaagacctcagtagccggatctaatatttaatcaaattgatttcagctcgcccgaaggcgacttcgttgttaaaagaatgtaattaaatattgccagaaatattctaaatagtcaagcaatcaccccaatttttcgaaaataacggcacttttcgtgcaggtcgaccattttcgaaaaacagctccgaaatcaacctatcaaaatcctttgttttcaaataattgagtccgaggcttcaatactacattcttctaacaactactgaaacggaagaacctcatccacaaaaaacgggatgagatagcttcaatactacattcttctaacaactactgaaacaaactccccgggcaggtcgctcgaaacggcggttagcttcaatactacattcttctaacaactactgaaaccgctaaatacacgctcaactctgctcaaatgctgtgcttcaatactacatttttctaacaactactgaaacacgagatcgaccgagcaaccgagaacgaaggagtaagcttcaatactacattcttctaacaactactgaaaccatagcactcgaacgggaacccttccgtatgtgtggcttcaatactacattcttctaacaactactgaaactcagggaggcatacttgatcagagcatccgagacgcttcaatactacattcttctaacaactactgaaactactcccaactgcttacagacaaggcgctcatgtgcttcaatactacattcttctaacaactactgaaacgatacattgaagtttctaaaagatccgcctgtcacgtttcaataactattgaaactccagtcctcggcgttgaactcgaactctaaggtttcaatactacattcttccaaggattactggaactgtctagtggcgtagccagaatatttttctaaaaagtctccgaatcacattcttctaactgtcgctgagaccaaatattcggcgtccaagagcgagacaaactttcgtttacaccctactccacttcggtacaatcatccacgttgtaaacaaatgccactctcgtcaaaaagatagttgcctaatctttgtcagtttgcgaaaaactcgctctcgcctttctggaatagtggatgagaaacggatgcttcgagggaacggcaagaaaagcaacagcgccaagaatcaatgccccgccaatacactcccaagaattaacgctcaccccaagaaatatcatgctcagtagagttgcagctactgggtcgaaggtctccatcatgccggcaatatctgccgggataatttcggcagccgcttgaaaaagccaaaacgccgcaatcgttccgaaaagcacaataaacgcataagccaaaattgagtagacggtccagtccaaaggttcgttccaaaagtgactgaacaacgtcacagtaacgccggtaagcaaaagtgcccagctcgttgctaacccggaaccgacacgcgcaataaatttttgaggcaacagaacataaaaagcacctgtgattccagatccgataccggcccaaaagccgatacctgagacgttgaagtttttaaatgatccgccggttacgactagaaccactccggctacagctacaagtccgcaaaaaacttctttcacagtgagccgtttatgctgaaataccaccatgaaaatcatgatccacaatggaacagttgcagttaaaacagcggcaaaaggtgcgtttgcgtattgaatacaaacaaagaacgttaattgcgttccgataattgttaacgtgtaaattatcagatcgataatgttctgcttggtttcaaatactttcagagcccccttctttaaaagaaagaactcaatgccaacgaagatcgagcctgcaaggagcatgcgtatagagatcaaatccatcggtgtaaagtgacaattttgaagtaaatactgtcctgcaacacccattgatccccaaaaaacagccgctagtccggccatcgccatgccttttaatgttttattcatcctcgtctcctctggttcttgagtttgccagttttgtgatgggatagaacgagttcctactctttttaagaaatcctatttttcagaaaattccttacttttttcagcaagataaaagccatgaataatgcgaaaattcgcctatgaatttcgataactatcgccgaatacttcacctcgacctcgacgcttttttcgcttccgttgaacagcgagataatccttcgcttcaagggaaggcaattgccgtcggattaaattccgctcgaggtgtcgttgcgtctgcttcttacgaagcaagaaagttcggagtacgttccgcaatgccctcctcagttgccgcaaggctatgtccaaatttgatttttgttcccggacgaatggacgagtacaaaaaagcatcagccgaagtcttcgaaattttttctcgctacacaaatctcattgaacaagtctctatcgatgaggcattcttagacgtcacagacgtctggcgcgactatggttatgcgatggaaatcgcaaagctcatcaaagaagatgttcgtcgtgaagtcggtctcattatttctgccggcgtttcctacaacaaattcctcgccaaaatcgcaagcgactggcgcaagcccgacggcttatgcgtgatccatccgaatgcggcacttaagttcattgatcgtcttcctgtgaaggctatttggggcgtcggtccggtgacctcgcaaaagatggaggccctcggcatctttaccggaaaagatttgcgagaaaaagatctttcatttttagtcgagcaattcggcagttcgggactgtcgtattacaactttgcccggtgtattgacgatcgtcctgtcagaaccgaacgcatccgcaaacaggtcagcgctgagatcacactctccaaagacgaaggaaatctcaataagttagaagatacgctctcggaactgacggactatctgatgacgcgtctgcgtaaaaatgatttcctcggtcgctcgctgacgttaaaagtacgtttccataacttcaagacaatcacaagaactcagacgtctaactcagtctttaatgagaaatcccaaatcctcaaaacagctgagtctttgcttgaaaaaatcgatttcaaccatcagaccgttcgcctcctcggaatcgccattggaaaccgcctggaagaagacaccgaaaacatgttgaatctcggcgatatggacgagcttacacccaggcttctttaaggcgccgacggacttgactgagtcgagacgcggagcgccgtaaaaattgcaaaggtctgaagaatcgcaacaccgaaaagaacggctgtaaacataccgacgtcaagaagcggtccaaacaaaatcggtgtcagagactgacccacatccattccgcaataagtaaaaccgtaaacgcggccaaatgatttctttcctaacttcgcaaccgtcgctccgcgaatcataatgtctcgacttggagcagccacgcctgttcccagacccatcagacacattaaaacaactgcccagtatccggtcaggatctgagacgccagaatagccgccatcacagcagcaaacgtaaggcacagtgccacaacgcgattgctcgagatcttatgctggttcgttaaaaagccgccgatcaaagcacccgccccggcgcccaacaggtatgcagtcagtgccgccgaagccccggtcagattcaagtgataggcattcttgaaaatcgtctgagaaaagctttgaagaacgccgaaggccccagacgtaaagaagaaaaacatgaagcagtaccatacatccggcactcgcagaaatccgaaagtcccctcttctttctctttcggagtcggcggtgtagtgtcgcgaacagaatcgcgagagaaaacacctctgaatacaagctcaatgacaagaacaatcaacgccacggaagaagccgcaaacgctgcgcctctccagccgaaccaaccggccgtcgtcaccataaagaagggacaaatcgcccagccgatattgccggtgatgttatgccaggcaaaagcgtggcctaagaagcgatcctgaatgttgtagttcatcagcgaatagtcgctcggatgaaataccgagttgccggcgccagcgagcatcgccgagagataaagcatcgggacattttctgccatgcctaaggccacggcactggcaatcagcaaaaccaagcccgtatacattgaggtccggccgcctactttatcaaccagaaagccgctcatcgactggccgacagcacttgtgacaaagaacgttgtcatcagggttccgccctgaagaaaattcattccgaagtgcggaagtatccaaggaaacagagacggaatcactaagtgatagaaatgcgagctggcgtgggcgatcgaaacgagaaaaatcgcgaggatgtcgtgaccgcgagttccttgtgcgtacatggcgtggcttaagagtgttttttcttattctatccctcgcgtcttccaaaataagttagggccgagagattgttggtctctcagcctcttaactcagatttgatcagacgatcttatcgattgtctttacggtcttcaaaaatgaattttccgtcaacatagtccacaaacaccgtgtctcccggagcgtatttacccttaaggatatccaccgcaatctggttctccagatagtcttggacagcacggcgcagcggacgtgcaccgaacagcggatcaaagccgaccttaccgatttcgtccagagccgcttcggtaacatccaaaccaatattctgctgctccatacgtttagcaagcttacgaatctggatacgggcgatttcgcgaatagccttctgatcaagggcattgaagacaacgatttcatcaatacggttaatgaattcgggtctgaagtgcttcttgacttcgtccattacggcttccttcacaacttcaggatcttcaccctgacggttcataatttcctgagaaccgaggttggaagtcataatgatgacggtgttcttgaagtcaaccgtgcgtccctgaccgtcggtcatacggccgtcgtccaatgcctgaagcaggatgttgaagacatccgggtgagctttttcaacttcgtcgagaagaatcacgctgtaaggtttacggcgtacggcttctgttaagtagccgccttcttcatagccgacatatcccggaggcgctccgatcaaacgagccacggagtgtttctccatgaattcgctcatatcgatacggatcatggcgtcctcagtgtcgaacaggaattcggccaaagccttggtgagctccgtcttaccgacgcctgtcggaccgaggaagaggaaggaaccataaggacggttcgggtcggacaggccggcacgagaacgaaggatggcgtcaacgactttatcaaccgcttctttctgtccgacaacgcgcttgccgatgtacttggccatatccaaaagtttctggcgttcgccttccatcatcttggagaccggaataccggttgcgcgggaaaccacttcagcgatttcttcagcgcctacctgcgtacgcaggagcttcggtttttcatcgtagagcttggtttcttctttttcttccttcaccagctgtttttcaagttcgggaagtttgccgtactggatcgcagcgagttcttcatacttgccggaacgacgaagctcttccatcttggtcttgagcttgtcgatttcgtcacggacttctttagatcctaacgcggcgttcttttctttcttccagatttcttccaaatcggaatactcgcggcttaacttagcgatttcttcttccaaaccgctcaagcgtttcttgctggcttcgtctttttctttcttaacggcttcacgttcaatcttcaattgaatcaggcgacggtccagcttatcgagttcttcaggcttggagtcaatttccatcttgatgcgcgctgccgcttcatcaatcaggtcaatagccttgtccggaaggaaacgatcggtaatgtagcgggcggaaagttcagcagcagccacaatcgccgggtcggtaatttcgacaccatgatgaacttcgtacttttcctgcagaccgcgcagaatagcaatcgtgtcttcgacgctcggttcgttgacgatcactttctggaaacgacgttccagagcgggatctttttcgatgtactttctgtactcgtccaaggtcgtcgcaccgatcacatgcagttcaccgcgggaaagtgcaggtttgagcatgttgccggcatccattgcaccttctgtcttaccggcacctaccactgtatggatttcatcgataaacagaatgatacggccttcttcggcaaccacttctttcagcagtgctttcagacgttcttcgaattcgccgcggtatttcgcaccggcgacaagtcctgccatatcgagacttaagacgcgtttgttgcgcagtgtgtcgggcacttcaccgttcacaatacgctgtgctaagccttcaaccacagcggtcttaccaacaccgggttcgccgataagaacaggattgttcttacttctgcgctgcagaatctgcatcgcacgacgaatctcgtcatctcgcccgatcacagggtcgagctttccttctttggccttttcggttaggtcaaccgtgtatttctttagggcttcacgattgttctcagcttcgggattgtccactttttcacctccgcgcacggataaaattgcattttctaggctcggtttattgaggccttcctcttgcgcaaggtgtgcggcgtcacacttgctgtcgcataaagctaaaaggaagagatcggtggaaatgaatttatcgccgagtctttcggcctccctttccatcgaattaagaattgccatcaactcacggctgatttggacattgtcggcagctccggaaacttccggcagtttgccgatcgcttccttcaccttacgttcgagttctctgactctcacgccggagcgctctaagagcgtccttccggtgccctcggtgtcctttaataccgcaagcagcaagtgaagcggatcgatgtactgctgggaacgctcaacagccatcgattgtgcttctccgagcaactcttggaaccgagttgtaaattgatcttgacgcataagagtttgaatctccttttgttaaggaaacattcggaatcaactcctgttcccctatgcgtctattctgaagagtccgcggagacggacgtgcgtttttctcttattttgagcttatttggtccacctggattttgcagcttcgtcggtctctttggcctgtacccaacgggtgccctcgcccaccttttccttcttccagaacggggcttcggtctttaagtagtcaataatgaactcgcaggctttaaatgcttccccgcgatgggcgccggaaacgccgacaaaaacgatctgatccgtggcgaataattcgccgacacgatgaatcacggtcgcatccataatgtcccagcgcttctttgcctcttccacaatggccgtaagggctttttcggtcatgccgggatagtgctccaacgtcatggaagcgacctcgtcaccttcgttaaggtcgcgaaccgtgcctaaaaacatcacgacggcgccgactttgggagacgcatgcagtgccgctacttcagcctgaacatcaaagtcttctgtttgaactgcaatcttcattgacgcctcttataagttgaattctgtgaatgggatgtaggtcaccaaatcgcccttcttcaagtcagcttcagccggaatgtcggctaagccatctgcccaggtgcaggagctgagcactgccgagttttgagttcggtagttttccagctctccggcgccgttgcggcggacacggatgaattcgcggcgggatccgcacttgtaatcaaaggccagcggaaggatataacccttcacatcaatctggccgcgaccggaaagtttaagaatcagcggctgagcaaacagcaggaaggtcacaaagccggagacgggattgccggg

SEQ ID NO: 124 - DNA, 19943 bp, synthetic construct
  misc_feature 1..19943: note = Synthetic
  source 1..19943: mol_type = other DNA
gagttatcacgtgttagctaaggccgacagcaatataagaatgcgcaatgttatgaccatactggtcgaatttaacatgagtattacttaattctttgaatatacaattgtctgtgttcggggccgtattagcggaaccaaccgccctgaaagcccaagtaaagtttctaggtaactgagtataagtatttgtagttccttgtccccattgaatagtaaagccagtggaattatcacgtgctatgagaagccaactgcaatatacgaacaacctgtaaaagagctttgagcacctccacttatacggactactgaattggaaaccctctcccatgccaaaatgcatcctgtgttgtttgcatagcttccttttctaaaacttacgtcgacttggtagcttgtattgctgaagcttcttggaaaatgaacatctgttgaagcattgttagggtagccaagttctccccattgaacagtaaaccctgtggagttatcacgtgaagcccaaggccacccaagaagtattttcgccatcgcccgtcgagtttgagtacatacggatattggagttcgaatttatatttgctcgaattccgccatatccgtgcgtattgccggggacagcaaccaccgatcgaaacgctgtaaatgttcttggaagggttatgtaaatcgtactgctggaaaaattaactccggttccccactggatcgtaaagcctgtggaattatcacgtgttttatttaattttttataggagatcaaaatgatttatttgattaaatttgaccacaacggtcgtcgttctgaaacctttgtgaaagaagaaaaaactccggaacaagttcaagaacttctgaatgatgggtttcttgaaatttcagaaacggaatatcaacttctaattggaaacattgatggccaagaatatgtccggacttcttctggaaaatttgaaccatacgtccctcctgcccctactcaagatgaaatcaaccttcaaatccaacaacggattacaggagatattcaggactatctggatgaaaaagccaaagagttgaactacgattcttgcttaagcgcatgttcttacttcaatacgggcgttgaaaaatttgacaaagaaggcgcggccttcagggaatggaggtcggcagtgtggagtaaaggttatcagattctcaacgaatgtatttccggccagagaagctcggtgcctgacaaaattctgctcatttccgaattgccagttcttgaaattacttactaattgcttcttgtgtcaggcacaggctttaactgtcggattagtcggtggggttcgcggatagatcggggttctcatcgttttcttgggaactttgagcacaagctctaataaacgaactccattgctccataacttcctttctcgcttctaaaaaatcgcttctttgataggctcgagacacggagtctccgacaacgtgtgcaagacaagattccgctatttcataagaaatgccttgatccgccagccaagatctggcaatagatcttagaccgtgtggcactagacgatctttgaagaaatcctgggacctcatgtaattcgttagggtttgactgtttacgtggttataggatttttgtccgggaaatataaacactgaccgtttgtgctttgtatcggatttaatttccctgagtaagtcggtcgcaaaggctgtcaatgggacgcggtgaactcgtcgcattttcatctcttctgcggggattgttaatgtattgttttctatccaatcccacctcagttttgcgacctcacccggccgaagcattgagtaaagagaaagtagaaaaatatgcttaatacgtttcggagctttctcttccataaccgacagaacctcaggcaaactttgccatggtattgatggccgcggttttttctttggtggcttaaataaccttgatagaccgttgattgggttgtgatgaacatatcctgcacatactgcaagatcgaaaatttccttcgtccgcatgaggcatcttttcatggtggctcttttacctgttaactctatgggctttaataaattgataatcattggcgcagtgatttgatcaatttgtttaagccttagtttcggcaggacgtatttttcgagtcttagtcgttcgcttctataactgacgatctctccttttttaagactcttccataaagcataggcatcgttaaatgtgtaaccccgtggtggcactaagtcgtattgccgacgcaattgccgtgctttttgtgcggcctcgcgtctatttatatcgggccagtgtcctattgagatatccgaaatcgatcctttgtgaggaattctgacaacccacgactttattccggatgggagaactctaagagaaagaccattgtcaaccgttatctgataacgcttcgtattcggagtaagtaaggatatggctttatctgtgtatcggtttttttgagtcatctgaaatgaaaaatattttcgttaaaggttttagttaattgcaaggagaagtatgaaacagacgacctgggaggattttatgactgcgatcgcgatgattacagtcattttgattattgtctgctcgatttccggagcagcaatgccgtatgtgaaaggggaaaaaatgtttaagtttataaggtacttagtggaggtcattacctcggcggctgctggctttatcgtgtttttgctgttgcgcgtaacggatattcctggagaatggatcgcggccttctccgggattgccgcttatttcggaactcggattatgaacgtgttgtacgggctattgaccggacgactaaaagttatgtttcacagcggcaacagaaaggacgacaactatggaaattagacaactcgctaacggcttgataaaagcaatgctattttttgccttctacatggcaggtgtcttatccagtgaatacctgtcccaattaacgatcagtttacaaaaagatcgaattgaatcgcttcaaaacgaaacagctattcaacggcttcagattaatgaactaaatcggcgtgcctctatcaatgcagaaaacctgcaggagttgcgagcaatgaaagtcgatttacaaaacattaaaaacgatattcaatctttgaagggattacacaaatgagcgaacattttcaaccgaaggaattcgcgtctaaggacggccgcccttccccttatcctctcgtcgtccaggaggggctatatcaattacttgaagaaattagagacgagttcgggaaacctatcgttgtgaattccggatatcgttctccggagcacaataaaaacatcggaggagcgaaaaactcctaccatgttaagggaatggcagccgatattcgaccgcagcatggtcccgattttcaacgggaactcaaaaggctaaaacagatcgcgaacaaaaaatgttatggcggagttggtgactatccgacatttgttcacgtggacttcggaccgtggaggaggtggaatggatgaacattcttttaatcgcgaaaatgggagccgctgtagtggctctttttattgcctattggattggtctgaatgacggaaaaaattctgaggaattgaaaaatgcacgtgttacgatatcagcactcgatacagctctgcaggaacagcaggccaagcaaaaaagcgatgcactggctctatctaaccttcggatcgctgagtctcgttctcgtgacgaacttgactggctgcgccagcaattgtccgaaattgagcgaaaagcaaagaccgataccgatagacagcgtaatcgatgtctccgcaacagagcagaagttggagaggttgcagcaggattacttagagctgttaaattctgtcaagaaaaccacaaatgaggggaagtagaatgaaaaacgaattagaaagatatggaattcaggactcagatcgaactccctgcgagatttggacccgagtaatgggctaccaccgtccgatttcttcctttaacatcgggaagcagggggaggtagcggagagaaagtatttcgaccagaggaaatgctcttgtgaatttcaaagaaaacactaattcttttgcggggcaatttgtggggcaaaattttctgacctcttgaaagtcaataaattcagtgctgttctattcaggttcgggccaccaaatctccctcttcttacctttgcaaaagttacttcacccacatttttattgaattagctcaaccgtttggttcatcgcaggagtcattgaacgtcattggtctatgcattttcctgagccttttggggaatgcgaactatctgccgtttcccgcaccatttcagaaaaaccacagaccaatcttttttcttagcaaatttaggaaattcttcttacgtccccaacaaagccgttacaacagacagaaataaaacctaattttcgaaatatttgaaaatcttcggaaagtaatgcttacgcgataaaaaaaggaattgctttgaagcctaggtaaattccttctagtggattaactgaatccatgtcagttcagtcaacacaaaaagcctcaaacagaggctccttgttaatccggataaggccaagaggcctcagtagccggatctaatatttaatcaaattgatttcagctcgccctagggcgattttgttgttaaaagaatgtaactagatgttactacaactatcaaaaacagtcaagcaatcacccaaatcaccccaaattttcgaaaataatggcgctttttgtgcagatcgaccattttcgaaaaacagatcagaaaccaactgtcaaaaatcatttgttttcaatcagttggtttcggagcttcaatcgtacatcctttcaacaacaactgaaactaaaacgtttatcccgctccaaattcgccatgatctgcttcaatcgtacatcctttcaacaacaactgaaacactgggtgctcggaatgttcaagaagctcgaaaggcttcaatcgtacatcctttcaacaacaactgaaacaaaacgttctctacagacttcgcgacagcttgaggcttcaatcgtacatcctttcaacaacaactgaaactttggcgcatgatgttttctatgtatttcgcgtagcttcaatcgtacatcctttcaacaacaactgaaacgtttctagttttggcgatatgcacatttggtgccgcttcaatcgtacatcctttcaacaacaactgaaactttcataatcgtttagagcagcgtgcagcaggtctctgcttcaatcgtacatcctttcaacaacaactgaaacgttgtttttcctgctgaattaaggcggcggatggtgacgcttcaatcgtacatcctttcaacaacaactgaaacaggtcaatacgaaccggcgcgccgttgagaaaagcttcaatcgtacatcctttcaacaacaactgaaactatgtttaaacatttgcgcgctctgctccttgaggtgcttcaatcgtacatcctttcaacaacaactgaaacattcaacgttagggccgagtttgccgccgagttaagcttcaatcgtacatcctttcaacaacaactgaaaccactcctccgatgtctttgtaggccctaagcctgcttcaatcgtacatcctttcaacaacaactgaaacgtataaagtcggcctcatattctgctatagcgtcgcttcaatcgtacatcctttcaacaacaactgaaactaatcgttgttattcggtaggagtggtacagcaaagcttcaatcgtacatcctttcaacaacaactgaaacgtacgctcacagacttattcaatgaccctcgttatgcttcaatcgtacatcctttcaacaacaactgaaacagattgcgaaacggcaacggcttgcgcactggctgagcttcaatcgtacatcctttcaacaacaactgaaactttagatcggcggggatttttttttggaggccgtatgcttcaatcgtacatcctttcaacaacaactgaaactcattccaaaaaaagggaaaattccgcccctgatcaaactcagcctaatttttaacagatagtcaaagtcaggaaaatagttttctctttaattgcatattctttcaacagaagtcgagcaatgcagctacaaagcattcaaacagtttcgaccgtactttttttaaatgaactcgtatttgtggacccactgaaataaatatatccaaactttctaattcaacctataattttgtaactaaataataaattcttgaggagggaaaaatggggaaaactcacattattggcgtcggtcttgacttgggaggaacctataccggaacttttataacctctcatccatctgacgaaactgaacacggagatcattcgtctgccttcaccgtcgttaatagtgaaaaactctctttctcttcaaagtcaagaacagccgtaagacaccgagtccgctcctacaagggattcgatttaagaagaagattattgcttttagttgcagagtatcaacttttccaaaagaagcaggcattgacaccggaagaacgcgaaaatcttcgtatcgccttgtccagttacctcaaaagaagaggttacgcccgtacagaagctgaaactgatgtgtctgtattagaaagtcttgacccttcagtgttttcctccgcgccgggtttcactaatttcttcaatgattcggaacctctgaatattcagtggaaagtcatctcaaattctcccgagaccgcccgagccttaaataaggcagtttccggacaaaaagaggcagactttaaaaagtacgttaaaaccagcttccccgaatacagtgcgaaagagattctcgccaattacgttgaagggcgccgcgctatcctagacgcctcaaaatacatcgcaaatctccagtctttaggacacaaacatcgctctaaatatctcagcgatatccttcaagacatgaagcgagattcaagaatttcacgtctatccgaagcttttggctccatcgataatttgtggagaattatcggcaacatctctaatcttcaagagcgtgcggttcgctggtatttcaatgatgcaaaattcgagcaaggacaagaacaattagacgcagataaattaaagaatgtcctcatccgtgctttaaagtacctccgatcagacgataaaaaatggtctgcttctcagaaacaaatcattcaatctttagaacagtccggcgatgttttggatgtgctcgcagtccttgatcccgaccgcaccattcctccttacgaagaccagaacaaccgaagacctccggaagatcagacgttatatctgaacccgagggctttatcttctgaatatggagataaatggaagtcttgggcgaataaatttgccgccgcctatcctcttctcacagacgatctggctgaaatcttaaaaaacacggatcgtaaaagcagaataaaaatccgatcggatgccctgcccgactctgattatcggcttacctatatcttgcagcgagcgcttgatcgaagcatcgctcttgatgaatgctcgattagaagaaccgctgaagacttcgagaacggagtcgtcattaaaaacgaaaaattagaagaagtactctcgggccatcagctggaagagtttcttgaatttgcaaaccgttactatcaagaaacggcaaaggcgaaaaatggtctttggttcccggaaaacgctttgctggaaagggctgacctgcatcctccgatgaaaaataaaatccttaatgtgatcgtcggacaagccctcggcgtgtcacctgcaaaaggaactgagtttatcgaagagatctggaaccgcaaagtcaaaggtcgctcaactgttcgctcgatttgcaatgcaattgagaatgaaaggaagacttacggtccttatttttctgatgactacaaattcgtcaagacagcactaaaagaaggcaaaacagaaaaagaactctctaagaagtttgcttccgttatcaaagtgctgaagatggtcaacgaagttgtcccctttatcggaaaagaactccggttgtcggatgaggctcagagtaaatttgataacccgtattctttggctcagttatataacctcatcgaaaccgaaagaaacggattctctaaagtctctcttgccgcccacttagaaaacgcctggcgcatgacgatgacagacggctcggcacaatgctgtcgcctccctgcggactgcgttcgcccattcgacggatttattcgcaaagccatcgacaggaattcttgggaagttgctaaaaggattgcggaagaagttaaaaagagcgtggattttactaatggaaccgtaaagatcccggttgccgttgaagctaactcttttaatttcaccgcctctcttaccgacttgaagtacattcagcttaaagaacaaaaactgaagaagaagctggaggacattcaacgcaatgaagagaaccaagagaagagatggttaagcaaagaggaaagaatccgtgctgacagtcacggaatttgcgcttataccggaagaccgctcgatgacgtcggagaaatcgatcacattattcctcgcagcctgacattaaagaagtcagaaagcatttataacagtgaagtaaaccttatctttgttagcgcacagggaaatcaagagaagaaaaacaatatctacttactctctaatcttgctaaaaattatctggctgctgtctttggcacgtctgacctgaaccaaattactaatgagatcgaaagcacagtgctccagctaaaagctgcaggcaggcttggctatttcgatctgctttctgagaaagaaagagcatgtgcccgtcacgctttattcctgaactcagactccgaagcccgtcgggcggtcatagacgttctaggttccagaagaaaagcctctgtaaatggtacgcaggcttggttcgtccgctccattttctcgaaggtaaggcaagcacttgcggcttggattcaggaaacaggcaatgaactcgtttttgatgccatctcagtccctgccgccgattcgagcgagatgcggaaacgctttgctgaatatcggccggaattccgtaaagccaaggtgcagccggtcgcttcacactccatcgacgctatgtgtatttacttggcggcctgctctgatcctttcaaaaccaagagaatggggtctcagttagccatttatgagccgattaacttcgacaatctgtttaccggctcgtgccaagttgtccaaaacacaccgagaagttttactgataagacgaatatcgccaattctcccatcttcaaagaaacgatctatgccgaacgattcttagacatcatcgtctctagaggcgaaatctttatcggctatccttctaatatgccttttgagaaaaagcccaatcgcatttctatcggaggaaaggatcctttcagcattctcagtgtcctgggagcttacttaaataaagcgccaagcagcgaaaaagaaaaactgacgatttatagagttgaaaagaacaaggcattcgagcttctctctaaagtagccggctccaaatttaccgctgaagaggataaagccgcgaagattctagaagccctccattttgttactgtaaagcaagacgttgctgcaaccgtttctgatctcgttaagtctaaaaaagaactttcgaaagactcaattgaagatctagctaaacaaaaaggctgtctcaaaaaagttgaatactcttcgaaggaatttaaatttaagggatctcttattatcccgacagcagttgagtggggtaaggttctttggaacgttttcaaagaaaatactgccgaggaactcaaagacgaaaatgtcttgagaaaagcattagaggctgcttagccctcttctttcggaacaagaaatcttcattcgaaagcgaagagagtattcagcctgcccgtcgttgctactcaatccggagcagttcgaatcagaagaaaaacagctttcgggaacttcgtttatcaatctcaagataccaataatctttactcctctttccccgtgaaaaatggaaaattagattggagctctccgatcatccatcctgcactgcaaaaccgcaatctaaccgcttacggttaccgctttgtggatcatgacagaagtatttccatgtctgaattccgagagatctacaacaaagatgacttgagaatcgagcttgctcaaggcacttccagccgccgctacctacgcgttgaaatgcctggagaaaaattcttagcttggtttggagaaaattctatttccttaggaagttcttttaaatttagcgtctcggaggtttttgacaacaaaatttatactgagaacgcagaatttacgaagttcctccctaaaccaagagaagacaacaaacacaacggtacgattttcttcgaattagtcggaccaagagtgattttcaactacattgtcggaggtgcagccagttcgctgaaagaaatcttctcagaggccggtaaggaaaggtcatgagacacctaacagtctcgggatttggcgatttcctcggtgttcatggaaatcgcctgatcgtacgcaacggtgataacgttatcctagaaactgcgctttccagactcagaaccatccgaatcgataaaagcgtctccttatcttctaatctgatcctggcctgcgcagcaagaggtattcgaatctactttctcgactggaaaggcgtaggagttgtcgaagtatccggcatgcaccgccatgccgtcgtcggcgtcagaaaatcccaattcgaatgcctcaaatctttgcaagcccagcttctggccaaggaaatcatattttcgaagatccgaaaccaacgtgctgtccttctttatttcagtaaatatctcatgaaaagagagacggcttatggccttttacttcggaatgccggaactcgattagaagagatcagtaacttactgaacactcgagcctcagggcccgactggaagaatacggtaatgggactggaaggaagcgcttcactcatttactggaacgctttaaaagaagcgagacttttacccgagacgttccaagaacgcgaaggaagaggcagcactgaaatcaccaacgctgcacttaactatgggtacgcaattcttcagagttatattcaaaatgctctcggcaacgcaggactggagatctacgcgggactgctccatgcagatcgagccggaaagccatctttggtacttgactgcatggaggagtacagagcgtgggtggtcgatagaaatgtcatcagtctgagatgcaagcttggttctgagcagaactttttggacgctgcgttgaagaaacaattggtggaagttatcgacaaaacgatgagtacaaaaatcaattactcacagaagcaatgcaaattagagaatgttcttcagcggcaggtctataaacttgcaggagctatcgtagaaggcaaatgctaccgcggtattcgattcaaatggtgagttatgtacacacattttctgatttgctacgacatccccaatacgccgaaacgcaccaagtttgctgaaatgctgaaagacctaggacttgtcgccttacagaaatctgtcttctacggagcgcttaccgctacagaaaaacatgctttggatttttcatctaggaagcttctaggccctgaggataaatgcctttgtattccttgcgtgctgaaacccgaagaattcaagaaatcaattggttacgagaattttgaatacagcgagcccgatagctatggattcatctaaccgcgaaagtctacccgtttcttacatacggcaattttgcttttgtccgagaatcccttttctgtccgtgtttttggagattaaaccgccgccacctttgtgggtaaaagacggcgtggactttcatgaaaaggccgcgatgcttcaaaaaagaaggaagctgtcaaaatttaacttgtcgggaaaaggagtgttcaaatcaaacatttatttgaagagctctgtttatccgattcatggaatcgcggacggtatttttatcatggaggatggcgagattattccacttgaattcaaggcccaggacaattttgtcgcttcgcgcggacacgtactacagttaacgggttatgccattcttctagaggagaaattccaaagagaggtaaagcaagggttcatcctttacggcaagaagggcaagagcctgcgcgttgatttcacggaagaaagaaaaaagaaagtgatagaaatagctcaaaagattattagtagtttcgaaacaggacttcttccagactcccctgccacttcagcacaatgcggacaatgcgaatttttaaatttttgcggagaccgcttttagtaacacaaaaagcctcctcagaggctcttcgttaatccggataaggccaaaggcctcagtagccggatctaatatttaatcaaattgatttcagctcgcccgaaggcgacttcgttgttaaaagaatgtaattaaatattgccagaaatattctaaatagtcaagcaataaccccaatttttcgaaaataatgccacttttcgtgcagatctagcattttcgaaaaacagctccgaattcaacctatcaaaatcctttgttttcaaccggttgcgtttgaagtcccaatagtacattcttctaacaactactgaaactactcagatgcacggcgctctaaatatttgccctcaggtcccaatagtacattcttctaacaactactgaaacttactcagattcagtttcgaccgttcagcccgctgtcccaatagtacattcttctaacaactactgaaacaaagttgaaggaaaccgagcaagcgttgtccagacgtcccaatagtacattcttctaacaactactgaaacacggacaagaaagtgacgatcagcgaggcttatgtcggtcccaatagtacattcttctaacaactactgaaacaggggtttgcggtgctaaacggattagtctctgctgggtcccaatagtacattcttctaacaactactgaaacatatcaaagcccatatccgtgacataggcgtaatgatggtcccaatagtacattcttctaacaactactgaaacagatcgcatcattgattaagtcatcgtattcagtcccaatagtacattcttctaacaactactgaaacgatagatagtgccccaatcgtcattaacgtcggttgtcccaatagtacattcttctaacaactactgaaactataaggcatgattacaactgttacctttaacccgtcccaatagtacattcttctaacaactactgaaacacacgatggttgacaatgcgaggagccgttgcgtgtcccaatagtacattcttctaacaactactgaaactgcagacaatcgagttcttcgacaagtcagagtgtcccaatagtacattcttctaacaactactgaaacaacgtggcgcgcgtaatccccgacgacgccgcaggtcccaatagtacattcttctaacaactactgaaactgtcctgcttacggagcgttttcatgactacttctgtcccaatagtacattcttctaacaactactgaaacgtgagcgcggttttcagcacacagaaggccgaacgtgtcccaatagtacattcttctaacaactactgaaacttaaaagagaacacacctttgtcagggtcatgagtcccaatagtacattcttctaacaactactgaaactgtttttgaaatgtgcaatttcagcccgcacgatctgtcccaatagtacattcttctaacaactactgaaactatcatttgctttcgcttctttaatgagttcgtcatgtcccaatagtacattcttctaacaactactgaaacaggattaaagcgccgccaatgcactcccatgagttcacactaacccctaagaaaatcatactcaaaagcgttgccgctactggatcgaaggtctccatcatcccggcaacgtcagcagggataatttcggcagccgcttgaaaaagccaaaacgccgcgatcgttccgaaaagcacaataaacgcataagccaaaatcgagtaaacggtccagtccaaaggttcgttccaaaaatgactaaataacgtcacgctgactcccgtaagcaaaagcgcccagcttgtagctaacccagaaccgacacgcgcaataaatttctgaggcagaagaacataaaaggcgccggtaatgccagagccgattccagcccaaaacccaatacccgatacattgaaatttttaaaagatccgccggtcacgaccaaaacgacgcctgccacagcaacgattccgcaaaagatttccttcaccgtcagatgcttatgctggaacacaaacataaacaacataatccacaatggaacagttgcagttaaaacagcggcaaaaggtgcgtttgcgtattgaatacaaacaaagaacgttaattgcgttccgatgatcgttagtgtgtagattattaagtcaataatgttctgcttggtttcaaatactttcagtgcacctcttttcagcagaaaaaactcaatacctacgaatatggagccggccagcagcatgcgaatcgagatcaaatccataggcgtaaagtgacagttctgaagcaaatactgtccggctacgcccattgatccccaaaaaacagccgctaatccggccatcgtcatgcctttcaatgtgttattcattctcgtctcctctggttcttgagtttgccagctttgcaacgtaactgaacgcgtttctactctttttaagaaacccgacttttcagaaaattctttactttttttaggaagataacagcaatgaataatgcgaaaattcgtctatgaatttcgataactatcgccgcatacttcacctcgacctcgacgcttttttcgcttctgtcgaacagcgtgataatccttcgctgcaagggaaggcaattgccgtcggattaaattccgctcgaggtgtcgttgcgtctgcttcctacgaagcaagaaagttcggagtacgttccgcaatgccctcctcagtagccgcgaggctctgccctaatttaattttcgttcccgggcggatggacgagtacaaaaaagcatcagccgaagttttcgaaatcttttctcgctacgcaaatctcattgaacaagtctctattgatgaggcattcttggatgttacggacgtttggcgcgattatggttacgcgatggaaatcgcaaagctcatcaaagcagacgttcggcgagaagtcggcctcattatttctgccggggtctcttacaacaaatttctcgcaaaaattgccagcgactggcgcaaaccggacggtctatgcgtaatccatccggatgcggcactcaaattcattgaccgccttcccgtcaaggcaatttggggtgtcggcccggtgacctctcaaaaaatggaggctctcggaattttcacaggcaaggatttgagagaaaaagatctttcgtttttagtcgagcaattcggcagttctggactatcctattacaactttgcccgaggcattgatgatcgcccggttagaaccgaacgcattcgcaaacaagtcagcgccgagatcacgctctcaaaagatgaaggaaatctcaataaattagaagatacgctctcggaactgacggactatctgatgacgcgccttcgtaaaaacgactttctcggccgatcgctgacgttaaaagtgcgtttccacaacttcaaaacgattacgcgaacacaaacatctaactctgtcttcaacgagaaatctcagattctcaaaacggccgagtctctgctggaaaaaatcgatttcaatcatcagaccgtccgcctcctaggcattgccattgggaaccgcctggaagaagacactgaaaacatgttgaacctcggcgatatggacgaacttacgcctcggcttctttaggacgccgacggacttgactgagtagagacgcgaagcgctgtaaaaattgcaaaggtctgaagaattgcaacaccgaaaagaacagctgtaaacataccgacgtcaagaagcggtccaaagaaaatcggagtcagagactgacctacatccattccgcaatacgtaaaaccgtagacacgcccgaaagatttcttgcctaacttagcaactgtcgcacctcgaatcataatgtctcggctcggtgctgctacgcctgttcccagacccatcagacacattagaacgactgcccaatacccgcttagaatctgagacgccaaaatagctgccatcacggctgcaaacgtaagacacagcgccacaacacgattgctcgagattttatgctggttcgttaaaaatcctccgatcaaagcgcccgccccggcgcccaagagataagccgtcagagccgccgaggccccggtcagattcaagtgataggcattcttgaaaatcgtctgtgaaaagctttgaagaacgccgaaggcaccggacgtaaaaaagaaaaacatgaagcagtaccagacatcaggcacccgcagaaatccgaaggtcccctcttctttttctttcggagtcggcggcgtagtgtcgcggacagaatcgcgagagaaaacgcctctgaataaaagctcgatgacaagaacaatcagcgccacagaggaagccgcaaacgccgcacctctccagccgaaccaacccgctgtcgtcaccatgaagaaaggacaaatcgcccagccgatattgccggtgatgttatgccaggcaaaagcatgacccaagaagcgatcctgaatgttgtagttcatcagcgaatagtcgctcggatgaaataccgagttgccggcgccggcaagcatcgcagagagataaagcatcgggacattttctgccatgcctaaggctacggcactggcaatgagcaaaaccaggcccgtatacattgaggtccgggcgcctactttatcgaccagaaagccgctcatcgactgaccgactgcacttgtgacaaagaacgtcgtcatcaaggttccgccctgaaggaaattcattccgaagtgcggaagaatccaaggaaacagagaaggaatcactaagtgataaaagtgagagctggcgtgagcgatcgaaacgagaaaaatcgcgaggatgtcgtgaccgcgagttccttgtacgtacatggcgtggcttaagagtgttttttcttattctattcctgacgccttctgaaaatatttaaggccgagagattgttagtctcccggcctttctcaaatgagatcagacgatcttatcggttgtctttacggtcttcaaaaatgaatttgccgtcgacataatccacaaacaccgtgtctcccggagcatatttgcctttgaggatatccacagcaatctggttttccagatagtcttggaccgcacggcgcagcggacgtgcaccgaacagcggatcaaagccgaccttccctatttcatccaaagcggcttcagttacatccagaccgatgttctgctgttccatgcgtttcgccagcttacgaatctggatgcgggcgatttcgcgaatagccttctggtcaagagcattgaagacaacgatttcatcaatacggttgatgaattcgggtctgaagtgcttcttgacctcgtccattacggcttccttcacaacttcaggatcttcaccctgacggttcatgatttcctgagaaccgaggttggaagtcataatgatgacggtattcttgaagtcaaccgtgcgtccctgaccgtcggtcattcggccgtcgtccaaagcctgaagcaggatgttgaagacgtccggatgagctttttcaacttcgtcgagaagaatcacgctgtaaggtttacggcgtacggcttctgttaagtagccgccttcttcatagccgacatatcccggaggcgcaccgatcaaacgagccacggagtgtttctccatgaattcgctcatatcgatacggatcatggcgtcctcagtgtcaaacaggaattcggccaaagccttcgtgagttccgtcttaccgacgcctgtcggaccgaggaagaggaaggaaccataaggacggttcgggtcggacaagccggcacgagaacgaagaatggcgtcaacgactttatcaaccgcttctttctgtccgacaactcgcttaccgatgtacttggccatatccagaagtttctggcgttcgccttccatcatcttggagaccggaataccagttgcgcgggaaaccacttcggcgatttcttcagcacctacctgtgtacgcaggagcttcggtttttcgtcgtagagcttggtttcttctttttcttccttcacaagctgtttttcaagttccggaagtttgccgtactggatcgcggcgagttcttcatacttgccggaacggcgaagctcttccatcttggtcttgagcttgtcgatttcgtcacggacttctttagaacccaaggcagcgttcttttctttcttccagatttcttccaaatcggaatactcgcggcttaacttagcgatttcttcttccaaaccgcttaagcgcttcttactggcttcgtctttttctttcttaacggcttcacgttcaatcttcaattgaatcagacgacgatccagcttatcgagttcttcaggcttggagtcaatttccatcttgatgcgcgctgccgcctcatcaatcaggtcaatcgccttatccggaaggaaacgatcggtaatgtagcgggcggaaagttcagcagcagccacaatcgccgggtcggtaatttcaacaccgtggtggacttcatacttttcctgcagaccgcgcagaatagcaatcgtgtcttcgacactcggttcgttgacgatcactttctggaaacggcgctccagggcgggatctttttcaatgtactttctgtactcgtccaaggtcgtggcaccgatcacatgcagttcaccgcgggaaagtgcaggtttgagcatgttgccggcatccattgcaccttctgtcttaccggcaccgaccactgtatggatttcgtcgataaacagaatgatgcggccttcttcggcaaccacttccttcagcagtgctttcagacgttcttcgaattcgccgcggtatttcgcaccggcgacaagtccggccatatcgaggctcaagacgcgtttgttgcgcagtgtgtcgggcacttcaccgttcacaatacgctgtgccaaaccttcgaccacagcggtcttaccaacaccgggttcgccgataagaacaggattgttcttacttctgcgctgcagaatctgcatcgcgcgacgaatctcgtcatctcgcccgatcacagggtcgagctttccttctttggccttttcggtcaggtcaactgtgtacttcttcagcgcttcacgattgttctcagcttcgggattgtccactttttcacctccgcgcacggataaaattgcattttctaggctcggtttattgaggccttcctcttgcgcaagacgtgcggcgtcacacttgctgtcgcataaggctaaaaggaagagatcggtggaaatgaatttatcgccgagtctttcggcctctctttccatcgaattaaggattgccatcaactcacggctgatttggacattgtcggctgctccggaaacttccggcagtttgccgatcgcttccttcaccttacgttcgagttctctgactctcacgccggagcgctctaagagcgtccttccggtgccctcggtgtcctttaataccgcaagcagcaagtgaagcggatcgatgtactgctgagaacgctcaactgccatc

SEQ ID NO: 125 - DNA, 19544 bp, synthetic construct
  source 1..19544: mol_type = other DNA
  misc_feature 1..19544: note = Synthetic
ttatcacgtgctatgagaagccgactgcaatatacgaacaacctgtgaaagagctttgagtacctccacttatacggacgactgaattggaaatcctctcccatgccaaaatgcatcctgagttgtttgcatagcttccttttctaaaacttatgtcgacttggtagcttgtattgctgaagcttcttggaaaatgaacatctgttgaagcattgttagggtagccaagttctccccattgaacagtaaaccctgtggagttatcacgtgtttttatttaattttttataggagatcaaaatgatttatttgattaaatttgaccacagcggtcgtcgttctgaaacctttgtgaaagacgaaaaaactcctgaacaagttcaggaacttctgaatgatgggtttctcgaaatttcagaaacggaatatcaacttctaattgggaacattgatggtcaagaatatgtccggacctcttctggagaattcgaaccatatgtccctcctgcccccactcaagatgaaatcaaccttcaaatccaacaacggattacaggagatattcaggactatctggatgaaaaagccaaagagttgaactacgattcttgcttaagcgcgtgttcttacttcaatacgggcgttgaaaaatttgacaaagaaggcgcggccttcagggaatggaggtcggcagtatggagtaaaggttatcagattctcaacgaatgtatttccggccagagaagctcggtgcctgacaaaattctgctcatttccgaattgccagttcttgaaattacttactaattgcttcttgtgtcaggcacaggctttaactgtcggattagtcggtggggttcgcggatagatcggggttctcatcgttttcttgggaactttgagcacaagctctaataaacgaactccattgctccataacttcctttctcgcttctaaaaaatcgcttctttgataggctcgagacacggagtctccgacaacgtgtgcaagacaagattccgctatttcataagaaatgccttgatccgccagccaagatctggcaatagatcttagaccgtgtggcactagacgatctttgaagaaatcctgggacctcatgtaattcgttagggtttgactgtttacgtggttataggatttttgtccgggaaatataaacactgaccgtttgtgctttgtatcggatttaatttccctgagtaagtcggtcgcaaaggctgtcaatgggacgcggtgaactcgtcgcattttcatctcttctgcggggattgttaatgtattgttttctatccaatcccacctcagttttgcaacctcacccggccgaagcattgagtaaagagaaagtagaaaaatatgcttaatacgtttcggagctttctcttccataaccgacagaacctcaggcaaactttgccatggtattgatggccgcggttttttctttggtggcttaaataaccttgatagaccgttgattgggttgtgatgaacatatcctgcacatactgcaagatcgaaaatttccttcgtccgcatgaggcatcttttcatggtggctcttttacctgttaactctatgggctttaataaattgataatcattggcgcagtgatttgatcaatttgtttaagccttagtttcggcaggacgtatttttcgagtcttagtcgttcgcttctataactgacgatctctccttttttaagactcttccataaagcataggcatcgttaaatgtgtaaccccgtggtggcactaagtcgtattgccgacgcaattgccgtgctttttgtgcggcctcgcgtctatttatatcgggccagtgtcctattgagatatccgaaatcgatcctttgtgaggaattctgacaacccacgactttattccggatgggagaactctaagagaaagaccattgtcaaccgttatctgataacgcttcgtattcggagtaagtaaggatatggctttatctgtgtatcggtttttttgagtcatctgaaatgaaaaatattttcgttaaaggttttagttaattgcaaggagaagtatgaaacagacgacctgggaggattttatgactgcgatcgcgatgattacagtcattttgattattgtctgctcgatttccggagcagcaatgccgtatgtgaaaggggaaaaaatgtttaagtttataaggtacttagtggaggtcattacctcggcggctgctggctttatcgtgtttttgctgttgcgcgtaacggatattcctggagaatggatcgcggccttctccgggatttccgcttatttcggaactcggattatgaacgtgttgtacgggctattgaccggacgactaaaagttatgtttcacagcggcaacagaaaggacgacaactatggaaattagacaactcgctaacgacttgataaaagcaatgctattttttgccttctacatggcaggtgtcttatccagtgaatacctgtcccaattaacgatcagtttacaaaaagatcgaattgaatcgcttcaaaacgaaacagctattcaacggcttcagattaatgaactaaatcggcgtgcctctatcaatgcagaaaacctgcaggagttgcgagcaatgaaagtcgatttacaaaacattaaaaacgatattcaatctttgaagggattacacaaatgagcgaacattttcaaccgaaggaattcgcgtctaaggacggccgcccttccccttatcctctcgtcgtccaggaggggctatatcaattacttgaagaaattagagacgagttcgggaaacctatcgttgtgaattccggatatcgttctccggagcacaataaaaacatcggaggagcgaaaaactcctaccatgttaagggaatggcagccgatattagaccgcagcatggtcccgattttcaacgggaactcaaaaggctaaaacagatcgcgaacaaaaaatgttatggcggagttggtgactatccgacatttgttcacgtggacttcggaccgtggaggaggtggaatggatgaacattcttttaatcgcgaaaatgggagccgctgtagtggctctttttattgcctattggattggtctgaatgacggaaaaaattctgaggaattgaaaaatgcacgtgttacgatatcagcactcgatacagctctgcaggaacagcaggccaagcaaaaaagcgatgcactggctctatctaaccttcggatcgctgagtctcgttctcgtgacgaacttgactggctgcgccagcaattgtccgaaattgagcgaaaagcaaagaccgataccgatagacagcgtaatcgatgtctccgcaacagagcagaagttggagaggttgcagcaggattacttagagctgttaaattctgtcaagaaaaccacaaatgaggggaagtagaatgaaaaacgaattagaaagatatggaattcaggactcagatcgaactccctgcgagatttggacccgagtaatgggctaccaccgtccgatttcttcctttaacatcgggaagcagggggaggtagcggagagaaagtatttcgaccagaggaaatgctcttgtgaatttcaaagaaaacactaattcttttgcggggcaatttgtggggcaaaattttctgacctcttgaaagtcaataaattcagcgctgttctattcaggttcgggccaccaaatctccctcttcttacctttgcaaaagttacttcacccacacttttattgaattagctcaaccgtttggttcatcgcaggagtcattgaacgtcattggtctatgcattttcctgagccttttggggaatgcgaactatctgccgtttcccgcaccatttcagaaaaaccacagaccaatcttttttcttagcaaatttaggaaattcttcttacatccccaacaaagccgttacaacagacagaaataaaacctaattttcgaaatatttgaaaatcttcggaaagtaatgcttacgcgataaaaaaaggaattgctttgtagcctaggtaaattccttctagtggattaactgaatccatgtcagttcagtcaacacaaaagcctcaaacagaggctccttgttaatccggataaggccaagaggcctcagtagccggatctaatatttaatcaaattgatttcagctcgccctagggcgattttgttgttgaaagaatgtaactagatgttactacaactatcaaaaacagtcaagcaatcacccaaatcaccccaaattttcgaaaataatggcactttttgtgcagatcgaccattttcgaaaaacagatcagaaaccaactgtcaaaaatcatttgttttcaatcagttggtttcggagcttcaatcgtacatcctttcaacaacaactgaaacgggagtacttcatccacaaaaaaaggaatcagatagcttcaatcgtacatcctttcaacaacaactgaaacaggcgctcggccgtgtctttgagcagctgatatgacgcttcaatcgtacatcctttcaacaacaactgaaacgatttataacgaatggttccgtgatgagaatcttagcttcaatcgtacatcctttcaacaacaactgaaacgcttcggggcgttcttttttgtctgtttaggggtggattcaatcgtacatcctttcaacaacaactgaaactttacccctctaatccttaatcgacagcctcaaaaccgcttcaatcgtacatcctttcaacaacaactgaaacattttttgcagtctcgaaggtcatgcaataattcggcttcaatcgtacatcctttcaacaacaacagagtgggccgtaaatgagaaaggcgactttatgcttcaatcgtacatcctttcaacaacaactgaaacacgggtacgcaagaatcagttacagcgatcaagactgcttcaatcgtacatcctttcaacaacaactgaaactcattccaaaaaaagggaaaattccgcccctgaccaaactcagcctaatttttaacagatagtcaaagtcaggaaaatagttttctctttaattgcatattctttcaacagaagtcgagcaatgcagctacaaagcattcaaacagtttcgaccgtacttttttaaatgaactcgtatttgtggacccactgaaataaatatatccaaactttctaattcaacctataattttgtaactaaataataaattcttgaggagggaaaaatggggaaaactcacattattggcgtcggtcttgacttgggaggaacctatactggaacttttataacctctcatccatctgacgaaactgaacacggagatcattcgtctgccttcaccgtcgttaatagtgaaaaactctctttctcttcaaagtcaagaacagccgtaagacaccgagtccgctcctacaagggattcgatttaagaagaagattattgcttttagttgcagagtatcaacttttccaaaagaagcaggcattgacaccggaagaacgcgaaaatcttcgtatcgccttgtccagttacctcaaaagaagaggttacgcccgtacagaagctgaaactgatgtgtctgtattagaaagtcttgacccttcagtgttttcctccgcgccgggtttcactaatttcttcaatgattcggaacctctgaatattcagtggaaagtcatctcaaattctcccgagaccgcccgagccttaaataaggcagtttccggacaaaaagaggcagactttaaaaagtacgttaaaaccagcttccccgaatacagtgcgaaagagattctcgccaattacgttgaagggcgccgcgctatcctagacgcctcaaaatacatcgcaaatctccagtctttaggacacaaacatcgctctaaatatctcagcgatatccttcaagacatgaagcgagattcaagaatttcacgtctatccgaagcttttggctccatcgataatttgtggagaattatcggcaacatctctaatcttcaagagcgtgcggttcgctggtatttcaatgatgcaaaattcgagcaaggacaagaacaattagacgcagataaattaaagaatgtcctcatccgtgctttaaagtacctccgatcagacgataaaaaatggtctgcttctcagaaacaaatcattcaatctttagaacagtccggcgatgttttggatgtgctcgcagtccttgatcccgaccgcaccattcctccttacgaagaccagaacaaccgaagacctccggaagatcagacgttatatctgaacccgagggctttatcttctgaatatggagataaatggaagtcttgggcgaataaatttgccgccgcctatcctcttctcacagacgatctggctgaaatcttaaaaaacacggatcgtaaaagcagaataaaaatccgatcggatgccctgcccgactctgattatcggcttacctatatcttgcagcgagcgcttgatcgaagcatcgctcttgatgaatgctcgattagaagaaccgctgaagacttcgagaacggagtcgtcattaaaaacgaaaaattagaagaagtactctcgggccatcagctggaagagtttcttgaatttgcaaaccgttactatcaagaaacggcaaaggcaaaaaatggtctttggttcccggaaaacgctttgctggaaagggctgacctgcatcctccgatgaaaaataaaatccttaatgtgatcgtcggacaagccctcggcgtgtcacctgcaaaaggaactgagtttatcgaagagatctggaaccgcaaagtcaaaggtcgctcaactgttcgctcgatttgcaatgcaattgagaatgaaaggaagacttacggtccttatttttctgatgactacaaattcgtcaagacagcactaaaagaaggcaaaacagaaaaagaactctctaagaagtttgcttccgttatcaaagggctgaagatggtcaacgaagttgtcccctttatcggaaaagaactccggttgtcggatgaggctcagagtaaatttgataacccgtattctttggctcagttatataacctcatcgaaaccgaaagaaacggattctctaaagtctcacttgccgcccacttagaaaacgcctggcgcatgacgatgacagacgcctcggcacaatgctgtcgcctccctgcggactgcgttcgcccattcgacggatttattcgcaaagccatcgacaggaattcttgggaagttgctaaaaggattgcggaagaagttaaaaagagcgtggattttactaatggaaccgtaaagatcccggttgccgttgaagctaactcttttaatttcaccgcctctcttaccgacttgaagtacattcagcttaaagaacaaaaactgaagaagaagctggaggacattcaacgcaatgaagagaaccaagagaagagatggttaagcaaagaggaaagaatccgtgctgacagtcacggaatttgcgcttataccggaagaccgctcgatgacgtcggagaaatcgatcacattattcctcgcagcctgacattaaagaagtcagaaagcatttataacagtgaagtaaaccttatctttgttagcgcacagggaaatcaagagaagaaaaacaatatctacttactctctaatcttgctaaaaattatctggctgctgtctttggcacgtctgacctgaaccaaattactaatgagatcgaaagcacagtgctccagctaaaagctgcaggcaggcttggctatttcgatctgctttctgagaaagaaagagcatgtgcccgtcacgctttattcctgaactcagactccgaagcccgtcgggcggtcatagacgttctaggttccagaagaaaagcctctgtaaatggtacgcaggcttggttcgtccgctccattttctcgaaggtaaggcaagcacttgcggcttggattcaggaaacaggcaatgaactcgtttttgatgccatctcagtccctgccgccgattcgagcgagatgcggaaacgctttgctgaatatcggccggaattccgtaaagccaaggtgcagccggtcgcttcacactccatcgacgctatgtgtatttacttggcggcctgctctgatcctttcaaaaccaagagaatggggtctcagttagccatttatgagccgattaacttcgacaatctgtttaccggctcgtgccaagttgtccaaaacacaccgagaagttttactgataagacgaatatcgccaattctcccatcttcaaagaaacgatctatgccgaacgattcttagacataatcgtctctagaggcgaaatctttatcggctatccttctaatatgccttttgagaaaaagcccaatcgcatttctatcggaggaaaggatcctttcagcattctcagtgtcctgggagcttacttaaataaagcgccaagcagcgaaaaagaaaaactgacgatttatagagttgaaaagaacaaggcattcgagcttctctctaaagtagccggctccaaatttaccgctgaagaggataaagccgcgaagattctagaagccctccattttgttactgtaaagcaagacgttgctgcaaccgtttctgatctcgttaagtctaaaaaagaactttcgaaagactcaattgaagatctagctaaacaaaaaggctgtctcaaaaaagttgaatactcttcgaaggaatttaaatttaagggatctcttattatcccgacagcagttgagtggggtaaggttctttggaacgttttcaaagaaaatactgccgaggaactcaaagacgaaaatgtcttgagaaaagcattagaggctgcttggccctcttctttcggaacaagaaatcttcattcgaaagcgaagagagtattcagcctgcccgtcgttgctactcaatccggagcagttcgaatcagaagaaaaacagctttcgggaacttcgtttatcaatctcaagataccaataatctttactcctctttccccgtgaaaaatggaaaattagattggagctctccgatcatccatcctgcactgcaaaaccgcaatctaaccgcttacggttaccgctttgtggatcatgacagaagtatttccatgtctgaattccgagagatctacaacaaagatgacttgagaatcgagcttgctcaaggcacttccagccgccgctacctacgcgttgaaatgcctggagaaaaattcttagcttggttcggagaaaattctatttccttaggaagttcttttaaatttagcgtctcggaggtttttgacaacaaaatttatactgagaacgcagaatttacgaagttcctccctaaaccaagagaagacaacaaacacaacggtacgattttcttcgaattagtcggaccaagagtgattttcaactacattgtcggaggtgcagccagttcgctgaaagaaatcttctcagaggccggtaaggaaaggtcatgagacacctaacagtctcgggatttggcgattttctcggtgttcatggaaatcgcctgatcgtacgcaacggtgataacgttatcctagaaactgcgctttccagactcagaaccatccgaatcgataaaagcgtctccttatcttctaatctgatcctggcctgcgcagcaagaggtattcgaatctactttctcgactggaaaggcgtaggagttgtcgaagtatccggcatgcaccgccatgccgtcgtcggcgtcagaaaatcccaattcgaatgcctcaaatctttgcaagcccagcttctggccaaggaaatcatattttcgaagatccgaaaccaacgtgctgtccttctttatttcagtaaatatctcatgaaaagagagacggcttatggccttttacttcggaatgccggaactcgattagaagagatcagtaacttactgaacactcgagcctcagggcccgactggaagaatacggtaatgggactggaaggaagcgcttcactcatttactggaacgctttaaaagaagcgagacttttacccgagacgttccaagaacgcgaaggaagaggcagcactgaaatcaccaacgctgcacttaactatgggtacgcaattcttcagagttatattcaaaatgctctcggcaacgcaggactggagatctacgcgggactgctccatgcagatcgagccggaaagccatctttggtacttgactgcatggaggagtacagagcgtgggtggtcgatagaaatgtcatcagtctgagatgcaagcttggttctgagcagaactttttggacgctgcgttgaagaaacaattggtggaagttatcgacaaaacgatgagtacaaaaatcaattactcacagaagcaatgcaaattagagaatgttcttcagcggcaggtctataaacttgcaggagctatcgtagaaggcaaatgctaccgcggtattcgattcaaatggtgagttatgtacacacattttctgatttgctacgacattcccaatacgccgaaacgcaccaagtttgctgaaatgctgaaagatcttggacttgtcgcactacagaaatctgtcttctacggagcgcttaccgccacagaaagacatgctttggatttttcatctaggaagcttctaggccctgaggataaatgcctttgtattccttgcgtgctgaaacccgaagaattcaagaaatcaattggttacgagaattttgaatacagcgagcccgatagctatggattcatctaaccgcgaaagtctacccgtttcttacatacggcaattttgcttttgtccgagaatcccttttctgtccgtgtttttggagattaaaccgccgccacctttgtgggtaaaagacggcgtggactttcatgaaaaggccgcgatgcttcaaaaaagaaggaagctgtcaaaatttaacttgtcgggaaaaggagtgttcaaatcaaacatttatttgaagagctctgtttatccgattcatggaatcgcggacggtatttttatcatggaggatggcgagattattccacttgaattcaaggcccaggacaattttgtcgcttcgcgcggacacatactacagttaacgggttatgccattcttctagaggagaaattccaaagagaggtaaagcaagggttcatcctttacggcaagaagggcaagagcctgcgcgttgatttcacggaagaaagaaaaaagaaagtgatagaaatagctcaaaagattattagtagtttcgaaacaggacttcttccatactcccctgccacttcagcacaatgcggacaatgcgaatttttaaatttttgcggagaccgcttttagcaacacaaaaagcctcctcagaggctcttcgttaatccggataaggccaaaggcctcagtagccggatctaatatttaatcaaattgatttcagctcgcccgaaggcgacttcgttgttaaaagaatgtaattaaatattgccagaaatattctaaatagtcaagcaatcaccccaatttttcgaaaataatgccacttttcgtgcagatcgagcattttcgaaaaacagctccgaattcaacctatcaaaatcctttgttttcaaccggttgcgtttggaggtcccaatagtacattcttctaacaactactgaaaccgttcggacctgtgtatccagaaccctgagcggtaagtcccaatagtacattcttctaacaactactgaaaccttccgtcatgtcggaattgagcagggaggattccgggtcccaatagtacattcttctaacaactactgaaacttacggttggcttttagctaacggagcctctgtgctggtcccaatagtacattcttctaacaactactgaaactaaacctcacagtgacatgaccaggccccagctccggtcccaatagtacattcttctaacaactactgaaacgtttagagactggtttgaggtagccgcggaatccaggtcccaatagtacattcttctaacaactactgaaacctaatccggccatcgtcatgcctttcaatgtgttattcattctcgtctcctctggttcttgagtttgccagctttgcaacgtaactgaacgcgtttctactctttttaagaaacccgacttttcagaaaattctttacttttttaggaagataacagcaatgaataatgcgaaaattcgtctatgaatttcgataactatcgccgaatacttcacctcgacctcgacgcttttttcgcttctgttgaacagcgtgataatccttcgctgcaagggaaggcaatttccgtcggattaaattccgctcgaggtgtcgttgcgtctgcttcctacgaagcaagaaagttcggtgtacgttccgcaatgccctcttcggttgccgcgaggctctgccctaatttaattttcgttcccgggcggatggacgagtacaaaaaagcatcagccgaagttttcgaaatcttttctcgctacgcaaatctcattgaacaagtctctattgatgaggcattcttggatgttacggacgtttggcgcgattatggttacgcgatggaaatcgcaaagctcatcaaagcagacgttcggcgagaagtcggcctcattatttctgccggggtctcttacaacaaatttctcgcaaaaattgccagcgactggcgcaaaccggacggtctatgcgtaatccatccggatgcggcactcaaattcattgaccgccttcccgtcaaggcaatttggggtgtcggcccggtgacctctcaaaaaatggaggctctcggaattttcacaggcaaggatttgagagaaaaagatctttcgtttttagtcgagcaattcggcagttctggactatcctattacaactttgcccgaggcattgatgatcgtccggttagaaccgaacgcattcgcaaacaagtcagcgccgagatcacgctctcaaaagatgaaggaaatctcaataaattagaagatacgctctcggaactgacggactatctgatgacgcgccttcgtaaaaacgactttctcggccgatcgctgacgttaaaagtgcgtttccacaacttcaaaacgattacgcgaacacaaacatctaactccgtcttcaacgagaaatctcagattctcaaaacggccgagtctctgctggaaaaaatcgatttcaatcatcagaccgtccgcctcctaggcattgccattgggaaccgcctggaagaagacactgaaaacatgttgaacctcggcaatatggacgaacttacgcctcggcttctttaggacgccgacggacttgactgagtcgagacgcgaagcgctgtaaaaatcgcaaaggtctgaagaattgcaacaccgaaaagaacagttgtaaacataccgacgtcaagaagcggtccaaagaaaatcggtgtcagagactgacctacatccattccgcagtaggtaaagccgtaaacgcggccgaaagatttctttcccagcttcgcaactgtcgcgccgcgaatcataatgtctcgactcggagcagccacgcctgttcccagacccatcagacacattagaacgactgcccaatacccgctcaggacctgagacgccagaatagctgccatcacagcagcgaaagtaagacacaacgccactacacgattgctcgagatcttatgctgattcgttaagaatccgccgatcaaagcgcccgccccggcgcccaagagataagccgtcagagccgccgaggccccggtcagattcaagtgataggcatttttgaaaatcgtctgtgaaaagctttgaagaacgccgaaggcaccggacgtaaaaaagaaaaacatgaagcagtaccagacatcaggcacccgcagaaatccgaaggtcccctcttctttttctttcggagtcggcggcgtagtgtcgcggacagaatcgcgagagaaaacgcctctgaataaaagctcgatgacaagaacaatcagcgctaccgaagacgccgcaaacgctgcgcctttccagccgaaccagcccgctgtcgtcaccataaagaagggacaaatcgcccagccgatattgcccgtgatgttatgccaggcaaatgcatgacctaagaagcgatcctgaatgttgtaattcatcagcgaatagtcgctcggatgaaataccgagttgccggcgccggccagcatcgccgagagataaagcatcgggacattttctgccatccctaaggctacggcactggcaatgagcaaaaccaggcccgtatacattgaggtccgggcgcctactttatcgaccagaaagccgctcatcgactgaccgactgcacttgtgacaaagaacgtcgtcatcaaggttccgccctgaaggaaattcattccgaagtgcggaagaatccaaggaaacagagaaggaatcactaagtgataaaagtgagagcaggcgtgagcgatcgaaacgagaaaaatcgcgaggatgtcgtgaccgcgagttccttgtgcgtacatggcgtggcttaagaatgttttttcttattctattcctgacgccttctgaaaatatttaaggccgagagattgttagtctcccggcctttctcaaatgagatcagacgatcttatcggttgtctttacggtcttcaaaaatgaatttgccgtcgacataatccacaaacaccgtgtctcccggagcatatttgcctttgaggatatccacagcaatctggttttccagatagtcttggaccgcacggcgcagcggacgtgcaccgaacagcggatcaaagccgaccttccctatttcatccaaagcggcttcagttacatccagaccgatgttctgctgttccatgcgtttcgccagcttacgaatctggatgcgggcgatttcgcgaatagccttctgatcaagagcattgaagacaacgatttcatcaatacggttgatgaattcgggtctgaagtgctttttgacttcatccattacggcttccttcacaacttcaggatcttcaccctgacggttcatgatttcctgagaaccgaggttggaagtcataatgatgacggtattcttgaagtcaaccgtgcgtccctgaccgtcggtcattcggccgtcatccaaagcctgaagcaggatgttgaagacgtccggatgagctttttcaacttcgtcgagaagaatcacgctgtaaggtttacggcgtacggcttctgttaagtagccgccttcttcatagccgacatatcccggaggcgcaccgatcaaacgagccacggagtgtttctccatgaattcgctcatatcgatacggatcatggcgtcctcagtgtcaaacaggaattcggccaaagccttcgtgagttccgtcttaccgacgcctgtcggaccgaggaagaggaaggaaccataaggacggttcgggtcggacaagccggcacgagaacgaagaatggcgtcaacgactttatcaaccgcttctttctgtccgacaactcgcttaccgatgtacttggccatatccagaagtttctggcgttcgccttccatcatcttggagaccggaataccggttgcgcgggaaaccacttcggcgatttcttcagcacctacctgtgtacgcaggagcttcggtttttcgtcgtagagcttggtttcttctttttcttccttcacaagctgtttttcaagttccggaagtttgccgtactggatcgcggcgagttcttcatacttgccggaacggcgaagctcttccatcttggtcttgagcttgtcgatttcgtcacggacttctttagaacccaaggcagcgttcttttctttcttccagatttcttccaaatcggaatactcgcggcttaacttagcgatttcttcttccaaaccgcttaagcgcttcttactggcttcgtctttttctttcttaacggcttcacgttcaatcttcaattgaatcagacgacgatccagcttatcgagttcttcaggcttggaatcaatttccatcttgatgcgcgctgccgcctcatcaatcaagtcaatcgccttatccggaaggaaacgatcggtaatgtagcgggcggaaagttcagcagcagccacaatcgccgggtcggtaatttcaacaccgtggtggacttcatacttttcctgcagaccgcgcagaatagcaatcgtgtcttcgacactcggttcgttgacgatcactttctggaaacggcgctccagggcgggatctttttcaatgtactttctgtactcgtccaaggtcgtggcaccgatcacatgcagttcaccgcgggaaagtgcaggtttgagcatgttgccggcatccattgcaccttctgtcttaccggcaccgaccactgtatggatttcgtcgataaacagaatgatgcggccttcttcggcaaccacttccttcagcagtgctttcagacgttcttcgaattcgccgcggtatttcgcaccggcgacaagtccggccatatcgaggctcaaaacgcgtttgttgcgcagtgtgtcgggcacttcaccgttcacaatacgctgtgccaagccttcgaccacagcggtcttaccaacaccgggttcgccgataagaaccggattgttcttgcttctgcgctgcagaatctgcatcgcacggcgaatctcgtcgtctcgcccgatcacagggtcgagctttccttctttggccttttcggtcaggtcaaccgtgtacttcttcagcgcttcacgattgttctcagcttcgggattgtccactttttcacctccgcgcacggataaaattgcattttctaggctcggtttattgaggccttcctcttgcgcaagacgtgcggcgtcacacttgctgtcgcataaggctaaaaggaagagatcggtggaaatgaatttatcgccgagtctttcggcctctctttccatcgaattaaggattgccatcaactcacggctgatttggacattgtcggctgctccggaaacttccggcagtttgccgatcgcttccttcaccttacgttcgagttctctgactctcacgccggagcgctctaagagcgtccttccggtgccctcggtgtcctttaataccgcaagcagcaagtgaagcggatcgatgtactgctgagaacgctcaactgccatcgattgtgcttctccgagcaactcttggaaccgagttgtaaattgatcttgacgcataagagtttgaatctccttttgttaaggaaacattcggaatcaactcctgttccctatgcgtctattctgaagagtccgcggagacggacgtgcgtttttctcttattttgagcttatttgctccacttggattttgcggcttcgtcggtctctttggcctgtacccagcgggtgccctcgcccaccttttccttcttccagaacggagcttcggtcttcaagtaatcaataatgaactcacaggctttaaaggcttccccgcgatgcgcgccggaaactccgacaaaaacgatctggtcggtcgcgaacagttcaccgacacggtgaatcaccgtcgcatccataatatcccagcgtttctttgcctctttcacaatggccgtaagggctttttcggtcattccgggatagtgctctaaggtcatggaagcgacttcgtcaccttcgttgaggtctcgcaccgtgcctaaaaacatcacgacggctccgactttgggagacccatgcagtgccgctacttcagcctgaacatcaaagtcttctgtttgaactgcaatcttcattgagacctcttataaattgaattccgtaaacgggatgtaggtcaccaaatcgcccttcttcaagtcagcttcagccgggatgtcggctaaaccgtcagcccaggtacaggagctcagaaccgcggagttttgggtgcgatagttttccagctctccggcgccgttgcggcggacacgaatgaactcgcggcgggatccgcacttgtaatcaaaggccagcggaaggatataacccttcacatcgatctggctgcggccggaaagtttaaggatcagcggctgagcaaacagcaggaaggtcacaaaaccggagacagggttgccgggaaggccgataaacggaacaccgcggacttcgcctttagcaaccggtttgccgggcttcatggcgatgcgccacatctgcatctttccgagctcttcaacagctctgcgaatgaagtcggcttcgcctacgctcatgccgccgctggtcaaaatgaaatcggacttgcgggaggctttgcggaaagcttctaaagttgcttcaaacgtatcgggaatattgccgtaatccactacatcgcagcccagctgatggagcagaccgcgcaggacaaaacggttggagttataaatgccgccctcgactagcttttctcccggcatcgcgagttcgtcgccggtgaagaaaagcgaaacacgaatcggacgataaaccttaactgtggaaacgccgatgctcgcagcaacgccgagcgccggaggcgttaaacggtcgcccctcttcaatacagtctgaccgatatcgatatcgcagcctgctcttcgaatccaggcacctgtcttgggctcgcagtggaattccacgctgccgtcttccatctcggaagcttcttcctgaggaatcactgcatcggcacccggaggaatcggggcgccggtaaagatgcgagcgacagtgccgggttcaagttcggtgccgacgtggccggcaaaaattcgctgagaaaccggaaaattgcggcgaccgcctgcaaaatcggcgcagcgaacggcgtagccgtccatctgagaattatccagaggcgggactttaatttcggagacgatgtcttcggcgaggattttgcctgccgaataaagggtcaccatatcttctacttcggcaaccgcctccgcaccttccaaaatctttgcttttgcttgttcaactgtcagcatttccgtgtttctccgtcttcgagacctagctctcgaactatgaagcgagtaatggtttcggcatcatttatatcaaaaatcggcagatttccaaatgccgggtgtgtcgtatcggtcaccaccgcagagattcgcttgtcgtgcgcgcaaatcggtgtttcatgccgctcgagcttgcgccaaacctccagacgaagcgcttcctgctcttcggtcttaaagccttcgacaatcacgatatccgcaggatctaaatgacgaattaggtccgacagcgtaggtttatctttcggcgtctcggtgagcatagcccagcgctcgtcggtatgcacaatgacttgcgtcgcaccggcttcacgaaaacggtaagagtccttccccggcttgtcgatatcaacgttgtgatgggcgtttttaacggccgagactttgagaccgcgtgatgctaacagcgcgatgattttctcgatcaag

SEQ ID NO: 126 - DNA, 17356 bp, synthetic construct
  source 1..17356: mol_type = other DNA
  misc_feature 1..17356: note = Synthetic
ataaaaggagacctatatcgtggttcgttgctcaatttctggtgcgtccgtcctgtccataaccagcttcctacagtgctttgatataattcccatatcgacctactactttaggttgacactaaaaaccccgcctagctcctaactagacggggtttgtttttggtaataaaaaaccgccacgcgggcggttatggtttgttatcccgaactcccagagcatagctccgggattttttcattttgagaaaaatctttcgtaaatttaaatagttgaaattgactctaagggtaattcctgctattatagtctatatttatatataaggactattatgactcgaccaagaactctgcccgacgaccatttccgtttctccaccttcagaaaaggcgattccacttatgtctatggctataggaatgagtgggatccggaaaagaaacagtcaagaattgccaaaagaatttatgtcggcacgcttaatgaaattaccggaagagttaagctgggcaaaaaatacttatcaaatcatcctgagtacgaaggcaagacgctttattttgaaaatcgcaccctcgttgaaagatccgagcaagaggttgcagcagaagtcgggcaacgcgaaacttcatgggcttcaaacaatctttcttatgctgccacctgggccctttggcagttcgcatccaagaaccgaattctgcaaaacttacaggcggtctttggaaaacaactgggaaccaacctcctggctttagctatctatcagcttttagacgggggcgcgatgaacggctatgaagactggcttcctgacaactggcttcctgtgagcgctcctctgagctctcagcgcatcagcgaattgcttgctcaagtcgaccacggggatatggttaattatttccgtttacgatttgatcgatccaaagaaaattatcagaaatggcttgaggaactaacacagaacgccaagaaaaaaggctcggccactgcgccttcaacattgcaaaaaatgtacatggcgctggactccacggcaataagcaccttctctatgacaatcgaggatgcggcttacggacacgccaaacagaatcccgaactcaagcaaatcaaccttacgctagccgttgatttcttgaacggagatgtctgctatgcccgagaagatgaaggttcgatcaccgataagtcggtctataggtccgttctggcccagatgaaaagttacggctttgacctcgacgagacagttctggttaccgaccgcggctactcgtcgataatgaatctccagagtctttttaatgccgacgtcagcttcgtcgccggcgttcctatcgtagaaaaaggcctgaaagataaatttgcgaagttccgtgaagcgctttgcgacctcgctttctacaacagcgaatacgacgtttattgcagaaccattaaggaagactggaagcaaaacacagagggcggttcgatagatcgcacctgctttgtgcatctttaccgattccccgaaattgctctatcgcagcaaaaacagttactcaagaaagtcgacaaagccctggataaaaagcgcagcggacgagtcgtagatcgagatgactggaactttgttgcccgcttcatcaccgaacgcaaagaagagcatgacggaaaagaaaagaaaatctggaagaagaaccttgaggcactccgatcctgggagcgcactgccggctgctttgttatccgcagcgactggctcgaagatccgatcgaggctttaagaatttatagacgcagaaacatcgttgaggttgcgttcagacaatttaaagtcctcaacggaggtaaccgactgtacgcgactcaaacttcctacatgggcaagctgatggtacatacgatagctcagtctctgagaatggccattaccgtgcaagccaagagaagagaaactcaggaattgaagcttcccgataactcggtagagaaattgctgactgtcctgaagaaagtaagagcagttcgagcgccaacaaggtccacatgggttgttgagccgctgacgaaaaaagcccaagacatgcttgagcttttaaatctacctaagcctcccatgacatttaagtcaatatagaactatgtcacgggagttacggtgttattgacaattagttgacgatgatgccttgctttctcttcgcttcgcaatagtcgtcgtattctttcaattctctgtgcgcacgagcaggagcttccttcttcagtttaagcccttggtcgcctggtccactccaatcgaaccaatcttcgggaaaggaggcaggaacccttttgtagcactcttctgtttcaggtgtaagtttttcggccatattccctctcaaataatattgaggtctgaaaaatcatttttcaagatccgttccaatattttaccaacctctgccgccaatggtctaggcgaggggctggttaacaactcagagacggcctcagcgaaaaactccgcactatcccggtttgcatagccggacaatgcgcccttaataattgccggatcgttttgcaaagacagattagataaagccttgtctcttatgcgtccggaaataaagtaccttttctttctcttttccgtcgtgtcgaccccggccgctttcattaaattttctatgcgcccttcgagtgcatgacccaactcatgggaaactactgcgtaggccgctcctttcgacatagcgcccttgggatggtattgagcttcaatcgtacatcctttcaacaacaactgaaacacgggtacgcaagaatcagttacagcgatcaagactgcttcaatcgtacatcctttcaacaacaactgaaactcattccaaaaaaagggaaaattccgcccctgaccaaactcagcctaatttttaacagatagtcaaagtcaggaaaatagttttctctttaattgcatattctttcaacagaagtcgagcaatgcagctacaaagcattcaaacagtttcgaccgtacttttttaaatgaactcgtatttgtggacccactgaaataaatatatccaaactttctaattcaacctataattttgtaactaaataataaattcttgaggagggaaaaatggggaaaactcacattattggcgtcggtcttgacttgggaggaacctataccggaacttttataacctctcatccatctgacgaaactgaacacggagatcattcgtctgccttcaccgtcgttaatagtgaaaaactctctttctcttcaaagtcaagaacagccgtaagacaccgagtccgctcctacaagggattcgatttaagaagaagattattgcttttagttgcagagtatcaacttttccaaaagaagcaggcattgacaccggaagaacgcgaaaatcttcgtatcgccttgtccagttacctcaaaagaagaggttacgcccgtacagaagctgaaactgatgtgtctgtattagaaagtcttgacccttcagtgttttcctccgcgccgggtttcactaatttcttcaatgattcggaacctctgaatattcagtggaaagtcatctcaaattctcccgagaccgcccgagccttaaataaggcagtttccggacaaaaagaggcagactttaaaaagtacgttaaaaccagcttccccgaatacagtgcgaaagagattctcgccaattacgttgaagggcgccgcgctatcctagacgcctcaaaatacatcgcaaatctccagtctttaggacacaaacatcgctctaaatatctcagcgatatccttcaagacatgaagcgagattcaagaatttcacgtctatccgaagcttttggctccatcgataatttgtggagaattatcggcaacatctctaatcttcaagagcgtgcggttcgctggtatttcaatgatgcaaaattcgagcaaggacaagaacaattagacgcagataaattaaagaatgtcctcatccgtgctttaaagtacctccgatcagacgataaaaaatggtctgcttctcagaaacaaatcattcaatctttagaacagtccggcgatgttttggatgtgctcgcagtccttgatcccgaccgcaccattcctccttacgaagaccagaacaaccgaagacctccggaagatcagacgttatatctgaacccgagggctttatcttctgaatatggagataaatggaagtcttgggcgaataaatttgccgcctatcctcttctcacagacgatctggctgaaatcttaaaaaaacacggatcgtaaaagcagaataaaaatccgatcggatgccctgcccgactctgattatcggcttacctatatcttgcagcgagcgcttgatcgaagcatcgctcttgatgaatgctcgattagaagaaccgctgaagacttcgagaacggagtcgtcattaaaaacgaaaaattagaagaagtactctcgggccatcagctggaagagtttcttgaatttgcaaaccgttactatcaagaaacggcaaaggcaaaaaatggtctttggttcccggaaaacgctttgctggaaagggctgacctgcatcctccgatgaaaaataaaatccttaatgtgatcgtcggacaagccctcggcgtgtcacctgcaaaaggaactgagtttatcgaagagatctggaaccgcaaagtcaaaggtcgctcaactgttcgctcgatttgcaatgcaattgagaatgaaaggaagacttacggtccttatttttctgatgactacaaattcgtcaagacagcactaaaagaaggcaaaacagaaaaagaactctctaagaagtttgcttccgttatcaaagtgctgaagatggtcaacgaagttgtcccctttatcggaaaagaactccggttgtcggatgaggctcagagtaaatttgataacccgtattctttggctcagttatataacctcatcgaaaccgaaagaaacggattctctaaagtctctcttgccgcccacttagaaaacgcctggcgcatgacgatgacagacggctcggcacaatgctgtcgcctccctgcggactgcgttcgcccattcgacggatttattcgcaaagccatcgacaggaattcttgggaagttgctaaaaggattgcggaagaagttaaaaagagcgtggattttactaatggaaccgtaaagatcccggttgccgttgaagctaactcttttaatttcaccgcctctcttaccgacttgaagtacattcagcttaaagaacaaaaactgaagaagaagctggaggacattcaacgcaatgaagagaaccaagagaagagatggttaagcaaagaggaaagaatccgtgctgacagtcacggaatttgcgcttataccggaagaccgctcgatgacgtcggagaaatcgatcacattattcctcgcagcctgacattaaagaagtcagaaagcatttataacagtgaagtaaaccttatctttgttagcgcacagggaaatcaagagaagaaaaacaatatctacttactctctaatcttgctaaaaattatctggctgctgtctttggcacgtctgacctgaaccaaattactaatgagatcgaaagcacagtgctccagctaaaagctgcaggcaggcttggctatttcgatctgctttctgagaaagaaagagcatgtgcccgtcacgctttattcctgaactcagactccgaagcccgtcgggcggtcatagacgttctaggttccagaagaaaagcctctgtaaatggtacgcaggcttggttcgtccgctccattttctcgaaggtaaggcaagcacttgcggcttggattcaggaaacaggcaatgaactcgtttttgatgccatctcagtccctgccgccgattcgagcgagatgcggaaacgctttgctgaatatcggccggaattccgtaaagccaaggtgcagccggtcgcttcacactccatcgacgctatgtgtatttacttggcggcctgctctgatcctttcaaaaccaagagaatggggtctcagttagccatttatgagccgattaacttcgacaatctgtttaccggctcgtgccaagttgtccaaaacacaccgagaagttttactgataagacgaatatcgccaattctcccatcttcaaagaaacgatctatgccgaacgattcttagacatcatcgtctctagaggcgaaatctttatcggctatccttctaatatgccttttgagaaaaagcccaatcgcatttctatcggaggaaaggatcctttcagcattctcagtgtcctgggagcttacttaaataaagcgccaagcagcgaaaaagaaaaactgacgatttatagagttgaaaagaacaaggcattcgagcttctctctaaagtagccggctccaaatttaccgctgaagaggataaagccgcgaagattctagaagccctccattttgttactgtaaagcaagacgttgctgcaaccgtttctgatctcgttaagtctaaaaaagaactttcgaaagactcaattgaagatctagctaaacaaaaaggctgtctcaaaaaagttgaatactcttcgaaggaatttaaatttaagggatctcttattatcccgacagcagttgagtggggtaaggttctttggaacgttttcaaagaaaatactgccgaggaactcaaagacgaaaatgtcttgagaaaagcattagaggctgcttggccctcttctttcggaacaagaaatcttcattcgaaagcgaagagagtattcagcctgcccgtcgttgctactcaatccggagcagttcgaatcagaagaaaaacagctttcgggaacttcgtttatcaatctcaagataccaataatctttactcctctttccccgtgaaaaatggaaaattagattggagctctccgatcatccatcctgcactgcaaaaccgcaatctaaccgcttacggttaccgctttgtggatcatgacagaagtatttccatgtctgaattccgagagatctacaacaaagatgacttgagaatcgagcttgctcaaggcacttccagccgccgctacctacgcgttgaaatgcctggagaaaaattcttagcttggttcggagaaaattctatttccttaggaagttcttttaaatttagcgtctcggaggtttttgacaacaaaatttatactgagaacgcagaatttacgaagttcctccctaaaccaagagaagacaacaaacacaacggtacgattttcttcgaattagtcggaccaagagtgattttcaactacattgtctgaggtgcagccagttcgctgaaagaaatcttctcagaggccggtaaggaaaggtcatgagacacctaacagtctcgggatttggcgatttcctcggtgttcatggaaatcgcctgatcgtacgcaacggtgataacgttatcctagaaactgcgctttccagactcagaaccatccgaatcgataaaagcgtctccttatcttctaatctgatcctggcctgcgcagcaagaggtattcgaatctactttctcgactggaaaggcgtaggagttgtcgaagtatccggcatgcaccgccatgccgtcgtcggcgtcagaaaatcccaattcgaatgcctcaaatctttgcaagcccagcttctggccaaggaaatcatattttcgaagatccgaaaccaacgtgctgtccttctttatttcagtaaatatctcatgaaaagagagacggcttatggccttttacttcggaatgccggaactcgattagaagagatcagtaacttactgaacactcgagcctcagggcccgactggaagaatacggtaatgggactggaaggaagcgcttcactcatttactggaacgctttaaaagaagcgagacttttacccgagacgttccaagaacgcgaaggaagaggcgtaaatgtcttatgccctaaattctttatataagggcatgcctaagcaccgacagagtcggtgcagctccggtcctcttaacgagcaccggagtttattattgttggctatttgacggtttaaagatggagtccagccagggcttcatatcgaagtcctcggtcaggttctccggaaggtacggattgttggccccgtctgtgcccgctttctcaggtaaacggatagagaacttgttttgtttacatcctgtctctttccactgttgagtaatgcctttagcagtaatgtgtttgaacagtgcctggctgtagtcttgaagccaacggaacgtatctacaccattttccctcaaggtagcgtcaatggacagagcgatacacatcgcttccatgtactggggagaatgcttatgctggctgtttttacgcagaatggcaacgccgcgtattgcacgttcaactttatttgtgcaaggcgggatctcaggattttctaagaaggtcttaaagtcctcccgggcattaaggtaatagacacacggcttggcagcgggatggtcctttgctttttcccagacagatcccttttgcctgaccaatccctcgcttgcctgcatcatcatccggtcaaggcatttcatcagcttggcctgagtcagcctggctttttccgggctgataagcccatcatttttctgggcttcaaataagaagatcgagttaattgctcttaatgcggcgtgcagcttcatgccttcggtatcggctttgagcaatttttcaagctgctgcataaggaacgcttccggtttatcgagaagcttcttgaagagatccgagggcagaacgaccttcagaatctcccgccgcagatgaaccaaacaggattggtgacgaacatgatcgaggatcggtttatcctgatttctgttattaagtatcgttctgtagccgctgtaaccgtcggtcaccagagtttcaaagttgtaatcttccaagattcggcctatgttctctgcgctccgagtcggactgtagtagtagagagttataggctttggcgcatgatcggccgtggtcagagcgactatatagttggtcttgccctttgcctcggcacctgaagcaggaagcttcccgcgtccctgatcctgaaggcagctaaacggcgtttcgtcacatacgagcacatcgcgctgctgcagaaccttttccagtgctttaaagagcggctttaaataaaatctttgatagtcgaacaacgagtaagaaccggtgttggagcccagcccggcttcttgctcgaaccgcttcagagcacgctctaaaggaatgccgatgcacatagcctggttccaagacaggatggttttcgtgctcatgtgtctgtccgggaagagcggatgatcttgtccgggatccatgaagacctctacctgaccgcatttctgacagaaccctatcgtataagtgttctgctgtctgtagcctgcttcgaagtccgtcatcgcagttttgagattaaccatcaagtcctcaaatccggccaagggttctccgcattctcggcaagttgccgatatctttgtcgccttagtcggcccggcttccggaagattctcgatattattgacacgaccccggtgcgtctgtttttccttgacaggggacggttcagattccttatttatctcagagatttcctgcagagttttaaccgttgcatttgtcgaagcatccaatgttttcgatgctttggcaatagcgttgctcagcttgacgattcccttgacgttattggtaaatgagcggacctgcctcaattctttcaagttgctttgtgctttagcgtaagcctgttcagaagtttctcctgctttcatgacttcgtttccatgagcgaagaaacttgcaatttgcacagaagtgacaccaatagtttttatgccgtaggagatcatgtcatagagaactttcatcgcctttttagcttcttcgtcatcggcgtaactcaggtactcttccacttgagcgaggtagctgccgttgacgtctttgaggagaagcgccagcgatgtaacgccgcgagcgaactttatattggagcgctcgcgtttctctgccaaatcctcagcagctcgaagctgttcttctttttgggtaaccagcttaatcagttcttccttggagagtgagttgaggtcggtcattttgtcacaccctgttattatctattgggtaaattatatcatattttacctttaaaaacaattagctatctgaatataaacgataaataatgcttgcaaatataaaaatatcgccgtgaaggccctcagaagagcctacacggcgttattggagtctcgggctaccaaaaagtatcgcttttggtataaagccgctccccgttaagaaatcgctctaaatcggataaagtcaaggagcacttggcctgctgaccgactcgaaccatgagttcttcaaagcgtccgttgtgcaaggtgcgtgttagcagcatcgttcctttctcgtccgtggtgacgatcttgcagatcttcctcgtctttgagagaaagacgacggcctccttaccgctgctcaagttgatgccgagctggtcttgggcgagggaacagagccgatgaaagcctcctcttaaatcagtaggagaaattaccagcgtcacgtgcacgccgctgaagcggatattcatatgacgtctcctctcatgcgagacagaatgaagatgacagattcttccggacgctgcgtcttgaattcgaaggtcatccccttggccgaaatgctcagcgtcgactcctcatctgcttcaccttcgcaaagattaataacgtccaaagaattaggctgtcgaatttgagctgccgctgactccgaaacggacaggcgccgcttaacttcggagatgttgactttgcgacgggtctcggttcgaatcaatcttgctacctcggcgctgcccaagtcttgtgctcgagcgatctcaatgtatcttgaccagttaatatccataatctgtctccttcttgttccttggagacagtattgatcatgctgctaaattaagatacgaacctataagacatctacgaagaggcagcactgaaatcaccaacgctgcacttaactatgggtacgcaattcttcagagttatattcaaaatgctctcggcaacgcaggactggagatctacgcgggactgctccatgcagatcgagccggaaagccatctttggtacttgactgcatggaggagtacagagcgtgggtggtcgatagaaatgtcatcagtctgagatgcaagcttggttctgagcagaactttttggacgctgcgttgaagaaacaattggtggaagttatcgacaaaacgatgagtacaaaaatcaattactcacagaagcaatgcaaattagagaatgttcttcagcggcaggtctataaacttgcaggagctatcgtagaaggcaaatgctaccgcggtattcgattcaaatggtgagttatgtacacacattttctgatttgctacgacattcccaatacgccgaaacgcaccaagtttgctgaaatgctgaaagatcttggacttgtcgcactacagaaatctgtcttctacggagcgcttaccgccacagaaagacatgctttggatttttcatctaggaagcttctaggccctgaggataaatgcctttgtattccttgcgtgctgaaacccgaagaattcaagaaatcaattggttacgagttacgagaattttgaatacagcgagcccgatagctatggattcatctaaccgcgaaagtctacccgtttcttacatacggcaattttgcttttgtccgagaatcccttttctgtccgtgtttttggagattaaaccgccgccacctttgtgggtaaaagacggcgtggactttcatgaaaaggccgcgatgcttcaaaaaagaaggaagctgtcaaaatttaacttgtcgggaaaaggagtgttcaaatcaaacatttatttgaagagctctgtttatccgattcatggaatcgcggacggtatttttatcatggaggatggcgagattattccacttgaattcaaggcccaggacaattttgtcgcttcgcgcggacacatactacagttaacgggttatgccattcttctagaggagaaattccaaagagaggtaaagcaagggttcatcctttacggcaagaagggcaagagcctgcgcgttgatttcacggaagaaagaaaaaagaaagtgatagaaatagctcaaaagattattagtagtttcgaaacaggacttcttccagactcccctgccacttcagcacaatgcggacaatgcgaatttttaaatttttgcggagaccgcttttagcaacacaaaaagcctcctcagaggctcttcgttaatccggataaggccaaaggcctcagtagccggatctaatatttaatcaaattgatttcagctcgcccgaaggcgacttcgttgttaaaagaatgtaattaaatattgccagaaatattctaaatagtcaagcaataaccccaatttttcgaaaataatgccacttttcgtgcagatcgagcattttcgaaaaacagctccgaattcaacctatcaaaatcctttgttttcaaccggttgcgtttgaagtcccaatagtacattcttctaacaactactgaaacaatactataaatcctccgttggtcgcctcttgtagtcccaatagtacattcttctaacaactactgaaacaaaacaaaggtacgccggtcaaactggacgatcgaagtcccaatagtacattcttctaacaactactgaaactcatgccgcacaatggaaacagagatcgtctttttcagtcccaatagtacattcttctaacaactactgaaacacttctcgaaagtgacccgtcagttgattgatgagtcccaatagtacattcttctaacaactactgaaacactttcttgaggtaggtagcaagagcggggtacttgtcccaatagtacattcttctaacaactactgaaacaggattaaagcgccgccaatgcactcccatgagttcacactaacccctaagaaaatcatactcaaaagcgttgccgctactggatcgaaggtctccatcatcccggcaacgtcagcagggataatttcggcagccgcttgaaaaagccaaaacgccgcgatcgttccgaaaagcacaataaacgcataagccaaaatcgaataaaccgtccaatccaaaggttcattccaaaaatgactaaataacgtcacggagactcccgtaagcaaaagcgcccagcttgtagctaacccagaaccgacacgcgcaataaatttctgagcagaagaacataaaaggcgccggttattccggacccgattcctgcccaaaagccgatacctgagacgttgaagtttttaaatgatccgccggtcacgactagaaccacaccggctactgcaacgattccgcaaaagatttccttcaccgtcagatgcttatgctggaacacaaacataaacaacataatccacaatggaacagttgcagttaaaacagcggcaaaaggtgcgtttgcgtattgaatacaaacaaagaacgttaattgcgttccgatgatcgttagtgtgtagattattaagtcaataatgttctgcttggtttcaaatactttcagtgcacctcttttcagcagaaaaaactcaatacctacgaatatggagccggccagcagcatgcgaatcgagatcaaatccataggcgtaaagtgacagttctgaagcaaatactgtccggctacgcccattgatccccaaaaaacagccgctaatccggccatcgtcatgcctttcaatgtgttattcattctcgtctcctctggttcttgagtttgccagctttgcaacgtaactgaacgcgtttctactctttttaagaaacccgacttttcagaaaattctttacttttttaggaagataacagcaatgaataatgcgaaaattcgtctatgaatttcgataactatcgccgaatacttcacctcgacctcgacgcttttttcgcttctgttgaacagcgtgataatccttcgctgcaagggaaggcaatttccgtcggattaaattccgctcgaggtgtcgttgcgtctgcttcctacgaagcaagaaagttcggtgtacgttccgcaatgccctcttcggttgccgcgaggctctgccctaatttaattttcgttcccgggcggatggacgagtacaaaaaagcatcagccgaagttttcgaaatcttttctcgctacgcaaatctcattgaacaagtctctattgatgaggcattcttggatgttacggacgtttggcgcgattatggttacgcgatggaaatcgcaaagctcatcaaagcagacgttcggcgagaagtcggcctcattatttctgccggggtctcttacaacaaatttctcgcaaaaattgccagcgactggcgcaaaccggacggtctatgcgtaatccatccggatgcggcactcaaattcattgaccgccttcccgtcaaggcaatttggggtgtcggcccggtgacctctcaaaaaatggaggctctcggaattttcacaggcaaggatttgagagaaaaagatctttcgtttttagtcgagcaattcggcagttctggactatcctattacaactttgcccgaggcattgatgatcgtccggttagaaccgaacgcattcgcaaacaagtcagcgccgagatcacgctctcaaaagatgaaggaaatctcaataaattagaagatacgctctcggaactgacggactatctgatgacgcgccttcgtaaaaacgactttctcggccgatcgctgacgttaaaagtgcgtttccacaacttcaaaacgattacgcgaacacaaacatctaactctgtcttcaacgagaaatctcagattctcaaaacggccgagtctctgctggaaaaaatcgatttcaatcatcagaccgtccgcctcctaggcattgccattgggaaccgcctggaagaagacactgaaaacatgttgaacctcggcgatatggacgatcttacgcctcggcttctttaggacgccgacggacttgactgagtagagacgcgaagcgctgtaaaaattgcaaaggtctgaagaattgcaacaccgaaaagaacagctgtaaacataccgacgtcaagaagcggtccaaagaaaatcggagtcagagactgacctacatccattccgcaatacgtaaaaccgtagacacgcccgaaagatttcttgcctaacttagcaactgtcgcacctcgaatcataatgtctcggctcggtgctgctacgcctgttcccagacccatcagacacattagaaggactgcccaatacccgcttagaatctgagacgccaaaatagctgccatcacggctgcaaacgtaagacacagcgccacaacacgattgctcgagattttatgctggttcgttaaaaatcctccgatcaaagcgcccgccccggcgcccaagagataagccgtcagagccgccgaggccccggtcagattcaagtgataggcattcttgaaaatcgtctgtgaaaagctttgaagaacgccgaaggcaccggacgtaaaaaagaaaaacatgaagcagtaccagacatcaggcacccgcagaaatccgaaggtcccctcttctttttctttcggagtcggcggcgtagtgtcgcggacagaatcgcgagagaaaacgcctctgaataaaagctcgatgacaagaacaatcagcgccacagaggaagccgcaaacgccgcacctctccagccgaaccaacccgctgtcgtcaccatgaagaaaggacaaatcgcccagccgatattgccggtgatgttatgccaggcaaaagcatgacccaagaagcgatcctgaatgttgtagttcatcagcgaatagtcgctcggatgaaataccgagttgccggcgccggcaagcatcgcagagagataaagcatcgggacattttctgccatgcctaaggctacggcactggcaatgagcaaaaccaggcccgtatacattgaggtccgggcgcctactttatcgaccagaaagccgctcatcgactgaccgactgcacttgtgacaaagaacgtcgtcatcaaggttccgccctgaaggaaattcattccgaagtgcggaagaatccaaggaaacagagaaggaatcactaagtgataaaagtgagagctggcgtgagcgatcgaaacgagaaaaatcgcgaggatgtcgtgaccgcgagttccttgtacgtacatggcgtggcttaagagtgttttttcttattctattcctgacgccttctgaaaatatttaaggccgagagattgttagtctcccggcctttctcaaatgagatcagacgatcttatcggttgtctttacggtcttcaaaaatgaatttgccgtcgacataatccacaaacaccgtgtctcccggagcatatttgcctttgaggatatccacagcaatctggttttccagatagtcttggaccgcacggcgcagcggacgtgcaccgaacagcggatcaaagccgaccttccctatttcatccaaagcggcttcagttacatccagaccgatgttctgctgttccatgcgtttcgccagcttacgaatctggatgcgggcgatttcgcgaatagccttctggtcaagagcattgaagacaacgatttcatcaatacggttgatgaattcgggtctgaagtgctttttgacttcatccattacggcttccttcacaacttcaggatcttcaccctgacggttcatgatttcctgagaaccgaggttggaagtcataatgatgacggtattcttgaagtcaaccgtgcgtccctgaccgtcggtcattcggccgtcgtccaaagcctgaagcaggatgttgaagacgtccggatgagctttttcaacttcgtcgagaagaatcacgctgtaaggtttacggcgtacggcttctgttaagtagccgccttcttcatagccgacatatcccggaggcgcaccgatcaaacgagccacggagtgtttctccatgaattcgctcatatcgatacggatcatggcgtcctcagtgtcaaacaggaattcggccaaagccttcgtgagttccgtcttaccgacgcctgtcggaccgaggaagaggaaggaaccataaggacggttcgggtcggacaagccggcatgagaacgaagaatggcgtcaacgact

SEQ ID NO: 127 - DNA, 24674 bp, synthetic construct
  source 1..24674: mol_type = other DNA
  misc_feature 1..24674: note = Synthetic
atcacacgaaaacgttgcgcctgtggacctgagtacatgggtccgggaaactccccagtaacagcagcaaccggacaatgggcgtggcaaataccacatttagtgcactggtccatagagcgtagcacggtacgacggtctcgctccgtttcgcgtagctcaaatactgtgcctacctgttgttccataagcactaccccgctttctcataaacttgtttgacactccggcgccatactgccagagtcggcaacccctcagcgagatccgccgaggtcgttgtgccgccgtgatcaatgccaacggacacaccgttatccattgtttatcgtctccagataaccccgcgcattctcggcggcggcccatcccgtcgcaatgctcacgccctctgccgagctttccatagccggattccagtgcgccagagtgcgcccggttacaaatacgttgcggcaagttcccgactcttttcgttgtggtcgcaatgcattgtcggtttcaacgcctgcggtatgcaacgcgttcagagattgttctacggtggcggctctcagcggttcgctttgaaaagtatgaaatccgaatgcagtctcatggacccatccgtaggaatccacatcaagtccgcccatgagcacaccgccactggaaacgataaccacggaaacctcgaagcggcgccccatatcgtcacaaatgacgatccgattgccttcagcgagccagcgttggctcggccacgccccgatatggaatgcggtgcggctattctgcaagcgatgggtaaaagcatgttccaaccgcatccccggaacactgggcggaagcgtcggcacctccagacaaggcacctccagtacgcgttccgcggtagccagcacctcgcggtttctgctcatgcccataatggcaggaaacaaaatgacctcggtctgggtcggcaccgattccttaatcgcagaaaagtagccatccaactcatccaacgcatcaaatgcttttgctatcacggtgttttcaagaattttactaggtgcgccaatgtcaaagatgctattgttgatacctgaattgccaagcccaacagctatcagatcggccgggaaattccgataatcccgaagtcgggcaatagccacggttttcccactaatcttttccatcgttgcctgatgattgaatgttccatatacgggaatgcataaaccagccgccgaaacagccaacttattactgccattaatggcgacgcgctggtggatttccccaattatattttcataccagttaaaagcgttttttacctgctggacgccaatcttctgatatggatggctcttatccaggtgaggaatttcggcaagcggcgcagtcacaatctgttcactacaagatgacgtataaccaaggacgtgaataccttcgggggcataatgcagggacccaacgccattggagaacattcgaatggaatatccgcactcatccagccgtgtcgccgcgatcaggccgtcgaattccgaaccgatgatgatggcatctgttttcactggtaatcatctggcggcattatttccctgttgagccgcacccccagcgtctcgcggtaaaccatgtcactcaacaacgcctgtctggcctgcgacccccaagccgtgtgaataacgcctttgagacgctcaacccaaaacccttccaaatcatcactggcaggataatccggatgacgactggcgatgagtgccgcaacacggctaccgcaaaatgttccctggcagggaccaaatccaattcgtaaccgacgccgcaaatcgtgtagatgacaaatgccatggttttcgattaagtcaataacagctgactgctcaaccgcttcacattcacaaactggtgctagaaagcgtcgctctttttcgattttcaaaaagttgtttatcggttgccaactcgaatttttcgtgcctttattgaggggcgtggttgccgtggtggatggcgcaatgagattgagtgaccggcatacatgattaccaagatcctccgccataaatcgatgcgtggtcaacgacccaccacaaacagtaaaaaaacctgcaagaccatttttgctatgatcaataatagtatggcgtcgggacaaaggtgtatcgggcgaccaactctgggggcgatacaacggccgtacacccgcccatgcacgcagtacccgatagcgccttgcattgggaataatagcctccgcgctatccaatagttcctggatttcctgggggcacacatgggtagtgtctggatcatccacaacctttgacgttgtgccgaataggctgacggtacccgtcggcaccatgatgtcatggttggtcggcagcctgcatcggttgatcacgcgctgtaccatacggtgcgagaatacgatgatcgaacctttccctagctgaagatcaacactctctccaaccatgtcagccacgcgggctgaccacggccccgctgcattaataacgacatccgcttccagcagttgttcgccagacgaaccgacaacacgaacatggcgcacccgtccattagcaacctcaatccccttcacttggtggcgtgtgaaaatagtgccgcccttgcgccgcacgtcatcagcgagaagattcaccaatcgccaagactggacagtggcatctggaacggagaacgctcttagcacgttcctgctaatcgctggctcttcagccatgacctgatccgggtccaactcttccacaggaatgtgtgcgttttgacatcctgtaacaaacttgtcggcgaaatcgggggggtcaccagcaagggagataaaaagccccccggtctgctccacagcttcaggcgccaagtcggcgacgataaggcgttctcgcatgcattgcgcagcatattcggtatcactgacagcgtaacgcgcaccactttgcaacatgccatggaaacgactgctggtgccacagcccaagtcaccgaattcaaccagagtcacatcaaaccgacgcaagatcagatcacgggcgacgccacacccggtcgcgccgccgcctattactaccacccgggcgttagagttaatgggcggcatccagaccgagctccgatttatgcttttgcacccatgcattgatcaggcgacccgccacgatagcgataaatgcgacacaaatcccagcagtaacgccgcgcccgggatcgactttcgacaacgcgatgagcgtttcctgaccaagatcacgggtaccgaccagtgccgtgataatcaacatgctaagacccatcatcagagtctgatttaccccaagcatgatgtccgggagtgccagcggtagttgtacccgtctcagaatttgcatgcgggtacaccccattgcgcgggcggcttctatcaaatgcggggcgacctgccggataccgtgatcggtgtagcgaatcgccggtactatcgcgtacatgaccaccgcaaccatggctgagaactcacctacgccgaacaacatgataacgggaattagataaacaaaggatggcaatgtctgcaatgtatcgataatcacctgcacaatattatgaatgcgctcattcccggcggaaatcacaccgatgggaataccgacaatgctggcgagaaatacacaaactccgacaaggtatgccgagatcatggctttttcccacaacccgacgatggcaataaacgaaattagcacagtacaaaggatagcaaggcgcaatcgtcccaaatgatagccaactgcggaaataaaaaggacagttccaagccagggcaaagacaacatgaaactcttggacggtttcagaagatagatgaaaaagaaccgccggaagccgtcgatatagtcgtacagattgatattgatccaatcaatgatattgtcccagaacttacccgtgctgaacgtccaggaatcgggaacccgagaaattaccggaacccagtgtccgatgatggttgtgccgatgacaatagcaacaattatggtcaacaacgcgtattttttgctaaacgacggcgcggtattccgatgcactggtctgcgcgccgcgaattgctgactgattcgatccagcacaacggcaactagcgtaattgcaatacccgcctcagcaccctgcccgatgcgaagggctttcagcgcctgccatacgtcaaaacccagaccaccggcaccgataagcgaagcaataataaccatgttcagtgtcagcatgattacttggttgacacccaccattagccgaggccgaatcgacgggagcataactttccacatgagctgccgggccgaactccccgctatgcggccaaactccacagtttcgccactcacttgggccaaggatatcctggtcacacgagccatcggcggcatggcataaatcaaagtgaccaccatggcggcagccgggccataaccaaacaacatcaacacaggcactagataggcgaacaccggcatagtttgcataaaatcaaatgctggcatcagaactctgtccatgaccacccatttgaacgcggcaatgcccagcagcaggccggtaataataccgatcaatacagctacgataattgaggcaagggtcagcatggtgctttcccacagaccgacaaacgcgacatacaaaaaagaaataacaacaaaaactgttaagcgccgatcgcccagtgatgcagccagcaacacaatgccgatggttataccgagccatgacagaggcgggatatgcaacaacgcgtcatgtgcaccttcaaccgtgaaaccggttaccagcaggcctctgagaaacagtactgggacattaagtagagatccaatagcgcgagtaaattccttgaaggtaaaaagtccgaggtcagcttcattgaccagccacttgattttaactgagagagaatctcccaatgggatgacccatgtgcctggatagtcgttcgcccaaggtagtgccaaccactggaacttaatcaaaatgaccgcgagaatggctacaaagattaaagcaatgcttggctttatgcgcggcggggaaatcgcatgtatcaatttcgtttcggtcatggacgctatgttgaatgaagtagagaaacgtccttaagttgttatccatatttgtacaatcaacatagctacgaaagactgtgaccggtaccgagcctcgatcacagtttgttacgcttgtcggggagaatatctattcgagccaagatttccatgtgctctcgttgtcggcaatccacttttgtgcaaccgctttggtatccataccttcaacatcggattggaacaccaactcaccagcagtctttgcatccagcgtgaatttgcgccaaacgtcgtaggcttttggccagatcttttcgccaccggcccacgcagccttccacatatgcccgtttggccggccacagtcgtgggtcatgctggaattcactccccaagatggatcgtcgtaacaggcatcatcatattccggccattttacaaactcgcccggatacaatgctggaatccagtagggctcccatgaccatgcgataattggttgttttcgcttgattgccgctaccaaatcagcagaaagagccccatcgctgccagcattaatgacttcgaagtcaagatccagcgctgcgatccgctccgggtcggtaccgccccattcaagcggcccgctcaggaagcgtgctttgggctcggtctcaaccaccgaaagagcattgacacaatcaggttccaacaaggctttccagtcaggcaaccccgggcaataatctttcacatacagcggataccaccagtcttcgttaacagcgataccgatatttcccatgttaagaacattgccagatgaaaacgcttcatcaagaactgctttggccgttgtatcccatccaggggaagcaatgtgaagatcgcccgcaccaacgccagtgaattggccgatgtaatcagcgggcgtatattcaacattgtagccgagtttcttaatcagttctccgtagataaacatgatgatgttatcaccagagtagcccatcataacgatttttacggggtcttttgattccgggacatcggctttggccaccgtcatcccagtgacgccaaacgccagcccccagatgatggtgcggattaagatttttcgaataatttttagcatttctatctccagagtatttgttgatatgtaaaaatggcttgtaaagccagtttttccaaaggcacggaccactataacggatataacgctaaatatcaatcataaaaactatcgtttatgattgatatttgttaatgcagaattttattactcatgctatataaggtcttatgatgatgaaaaatcgaaatccatcgactcgccgcgccaccattcaacgacaactccgtttggatggcacggttagcgttgagtcccttgcaagagaactggatgtgtctgtcgccaccatccgacgtgacctgacgctcctgaatgacgaaggatcgatccagcggacacatggcggggcaatagccactgtaacacgcggtgccgaccaggcttttgcattacgtgaacaaatcgaccgtgacgggaaacgcttgatcgcctgtggtgccatcgagttaatcgagcccgaccagactctattcatgaacgacgggtcaacattgctggcattggcgcgagacctggtagcatcagggatgacgttgaccgtggccaccccaggcatcaatatcgcaaccgccttgtcggaaaatcctggcatcaacacctatcttgccggcggtctggtcaggcacaaaactctggggacgaccggtgatttcgtcgagcatatgttgtccaccatcaacgccgatatagcattccttgctaccgaaggcttgtccgtagatgaaggattgacttattcctatgaagccgacgcaaaaattgcccgtatcatgcatgcgaaagcgacccgaaccgtggttctggcaacggagcgcaaacttgggcagcgtgaccgtataacagcttttccgatatccgggattgatgtgctgatcactgattgccgccacgatagccaagttcaggcattccgaaatctgggtgtttcggtggtggtggtgacaaacaaagagcccatcaaaaacaactttcagatggtgcctgcacaaatgtagcgcacacaggtaaaaccaaaatgacaagagcaaggcacgacaacgtcgatacggccgacacaagggtaaaactttcatgccacaatatctggaaggtattcggcagcaatgccgaacagttcatggcccaacatgacaactctcctacacaacaggatttgcaccaagctggactcatagccgctgtacgcaatgccacgataaagattgaggaaggcgagatcttcgtcatcatgggattatccggttctggcaagtccacgctaatgcgctgcttttcaaggctgattgaatcgactatcggaagcgtactgtttgatggacaaaatctacaggctatgtcagacgcggaactgaatgaaatcagacgccataagatgggtatggtgttccagcattttgccctgctaccacatctgactgttataggaaatgttgcgtttccgctggaaatacagggcgccgacaaacattcgcgtgaacagcgtgcactggaaatgatcgagctggtaggactccaggggcgcgagaactattacccgcaagagctgtcgggtgggcagcaacagcgcgtgggcatcgctcgttcattagcggtggagcctgacatctggtttcttgatgaacccttttctgcccttgacccactgatacgacgtgaaatgcaggatgagttcatgcgcctgcaaagtgtacttcacaaaaccatcatctttatcactcatgattttgacgaggcaatcaaactcgcggatcgtatagccatcatgaaggacggagagattgttcagattgacacacctgagaaattggtgcttgctcctgcgacagactacgtcaaagaattcaccataggaatttcccgctccaaggtgctgtcagtaaaatcaatcatggcaatcgcaatgcccggggaaagcgaccgcacatccctatcagtagcggaacatgcgaagattgacgacattgcgcccacggtcatcgacagcggcggcgatgccctagtggtgaatactaacggtcagccgaccggaatattgactcggcaggctgtcatcgacgtgctgataaacagaagagagtccaagcacagcactttgccatgatacttgcgattggaataatttggtttgaaatttttttaccgaacgactggcccgcgtcacgatcgacaaccactggctgtaagtccgcgggttcttacttatttgcaactagcttaatttatagtcaggcttacccgtcaaataacactacgctgcggatagattccccgcggtgcatcaggtcaaaagcgtgattgatttgctccagcggcagggtatgggtaatcaaatcatcgatatttatttttccttccatataccaatcaacaatttttggcacatcggttcttccgcgcgcgccgccaaatgcggttccccgccagactcttccggtgaccagttgaaatggtcgcgtactgatttccttgccggccccggcgacgccgatgatgacgctttcgccccagcctttgtgacaacactccaatgcctggcgcatcaaatcggtattgccaacacattcgaaactgtaatccgcgccgccattggtaatatcaacaatattagcgaccaaatcaccttcgacctgtttcggattgacaaagtgtgtcatgccaaatttttctgcaagcggttgacgcttgggattgatatccacacccacaatcttgtcggcgccagcaagcctcgccccctgtacaacatttaacccaataccgccgagaccaaagacagctacattatctcccggtcgcacttttgcggtattgataaccgcaccgataccagttgtcacaccacaaccaatgtaacaaactttatcgaacggggcatcttcgcgaattttcgccacggcaatttccggcaataccgtgtaattcgaaaacgtcgaggttcccatgtagtggaaaattttttgcttgcccaaggaaaaccggctactgccatcgggcatcagcccctgcccctgagtaacacggattgcctggcaaaggttagtcttgccgctagtgcaatagtcgcactggcgacattccggcgtatatagcgggatgacgtgatcgccttttttcacgctggcaacacccttgccaacatcgacaacaacgcccgcgccttcatgcccgaggatggccgggaacaagccctcagggtcggcgccggagcgcgtgaattcatcggtatgacaaattcccgtggccttaatctctatcagcacctcgccggattcagggccgtcgagttgcaccatttcaatttccagcggcttccccgcctcataggcaactgcagctcgtgatttcatctaatccaccctgcaagaattctaatttttcgtcccgataatttaccggggtgtttaattacgtggtcggcagcaaagtcaaataatcccattcattccccacaggttttacattatcaaaagccaactttaacattttaaatcgatattttctacccgtagcctcttctccaatgtgaaatgagtctgaaatgggctgatttctgttcatgatggggaatcaatacccacatgaacaacacccttcccctttttgatctgagaaaagaacaggtttgcgagggtgaaacgcggagccgtttaaaataccgaatttggatacggttagctcggtatcaaaaaagcggaatcctgcaatctatattgactgaacaccacgatgccattacactgtttggcggttcaactttgaattacttagtcgtcaggagaaaaaaatgaaaataatttcacccattgcgattgacatgggggcaaagaatacgggggtttatcttaaccactttgaacaaggggaagatccaaccaccagcggcaatatagcaggaaagacgattgttatcgacagcagtaaaatcacttggtcgcaggctggtcgaacgcaaaaacgtcatcaagttaggggtaataaacgccgaaaacttgcgaaacgattaataaaagtaattttaaaatcgcactatgaacttgacatagaggaaaagcaattagagtttttaatgggattgctcaaccgacgaggctacaatcgcattgaactaacaccggagcaagaagaagttttaagtaccaaagcggttactgagttcttctttccgcgcctttttactgagccaagcactggcgtttcgcttttggatgggctgtccgatagagttattattaaaaacaaggataaccaagactattggaaaagtgttttaaaagatgatgttttctctttgtctggaaaacaaaacaaagagtttaaggactacttagcccttcatgacaagggaaaggataaagatgaaatagcagatctttccaaagcgttcactgcaatcaaacaagttattggaaagcaaatagaaaattatgatagcggtcatttgcaccgcagagactacttggaaaacatcaagaaagatgtacaaaatgaattacttaaatctttgctgagcggcgatttaactgccgaaaaattgtccttcctgattggaaatgttagcaatctgcaactcagagttttacgaaaatattttaacgattatggtatgcagtcaggcgacaagtgggcaccagacaaactgcacgaattcttttttaagtgggtaagaagttggcattgtaagcaggatgatgaaagaacgaaccaaaggactctattggctcggaagggaaaggacattctcgaagtgttcaccacatctaaccccgagctaagcatcccgccatatgaagaccaaaacaatcggcgaccgccgaaggatatgaccttgcgattaaaaccaaaaggtttagataataaattatccaactgggaaagtattactcggtcattggttaagagttattgtatgccccaaaccgaaaaaaatattatagaacctgtatgtattcaaaaaaacctgaaggataatgtgcgcccgcaaaagataaagggcgaggtccaagacactgaacaaaggcaaatactagcggatacactgcatcgtattttagatcgaaccattaaattagatccttacaagttgcggtggcttagtgaggggagcaaaaccgatgaagcgcaaaaagcaaaggaagtattgaacaggcatagcgaaaacaaagccgacgctattatcgattttgcaaaagaatattacgatgaagtggatattgcgaaacagggtttgtggtcggatagtgaacagagtttgttttttagatgtaataccaatccgcctcataaaaacaagattcagcataaccttattagtcatattttgggcgaaaatttaaatgaacaaagattaagctactttgtggatgactgctggaatgaaaaaataggacgtttaaccattaagggcattgctaaaaaaacggaagaagaacgcaaaaaatacggcaaccgttttaaacatttggtgcaaagacaagtttggttaaataaacaaggtgacagggaattagataacgaaagaaagcatggtgttaatggcaaagttattttagaagttcatgaaaagtgtttaaaagcaactgataaaattgccgaatattttacgcacaatgatagaaagaaaaagatttatgccaatgttttcagcatggcgcaactttacaatattttagaaaccaatattcggggatttagtaaaactgataattggaacacgattgaaaacgcatggcgttcacggaaagatgacgcggatgaacaaggcgagtatattgccaatgctgtcaggctaacggctgatagcattcgcccgtttgatggcatgctggacaggattatcagtcgtcaagcctatgaaatagctggtatgaaaatccaacaaattggaaacttaaagattgatacaaatgatactttgtttgtgcctatttttatggagcaaaaccgtttttcatttgaacaaagtttgcatgaaataaagggcttaaaaaatgttaaaaagaaagctaaagaaagagtagaaaaaggcttaaagaaacaaaaaacacaatggcaaaataaagacgatagaattaagaaaaataaatattgtccttacactggcgggattattggcaaaggtgaaattgatcatataattccacaaagtgaatccaaaaagcgcggtgatgtggtgtttaactccgaggcaaatttaatttattgctctggaaccggcaaccatacaaaaggcaatgttagatggacatttgagcaattacaccctaactatttaaacgaagtttttgcaggtgaaaccaacataaaacaaaccattattgattttgtaaatggtttggatgaaaacgatccgattagttttcataatttagagggaaaagagcaaaattatttacgccacgccctatttatttcagatttagacagtaaaacttttccaatcctcaacacccgatataaaacttttgtcaatggaacgcaaggctatcttggtaagaaaatccgaaaattgttgcaagataaatacccaaatgtagagataaaaacctatcaaataccagctcaagaagtcagccaattacgaaaagttttgggtagtcttgacaaaacctctaaaaaacaagatatacaaagtgctttttcacatgtggtggatgcttcattggtgttagccactgctttgcaaaaccctaaaatagccgaggaattgcaatccactaatgtaactgaactcagtgaacaagggcagtggttaaaagctttattgcccactcatgcagatgtccaacacattgaacgcaagccaaaatatcgcaaaaacttatcctctacgcaaatttttaaagagggtttgtatggcgagcggtttatgccgattttgttagacaatgaaaaactgtattatggtttttctttggacaattgccatgaaattgaaccattaaaacaaccaaaaaatcacagcaaagactttgacaaaaaagtactgacagtcaaagaaaaacaattagtagcacataataaatattttgatttactgaaagaatttttatacacaggttcgagcagaaggaaaaataaaaaaccagttactgatagcatgcaagataatcaggacaaatattcatacttatccattgatacaataaaggcactcaatcatctgcaaaagtgcgccaaagaggtttgcgatacccgggcaacagaacaagcaaaaaaattggagaaacttcgttatagcgtggaaaagaaaaacattaaaaacgttttactgcaaggacgaggcagacgcacttttatcaaacaattagacgataaaaaatttaaagtatcaaagttaacactacctgcaaaaaaagattgggagcgattaataaaccacccaataattgattatcaaggcaataaggtaacattaaaagaatgctttgacaaaccagaacaagtggaaattgataatccaaaaatggttaatttttggcaagatttatcgcaagaaagcggttttaaaattgaatatttaaaagataatttacttaagaaaaatgacaaaggagaattttataaacaattgggcattattccaaaaggtgtttttgaccaaaaaatcaaaacaatgaagttgttaaaaccacttgcaaatagtgcattactcgaacaatcttttggtgttgaatttaaaacaatgactgatttaatccctcaagaaagctgggataagttatttgaagaatttttccacactaacaaaattaaaaataacaacttccataaacaagtcagaaaagattactctttgcctgaggtttctgcaccgtctggagggtttagaattcagcgcaagaattcactaacaaatgaaacaatttaccaagtgagcgcgattgctgacggcggatatgcatgtggtttcgccaagaaaaaagacggtagcattgatatgagtaagaatggagttacatttaatcctgccttaaaagcgagccgtaggaccgcctatattggcaagtctggaaaaccatatattcataaagaatcggatagtactgaggtggagtcattcgggagttcccgagaggttgcacttagttccgaaagtgtattgaaatgccgcctgactttggcggaagcgagcagaattgatgttgcgattaccatttctaacgatatattcaagaaaataatagaattttcaagcgaggatattgatgtttctcaaccaccacccgatttttctataaaatttacgaaaagcaatggtggaagagaagaacatgacaaatttaaagaatttttgaatgccatgaacataccaactccgcgggaggctggaaacccacagaggtgggcgtataagtttgaggtccaagcatcgcaagatacggttgttttgtcatacagaacatccatgacagcagaattaaaaacagcttacctgaatggcacgctagtaaatgattagtgccatcaaccccaaccgccaaaaagccctgttccttgctaaaaaacaactccctgaattggtatgcgatgcggtgaacttggagggagtgaactttaccctgccagagatacaaaccttgctggacgggataacagtgggcgggcatagtttgcaggatgagacgattgcgcttaatcaggccaatgcctggcggtttttgtttgattgtgttgagcaagacaggtttgctctttccaaagattttgtttgcgaattgcacgggattcttgcccagaaagaagcgctgacctggggtgttttcagggacggcggcgtaaccattgctggcaccaatcatatcccgccgagagcggacaaattaccgaccttgtggcaacagttgacgggaaaacatcatcccgccttgctacaatcagagatgcgccaatctaagatagacatcgaaaaaatagacatcgaacaaatttatacctgcgctattagtttatttttgcaaatggcaaggatgcagtttttttacgatactaacaaacgccttgggcgactgatgatgaacggcattttattggtaaacggactgcccgccattaatctgcccgctaaaaaacagcttgcatttaatcaactgatgctggatttttacgccagcgacgatgagcagccaatgcagctttttatgcgtgcttgtttagagagaaaaattctagaaataatgtcggaataaacttcatgcacgcccacataacgcttaccgaatacggccaattcatcggtataaagagtgagtgtctaacggtaaaagagaacggcacggtcaaggaatatccgcttaatcgcctaaaaagcattcagatcgccaagcaaggcatcagtttttcctcggatgttattattgcttgcgctaatcgcggcattaaattcttcttgtctgatttcaagaatgaaattatctcttgtctttcaggcacacagcaacacgctgttgtgcgcgttcggcaaaagcagttcacatttgtaaacagcccaagcacggccatattatcagccattgtcattgaggggaaaatcaagaaccaacgcgcaactctgctttattttaaaaaataccatcaagacaaagccgcgataatagaaaaaaccgccgagcaattaaaaacaatcttacgacagataaaaaccaaagactggcagaaatatgatcgctggcgagatattttattggggttggaagggcaagcggccgctcaatattggcagtgtctggttgagacaaatctgatgccggatgattttaagggcagggtgggcaggcaagcgcaggatattggcaacaggagcttaaattacggttacgccatcctcacatcttatgtttggaatgccttgatcaatgcgggcttggagccttacgccgggttttttcatgtccaaagagcaggcaagccgtctttggtgcttgatatgatggaggaatatcgcgcttgggcagtggatcgaaatatcatcaagcacagaggtgttttgcgggacaaaaacgaacttacaccaatcattaaaaaacaaatcatcaccgatattcataaaacattttccactaaatatcattatcacaaacgaaaaatacgattggaaagtattttgcaaagacaaatttatcacttggcaggcacattcgcgggtgacaggaaatacaaaagctattggttcagatggtgaagccgtggcgcaagtaaaattatacaatgaggttttagtaagttacgacatagccgataccgggcagcgcacaaaactgtttaataaactgaaagacattagcctgacttcaatacaaaaatcagtattttgggggcatttaaacagggcggaagaaaccagcgttaaatatttattgaaaacttattgcgctaaaacggataaagccttcattgcccgagtcaaattatccgaacaaatccagcagaacaacagcgtgggttatgagaaacaggatttcccccaatattccacaagctaccatgtcatatagcttgcccattagtttgctcaggcaatattgtttttgtccaagaattccgtattttcaagaattgctaaaactcaatccgcccaaaccagtgtgggtcaaacaaggcgaggatttgcacaaaggccaggaaaagatattcaaacacagaaccttaaaacgttttaacttagtgcaagccaaacaagaattcaatgtgtttgtgagcgccgaagagttgcaattacacggcatggtggatagcctgctgaacagcaacgaagaaatctaccccattgaattcaaattaaacgggcacaaaccagtcaaagggcaaatattgcaactcaccgcctacgctatggtcgcggaataccaatacaacttgccttgcagacagggatttatcctttttgaaaataaaggcaagacccatccgatagtgttcaaactaaagaacaaagaacaggtggttatcattcgggaccagatattgaatgatttagaaaaatcctatctgccggatagtccggcaaccccagcgcaatgcacgcaatgcgaatacttaaatcattgtaacgacagaagttgatgtagagaagttgatgtagatagtagccttgctttataactaaaaaatccccccatacttaaaaaatatggcgggattttggtcagattttacaacatgtccaagttgattcatctttattttagatgatttcagtgcatcgcttactaggttatgatgtatcagcacagtgcgaacttatgacacaaattttcgcaaaattcaacgctttccggtatttttatgattttcgcaaaaacacccaaaaaacacagcaagaaaaacaagccgaatcagcattctaaagcaggccgacacatcataacctagtaagccagcaactgaaaccacactgagtgactcacctgatacgatctcgcgagccgacacatcataacctagtaagccagcaactgaaacatgtttatgttaaatttatgcaggtctatattttcccgacacatcataacctagtaagccagcaactgaaacctgactagatgactggcaccaacaccaacaccagccgacacatcataacctagtaagccagcaactgaaacctatcgggcgtggcgcatttgtcccgctccggatatccgacacatcataacctagtaagccagcaactgaaacgtcttgactcaagttgaggagcctcccacttgccccgacacatcataacctagtaagccagcaactgaaacgcccactggcacactggcacactggcccactggcccgacacatcataacctagtaagccagcaactgaaaccaatttccgcatttgtattaatctcaagtgcgcgccgacacatcataacctagtaagccagcaactgaaaccaaaacttcatgcgctgcaagtccgaggtgcgagccgacacatcataacctagtaagccagcaactgaaacatagacaatcccatagtctcagctatataagtatccgacacatcataacctagtaagccagcaactgaaactcagtccccgaattccttgctcgcttggcggcgcccgacacatcataacctagtaagccagcaactgaaacctcacattaattcagctggcgcagcaacatatttccgacacatcataacctagtaagccagcaactgaaacagagtcgcgacactgaacagcagttgacattctcacccgacacatcataacctagtaagccagcaactgaaacaggtcgggatgatggcttttgtccagcgggactttgccgacacatcataacctagtaagccagcaactgaaactgcaaaaatcgactttgattaagagagccttttctccgacacatcataacctagtaagccagcaactgaaacatcacagtgacttcggtatgtggcgcgttgtatgccgacacatcataacctagtaagccagcaactgaaacttccaatggagtgaggaaaaagggcaggaataatccgacacatcataacctagtaagccagcaactgaaacgcataaaccgccgcgaaagattcactttttaaatcccgacacatcataacctagtaagccagcaactgaaacattatattctacgtcgaattctggcgtgtgaatgtccgacacatcataacctagtaagccagcaactgaaacctcaatctgagttccataacgccaaattgaaaataccgacacatcataacctagtaagccagcaactgaaacccaggggatcgacgccttgccggtcggcggcgcccagcccattttttgccgacacatcataacctagtaagccagcaactgaaacacaaggctccatgcaactctatggccaagcctcaacccgacacatcataacctagtaagccagcaactgaaacctgcggcaagcattatacgcgcatactcgctattgccgccgacacatcataacctagtaagccagcaactgaaacttatgggaatccccatataccagtctcccgctcaccgacacatcataacctagtaagccagcaactgaaacaactcattgatttttatagattgtgtcattttttgccgacacatcataacctagtaagccagcaactgaaaccaagctggacattggtttcttctggatcaaaatccgccgacacatcataacctagtaagccagcaactgaaactgcgcgccgcggtaaatgcgacggcgtgttcttgtccgacacatcataacctagtaagccagcaactgaaacgttcggcgtgtaatgcgagtcccaccaagcatcgtccgacacatcataacctagtaagccagcaactgaaaccccattgctgcgcggcgaggattagtttttttccgccgacacatcataacctagtaagccagcaactgaaaccattttcatgctatgcaattagatttgctcgacgccgacacatcataacctagtaagccagcaactgaaactttgggtgtctgctccccgccgccacaacatagccgccgacacatcataacctagtaagccagcaactgaaacaatcccgtggcgagaatttgcacagcggaattaaaccgacacatcataacctagtaagccagcaactgaaacccgacgcggcagcagtagagttactaaataatcgccgacacatcataacctagtaagccagcaactgaaactcaaaatagccccggcgaattttcggcgtcatgccccgacacatcataacctagtaagccagcaactgaaaccaagcgttgagaagtttcaattctgcaagaatgcaccgacacatcataacctagtaagccagcaactgaaacttcgtaacagcctctgtttttcatgcccacataaccgacacatcataacctagtaagccagcaactgaaacagttgaggcgacgctggacgcggtcagtttcgcaatttgattgcggttgcgattcagcatatagtccaccgcaagttcgatatgctcgggtttgatttcgttgaagcgctacaagccgctaaaatccagcagcggattattattttccatttcaagttattaaggcaagttattaaggtgcggtcaatgtctgagaagtttgattttatcgttattggcggcggaagcgggggtatcgcatctgctcggcgcgcggcgcaatatggtgcgaaagtcttggtaatcgaatccggccctctggggggaacttgcgttaatgtgggttgtgtgccgaagaaagtaatgtggacaacctcccaaataaatgaaactctggatttagcgaaagattacggctttcgcattgagcgactggggtttgactggtcgacgatcaagcaatcaagggacgcttacgtgtccagattaaatggtatttatggccgtaatcttgatgactccggggtcgcgctggttcgtggaaaagccaaatttagcgctagccatcgcattgcggtgaatggcactgaattctatgcagaccatatccttatcgccaccgggggagcgcccagcgtgccaaatatgcctggcgccgaactcggcattaccagcgacggtttctttaatctgacacatcagccgaaaaaaattctggtcattggcgccggttacatcgccaccgaattggccggcttgatgcatgggctgggcagcgaagtttccatgctattacgcaaggacaaactgctcaggacctttgatcgcgatgtgcatgagatggtgatgacgcaaatgcagcaaagcggtattgagataatgaccaaagtaacattgcaatcgctggtaaaaggaaacgattctctgggctatcgtgataatgaaggcaatggcaaggatggatttgattgcatcatttgggcaatcggacggcatactaacattgccagtctaaatctggaagtcgccggcgttgaagtggatgcgcgaggggacatacagaccgatgagtttcaaaacagctcggcgaaggggatctatgcggtgggcgatgtcactcacagagcccaacttaccccggttgccatcgccgccggtcgaaaacttgcaaaccgattattcgataatcaggctgatgcaagactcgactacgagaatatcccgacggttattttctcccatccgccggtcggcagcgtaggtttgtcggaagccgacgcgcgcgcaaaatatggtgatgatgaaattaaaatatacaagaattttttcatcgacatgcactacgccataaccgaacacaaaccgcgcacactggtaaaactcgtcgtccacggcgcggaccagcgcgtggtcggctgtcatgttgtcggtcgcggcgccgatgaaatgatacagggctttgccgtagcggttaaaatgggcgcaaccaaacaggactttgacaatacggtggcgattcatccgactgccgccgaagagttggtgacgttaaggtaattgaaggcgatgccgggttgatggttggcggtttcgtttgttatattttaaggataattttcggtgccgggcatttgccttgcaacagctttttgaaggcacgctatgccgctcttttcgtttttttaaggtgtaccaatagtagcgatatggcagccggcgttacccctggaattcgggctgcttgtccaattgtttgcggtcgggtagcactcagtttttgttgcgcttcggcggacagtccgcgcgcatttgcatagtcgatatcgtccgggatcgccaggttatcgctgttcttctggcgttcgatttccgcaacctgacgttcgatgtagccgctgtatctggcttgtatttcgagttgtcgaatactttgttggtcttgcagcggcgcatcgagttgggctaactcaaccaggtcttgataattcacttctggtcgtcgtaacaaatccatcaaattggcctccctttgcaagggttgacccagtattttttcaatcgtcgccgcatctgttttatccgggtgaacccaggttttttccaatcgggttttttctttatcgatgttgtcgcgttttttgttgaatgtcgaaattcgccggtcatccacaagtccaagttcatggcctttgtcggtcaaccttaaatctgcattatcttctcgaagctgcaaccgatattcggcgcgggatgtgaacatcctgtaaggttccgctgcgcctcgggtaatcaggtcatcaatcatgacaccgatataagcctcgtttctagccgggcaccatggttggcgttgcttgattttcaaagccgcattcaatccggcgattaacccctgcccggcggcttcctcatagccggtagtgccatttatttgccctgcgaaaaacaacccgtggatacatttggtctccaatgagatttttaatcctcgtgggtcaaaaaagtcatactcaatggcatagcctggtcgggttaccattgcattttcgaatccctttatagatcgtacgaaatcaagctgaacatcaaacggcaagctggttgaaatgccattgggataaacttcggtggtgttcagtccctcgggctcgataaaaatttgatggctgttttgatcggcaaatcgcaccaccttgtcttcgattgagggacaataacgcgggcccacgccttcgatggcaccgccatagagcggtgaacgatccagggcgttgattataatgtcatgggttttggtattggtgtgagtgatatgacaggaaacctggcgagggtgttgagaaacatccccaagaaatgaaaataccggaaccggatcgtcaccaggctgtttatccagacaagtatagtcgattgttttgccatctatacgaggaggtgttccggttttaagacgaccaacattcaggggtaactctcgcaagcgatcggccaatgctaacgaaggcggatcaccaacccggccgccttttgaattttccatcccaacatgaatttttccatttagaaaagtcccggtagtcaagaccacggtgggcgattcaaattcaatgcccagttgagttcgcacgccttttatctgcgccccttctacgatcaaatcatccaccgattgttgaaacacggttaagttttgctgatgttccacggccctgcgaatggccattttatataacgcccggtctgcctgcgcccgagtggcctgaaccgctggccccttgcgggaatttaatattctgaagtggatgccggcctcatcaattgcgctggccatgacgccgcccagagcatcaatttccttgacgatatggcccttgccgattccaccgatggccgggttacaggacatttgccctatggtttcaatattatgggtaaccaataaagtattgcaccgcatccgcgccgaggccagcgcggcttctacaccggcgtgaccgccgccgatgacaatgacctcaaaagattccgggtatttcatgaaaaaacgcggggctaaataatcgtgtttcgttgcggtcggctattgaaaataatagtcgtatttccgatgaatttcatccatgagattcgaggcttggccatacgatagtccgctgttttccggaatcacgatgctgacataaaatgtctcgccgaatttttttttcaacgtttgcaatatctggtgcatttgctgctcctcgacgatttttcgttccgactggcccggctgttttattttatattgcacgccggcagcggatttttgtatccatatttttgcaacttgtttccccgcagtgtttcttgccggcctgattaagtcgtgaaatttggcttccagggattggtactcgtcttgcagcgacttgaattgccgcaccgaagtcgccgcttgtgtttgcaacgctacattctcgaccttgcgccgcttaatcaactcggtaagtgccaatatttcctcgttggctatgccatatttttgttcaatattttcgctcaaggttctcaattctgtcattgcctgagttaacgtttctttttgagaccgggtttgttgtagttcaagttcagactgttgtcgttgagtctcggactgtacaagttcagaccgggattgctgaagatatagtttgacttcagcaagctgggcggaaaccgtatcaagtttttcactcagcgattgattggcgctggtcaggctggaaatctgttcactggattccagtttcagcgttgaaaattgttcactcaaattttcgatttgtaggctcaatgcctgctcacttttaaccaatgtgctgatttccaaccgtgcggattcttgctgttgctcaagcaacgtgttggcttgttcaaattgtattgaacgcttagctaaatcttgatttgccaataaggtcgcgtcctttgcggtaatggtggataacaactctcggtccaggtcaaaattgcgtaccataataaccactaacgccattaagaaaatcatcacgatcacggtcataatgtcggtaaaagacg

SEQ ID NO: 128 - DNA, 20634 bp, synthetic construct
  misc_feature 1..20634: note = Synthetic
  source 1..20634: mol_type = other DNA
ctcgaatcaataaggtcagagagtctcagtttcttgctgaaaaaaaacaacaacaacagttgttacaatctgcactagcaaaactagcccagcaggagcgcttaagcttacaattaaaaacacgcctagataaaggtgaaatactattaagtgaccttgaaaccgaattaaaaaatcgtagcggggtactcggtgaattatttggtgtggctagacaagccgctggtgatttgaaagccgacttacgtcattcattagtatccgctcaatttggtgaccgtattaacaaactggattctttagccaatagtaaagctttaccaaccatcggacaacttgaaacgctctggtacaccttacaacatgagatgaccgaatcgggcaaagtagtctattttaatagtgaaattgagcagacttcaggaaaaccagttgcagccaaagtgatccgcataggaacttttaacgccttatcagaagggaactatttacagttttcgccagacacaggtagacttactcatctttctaggcaaccagatagtcattatttatcactggctgaggacatggctactgcaacaacaggaacagtagctgttggtattgaccctacacgaggtgtcatcctcagtatgctaattcaagcacctgatacctttgaacgtattaatcaaggaggtgttattggcttcatcattttgattctaggtgttgcaggttttatttatggcattttccgcttagttaatttatccgttaccagtcaaaaaatgacagttcaaatgagcgcatcagttgcatcaatagataacccgttaggtagaatatttgctgcggcagaacaagataagtcaagcgatacggaaaatttagaactgattttagatgaagctattacccgagaaattcctgttttagaaaaaggtctacctatgatcaaactcttagcggcagtagctcctttactaggactgctgggaacagtaacagggatgattgccactttccagtctattagtttgtttggtacgggtgatccaaaattaatggcaggaggtatttctcaggcattggtgaccaccatgttaggtttatgcgttgctattccattactctttttacatagcttactggcttcccgaagtcgaattttagtacagattctggatgagcaaaccgctggtctaattagccgacgctctgaaaaatagtgcaaatgtctttttttgattcaatacaacagcttttaaattcaggtggcaatgtcctttgggttatcctttgggtgtcaatgggcttatggtgtttaattattgaaagactattgtattttagacaagcctaccctatacaacgtgaacgctggttacagcaatggcaatgtcgcgctgacaaaaactctgcacatgctttatctattcgggaatgtattatttctgaagcaaaaatcagtatgactaaaacaatccccattatttctatgctggttgttttatgtcctttattagggttattgggaaccgttaccggcatgattcatgtatttgatgtcatggctgtcactggctcaggcaatgcccgagcaatggcatcaggtgtttctcaagccactattcccaccatggcaggcatggtcattgccattactggactttattttagcaagttgattgaacagaaggtgagcgaagaaacccaccacttaactgatctattacaatatcattaaattagcttatcgctcactaacaccctagccggagacataaagattatgcgccgtagaagtaaccgatccaatagtgaacaaacatctgatatagatatgaccccgatgttagacatcgtgtttattatgttaattttctttatcgtcaccacgtcttttgttaaagaatcaggcattgatgttaatcgtccgactgcacaaacagcaacacgaaaagaaaaaggtaatattattgtcgccattaaacccaatggcgatgtctggattgacaaaagactggtggacattcgagcagtacgtgccaatgtttctcgtttgcatgctgaacaacccctgggttctgtggttattgcggctgataaagaaactaaagtcagggtattgactcaggtcatggatcaaattcgtttagcgggtattatgaatgcgtccatcgcgactgaaatagaataaaaatgagtagcctgattcaatttttgtatgaaatgcgataccctgcttcaattatttcaagtattgttatttccctaatcttgttttggctcatgcaaaccatgattagtaataatcagcatggacttaaacagtctgtaaatctgcaaatgactgagtttgtgagattaaaacgagaaacaaggttattaaccaaagacagaaaagtgcctgaagagccgccgcccaaaaaacgtccaccaccacctgagatgcaagtgcaaaaggcacacgtcaaaaataatatacccagcatagatattcctcgtttagacatccctttacaaagtgatcgatttaagggatcactcatgggtaatttacaaatgggacaaggacaaataagtactaatgttattcccttgcttcgcattccccctagataccctatgcgggcagccaaccgacgtattgaaggctgggttaaaattgaatttactattactgaagaaggcaccgttaaagatgctgttgtcattgatgctcaaccgagcaaaatatttaacaaagatgcattaagggcaatcggccgttggaagtttaaagctaaaattctggatggtgaggcttttgaacaacgcgctatacaagtcttaacatttaaactgaaaaaatgatacgttctctagtctttattctctgtctctgcctgcttttgcctgcaaatgtaaaagcagcgaatcaagcgaaaagaatatcgcccagaatatataaagggctaaaaaagacggaagcattaatttcaaaaaaaaactatcaacaagccgaacaaaaattaaaaggcttattggctaatgttagtcaaaaaagctatggacatgccactgtgttaagaagcctgtcttctgtttatgcactcaaagggcaatataaaaaagcagcggaaacactatcacaatgcctgagccttaacctgctacccgatgaccaaaaacaatatgccgttttaaatttagctcaattgtatatggctacagagcaatatactaaagccattcgcaccatgaagccctacttggctactcaagcaaaactagatgtagaaattaatgtgatgattgctaatgcatacacacaactaaagcaataccaaaaagccttaccttatattaagaaagcactatccacctcaaaaaaaccaaaagaatcctggtatcaattaaacctagctatctattttgaattaaaagattattcgtctgtagcaaatatattaaaaaaactgattcatatttatcctgagaaaaaaacatactggaatcaattatcatcaatttatcaacaattaaaacaatataaaaaagcagtatcagttaagcatcttgcttataaaaaagactttattagttcagaaaaagacttattaggttttgcaaatttgcttttatttatagactcgccttttaaagcagccaaactcattaaaaaagaaattgagcataaacgtataaaaagcaactcaagaaattgggaaactttagcgaatgcctggactatggctaaagaatttgataatgcaattaaagccttggaaattgcatccaaattaaagcaaaaaggcactctttatcaacaactcggacaaatatatgttgagaaagaaaagtggagccaagccattacttctttaaacaaagcactgaataaaggcggtttaaaaaatataggcacatgctatttattgttgggtatcagccattatgaattaaagcaaataaagcaagcagagaaatcatttttaaaagcgtcaaaatacggaaaaagtaaaaaagcggcttggcaatggttaaattatattaaaccgactacattataattttccatgggcttttgctaattgctcaaggtattccatatataatgccctctcaaaaactgaggaataagaatgccaataagcagaacaaaacattaggcataggcatcaaacaagctcaaatcagctacgccaattctatgcaagaagccaccaggcaccgccagcacaatactcaataatggcgtggtagtgctatcccccgcttgtgccagttttgatatgttcgataattttgagcatcgtggtagtgtgtttaaagattgtgttgctgggctttaaatgattagtaagccgccacatcaatagcatcgttaaaactttgacataacatctttaaaaaacttttaactgcttgattattctctgcgtgcaaacgatgccctatttgtatcgcaattttttcgagtgattgcacgcattcgctatgtaaggacaaaacttctttttccgataagtcgcaaaattcaaccccaaatcgtaataatttttccctattcgcccattttttactgccgaacatcagcaatgcgggaatgtcattttttatataaatagtcgtgcaaaccacgtcaaaagccggtgcaattttaatattattcgcaccttcataaatcaatccaaagttttttaaatgtgcgtctccattgccaataagcgtgttgatgaccatcattttaaaaaaatctataagagactgttttttgttgcttgggctgacaaaagttttgatggtttttgccactttttcataactgctttcatatttatcatcttttgaatatgcttgcaatacgcacatatcctcaaatccgagaaactttccatcgacatcaatgtcaaatcttttgttgataaatagggcgttatcatcagacaaatgaaattcaggggtaacaacgcccgccccttgcataacttgcatacagtaatattcgttaatagcaagattggggtaatcatcgccccaagctttgacaatgtagtcttgtaacgcaagtgccgccttatctttgacctttgccataactttcggctgtacgccacttaatgccgatgttaaggcaaatttagatagcaattcattaaataaattgcccgatgatgggtgtaataaatcatttaaggtaatggatttacttgtatcggcgttgtcataacttactctgccctgtatattctttgataaaagcttgagcaatccaaaatcgtctgttggggttatttttgcaaaatgttttttgataatcgcgagtaaatacccttcaggcaagtgcatctcaaaaatagggggaagtttcccaaattcgccagcgtaactttttgccctgacaggcatagttaaagagacataatcatctgtatcacttgccatacggtaattaaatacaatatcattagtgttgccatctttcaccaaaacgccagctagcgtatgattaacattaacggataaaggcagattcaaagtatcatcgttcaagcctcaactcctcaagggtcggaaaccttgataattgtataaattttaattcatatcccaaataatcagccatttgtacaatggttttgatactcacattccccgcattctcagcagcagaaatagtcgcacgtgcaaggtgcaattctttagacatagtaggctgcgttaccccctgtgattttctaagcaagcgtaactgttgcccaatttctttaaattccataacccacaaaatgtataaaataatttacattgtaacaataataataaattatgcacactattttatacattttaaaacctaaaatcagccgctgggttaatggttaatagttaatggtaattttaagcattggggtaatgtattcaagcaatgtgtcaagcagttggggtaaaatttaacaaaaataaacaacaaggaaaaaactatgaacaaaattatttcacccatcgccattgatatgggggcaaaaaacactggggtttatcttaatcattttgagcaaggagaatacccaacgagcagtggcaatagtcagggtaaaacgattgttattgatagtactaatattacttggtcgcaagctgatagaacagggaaacgtcaccaaattagagccaataaaagacgcaaattatccaagcgattattaaagctggtgttaaacgaatatgacttacaacctaaccaagcccaaagcgagtatttaagtggattacttaatcgccgtggttataaccgtattgaaatcacagaagagcacgaagggatattacaatcgaagttagttagtgattttttttcactcattatttttaataattctaacaataataatattttagatgggttattaaaagaattaaccataaaaaatgatgaagacaaaataaaatgggaaaacgttttaaaaaataaaatattttctatgtcagaaaataaaaactcagaatttaaagaatatattaaaaacaaatatgaaaaagacgaagttaccgagttatcaaaagcatttacagcaattaaaaatacgattgaaaaacaaatagataactatgcaacgggacatttacatagaaaaaactacttagagaatatccaaaaagatatagaggtagaactgttaaaaccattattaaataatagtttaactgttgaaaaactagcttatctaattggtaatatcagcaacttacaactacgcgtattgcgaaaatattttaacgaaaagtcaatgcaaacagacgatgtttggctacctgaaaaactgcatctagtgttttttaagtggattagaagttggcataccaaacagcaaaatgaaaaagacaaccgcatagaaatattagcacttaaagataacaaagatattttagatatttttacctcgttagatcctaaaaaaaccatcccaccttatgaagaccaaaataaccgccgtccacctaaagatttaacacttagattaaatcctaaagctttagatgggcagttttcgggctgggaaagtattacaacatcattggcaaataattatattttgcctccaataaacaatcacattaccgaacgaatagatattcaaaaaggattagaagataatgttagcccacaaaaaaataaaggggaaatccaagatacaaaagaaaggcaaatattagcggatacattgcatagaattttagatagaacgattattttggacccgtataaattacgctggttagctcaaggcgatacgtctaggggcgctacaacggctaaagcgttattaaaccaacacagcaacaacaatcaggcgggcattattgttcggcttgctaaaaagtattacgcggaagtagaggtcgctaagcagggcttatgggcagaggctggcagtttattctttaggtgtaataccaacccaccacataaaggcaaattaacacataaattagtcgggcacattctacgagaagaatttaatgatgaaagaataaaagaatttagacaggaatgctgggaagtaaaaacaggtcgctcaactataaaaagtatggctgggaaaattgaggctacgcgtaaaaaatacggcaatgggtttaattacattgtgcaaacgattaaaagacgcaattatgtattagcaaataatagtccagcacaagcacaaaaagacagatgggttaaatacgcagaagatcacaaagatgtaattgaggcaattaacaatactaaattagtggcagaaaaaattaatgattttttggatagcaataatcaggaaaaatataataacccctatagtatcgcccaactttataaccatttggaaagtgaaattacaggctttagtaaaactgataaattcaataccgaggaaaatgcgtggcgtgataaaacgcaatctattgaaattttgaataaggaaggcggagtaataaaagtaacaagatccaatgctgtgcgtctaactgctgatagtattcgcccgttcgacggtttattagacagaattatcagccgccaagcgattgaaattgcacgtgcgaaaattgctcagttcgaaagtttgaatattgataaaaacgatattttatttgtaccaatttttatggaacaaaatcgttttaagtttgagcaagatatgcatgagattaaaggtgcaaaaaatgttaaaaagaaagcaaaagataatgcacaaaaagggttagaggaacaagaaaaagaatggcaagataaaaatactagagtcaaaaaaaaccgtcactgcccttatacgggtgaaattattacaagtggcgaaattgaccacatcgtcccacaaagcgaatctaagagaaatcaagatgtggtgtttaattgcgaggctaatttaatttattgttcaagcgtgggtaatcacagtaaaagcaataatagatacacatttgaacaattgaaccataattatttaagcgaaatttttgcaggtgaaacagatgtaaaacaaacaattataaattttgttaatggtctagataaaaacgaccctattagttttcataatttagacgataaagaacaaaattatttaagacacgccctctttattccagaattagatagccagactttcccaattcttaatactagatataaaacttttgttaatggcacgcagggttatctcggtaagaaaatacgcaaattattgcaaaaagaatatccaaatataaaggttaaaacctatcaaattccagcccaagaagtgagccaattgcgcactgtattaggcgagcaagataaggcattcgaaaaacaagaaagacagggggcgttttctcacgtggtggatgcagctttagtgttagctgccgccttacaaaaaccaaagattgccgaagaattaacgactatccatttaactgatgagttaattaataaaactgagcatggccagtggttaaaagatttattacctaaaaacgcatcagttcaacacatcaaacgcaaacctaaatatcgcaaaaaattagaatcaacacagatatttaaagagggtttgtatggcgaacgatttatgccaattttattagacgatgaaaaactttattatggtttttcattagataattgccaccaaatagagccattaaaacatcctaaaaagacagttaaagattttgataaaaaactacagactgccaaacaaaaccaacaagtcaaacatagtgaatattttgaattgttaaaaccatttttatatacaggcaagaagaacgctaaggaaccagttacaggagatttatttgatcattggcaatatcaatatttgtctattgataaaaccaaagccctaacacatttgcaaaaatgcgctaaagaagtttgtggcgagattgaaattaagcaagcacaacaactagaaaaactgcgttatagcgttgagaaaaaagaaataaaaagcgtgttattagaaggacaaggtaaacgcacttttattaagcagttagatcctaaaaaatttactgttgcaaaattaactctaccagcaaaaaatgaatggaccgctttaattaagcatccaattaaagactgtaccggcaagcaaaccaccttagaggcctgttttggagaactagaacaagtggaaatagataatccagccctatgtggcttttgggaaaccttagccgctgaaagtagcttagagattgattatctaaaagacaatttactcaaaaagaatgataaaggtgaattaagtaaaaaatctggcgttattccaaaaaccgttttcaatattaagattaaaactgatgaacagttaaagggacttgaatatagtcccttattaagaaaatcttttggcgttgattttaaagtaatgactgatttaatcccacaatcaagctggggtggattatttaaagcgtttttccgcactgataaaattaaaaacagtagtcatcacaagcaagttagaaaagattattccctacccattgtatcagcgccgtcaggtggcttcagaattaagcgtaaaaatccattaactggtgaaacagtttatcaagttagtagtatcgcagacggcggctatgcttgtgggtttgaaaaagatgaaaagggaaatatcaatatgacaaaaaccggggttacatttcatgcagggttaaaggaaagccctaatgtcgcctatattgggaaaggtgggaaacctaatattaaaaaacaaagcaatggtaatacgacagagccgttcggcagcacaagggaagttaatctaaatgtcagtgctattaaaagcagttatttaaccctagcagaggccagaaggattgacataagaatccttattgaaaaacaactttttgaaacgttgtgcgagtttagtgatattgatgctaacaacccaccgtcaaacattaacattactttcgataaaaagacggaaatagaaaaacataaagaatttaaaaagcttatgagtgatcaacaaatacccatgccaagagatagcggtaaaaatcgttgggcatacaaactttccgtgcaggtcttaaatcaagatatagagttattttatagaatagggttaactgatccgatgagagacgcctatcaaaacggcacagcatagagtgagcggccaaacagtcgtctatcaaccctaagcaggcgaggtaaaaattgatgtgcgttttgagggcgatacggtttggcttaatcgccaccaattagccagtttgtttaatagagatattaaaaccatcggtaagcatattggcaatatttttaaagagggtgagttaagtgaaaaatcagttatcgcaaatcttgcgacaactgcggcggatgataaaacttaccaagttgatcattacaatttagaaatgattatcgccgtgggctatcgagtgaaatctccgcaaggcacacagtttagaatttgggcaaccaaacaactcaaagactatattaccaaaggttttgtgctgaatgatgaacgctttaaatcgggtaattcaatgaattattttgatgagttgcagcaacgcattcgtgaaattcgtatttctgagcggtttttttatcaaaagattaaagatatttacaccaccagcattgattatgacgccaaaagtgataaaaccacccatttttttaaagtggtgcaaaataaactactttgggcgattagtcaaaatactgccgcagaattggtttataagcgtattgatatatcaaaacctttgttgggaatgtcatcttttgatgcaaaaataattcaaaaatcagatattagtattgctaagaattatcttgccgaagatgaaatcaagttattagggcttttagttgagcagtatttggcatttgccgaaaccatggcacagtaacaaaccccgatgacgatgaacgattggataaagaggctggatgttattatcaaattaaacggtaaagagttattgagtagtgcaggcaaaatcagccataaaatggcattagataaggcgcagaaagcttatcaacagtaccaattagaaagaaaacagcagcaaaaacaacaaagcctagccgaacttgaggctgacattaagcacttaaaataaacgatgcacgctcatttaaccctaagtgaatacggtcaatttatcggcgtaaccagcgaatgtttaacgattaaacacgagggatttactagggaatatccacttaaccgcctaaagagtgtgcaaattgccaaacgcggggtaagtttttcatccgatgtgattattgcctgtgctaacagagggattaaatttttcattcaggattttaaaaacgaaaccattgccagtatttcaggcactgggcaacacgctgtggtgcgtgttcggcaaaatcagtttgaatttatcaaaaccattaaagtggcgagcttatccgcatcagtcattgcaggaaaaattaaaaatcagcgggcaacactgctttattttaaaaaatatcatcaacagcataaagccactattgacaaaactgctgaacaattaaacagtattctcacgcaaataaaataccgaaaatggcagaattttgacaaatggaatgaaatattattaggaatggaagggcaggcagcctcgagatattggcagtgcttggttgcgtgcgatttaatgcccgatgattttaaaaatagaattggcaggcaagcacaagatgttggtaacaaagcgctaaattatggctatgcaattttgacatcctatatttggaacgcacttttaaatgcagggctagagccatattgtggttttttccatacgcaaagagcaggtaagccttcattggttttggatatgatggaggaataccgcgcatgggtagtggatagaaatatcatcaaattacgcactcaattaaatggaaaaagtgatttaacgcccgccataaaaaagaaaattattaccgatattcacaaaacttttaataccaaatatcattataaaaaacgaaaaatgcgcttagaaagcatcttacaaaggcaagtttatcatttagcagggcatttttctgatgataaaaaatacaaatcttatcgatttaggtggtaataatttatggctcaagcaaaactacataatgaagttatggtggcttatgatatagaagacagtaaaaaacgtactaaattatttaaaaaacttaaagatattagccttaaacccattcaaaaatccgtattttgggggcatctgaataaagcagaagaggacagcgtgaagcgattgttaaaagaatattgccagaaaaccgataaagcttttattgctagaattgcactctcagaacaagtcaatcaaaacaattcgattggctatgagaaagatgatttccccaaaaatccacatgaatattatgtcttatagcctgccaattagccttattcgccaatattgtttttgcccacggattccttattttcaagaattattaaaactcaatcccaaaagaccgcaatgggtaaagcaaggcgaagacttacatcaaaaacaacaaaaagttttcaaacatcgcactctaaaacgctttaatttagagcaagcaacccaaacatttgatgaatttgtaagctccgatagttttgccctgcatggcgttgttgatagtgttttaaacaatcaagaaaatatttacccaatagaatttaaactaggcggcagtaaaccgatgaagggacaaatcttgcaactcacagcctatgggttattattgcaagaaaagtatgattttccctgccaaatggggtttatcctatatgaaaacaaaggcaaaacgcatcaaattaattttgacgaaaatcgcatccagcaagtgataataattagggataaaatcttatatgatttagacaattcttatatgccagatagccctgcaacccccgcccaatgcacacaatgtgaatatttaaaccattgtaatgatcggtaaatggtataatattcttacttttaattagacaataaaaaacccgatatgtgcaatacagagatcgggtcaaaatttattttagatgatttcagtgcattttatttaggttatgatttgctggcacttgagtgaaattataacaaaaaaacttcgcaaaatttaacactttttaatatttttatgaacttcgtaaaaacatcaagtttcaaaactctaaatcccttactggataagcattttaagacgctccagcaaatcataacctaataaaccagcaactgaaacgcaatgacgatagtagggcttacaactccctgcaccagcaaatcataacctaataaaccagcaactgaaaccggaataatttcatcaaaatcgacaaacggcgtgagagtgccagcaaatcataacctaataaaccagcaactgaaacttggtacttctgaattaaaattagtgagtgttatttccagcaaatcataacctaataaaccagcaactgaaacattcatgtccttctttttcaaaaaaaaatactgtcccagcaaatcataacctaataaaccagcaactgaaactcggaactggatatgttatatgcgtatagcttcccccagcaaatcataacctaataaaccagcaactgaaacgcgcggacagccgcagtgatcaacgagaagctatcccagcaaatcataacctaataaaccagcaactgaaacagaaagcaacatagagggcggactgaccacagaagccagcaaatcataacctaataaaccagcaactgaaactgccaaaagctttttctgaggtaaacatattataccagcaaatcataacctaataaaccagcaactgaaacctaacaattgaaaattgaaaattgaaaattgaaaattgaaaatggaaaatggaaaatggaaaatggaaagttgaaagttgaaagttgaaagtggaaaatggaaagttgaaagttgaaagttgaaagttgaaagttgaaagttgaaagttgaaagtggaaagtggaaagtggaaaatggaaagtggaaagtggaaaattgaaaattgaaaattgaaaattgaaaattgaaaatggaaagttgaaagttgaaagtggaaagtggaaagtggaaagtggaaaatggaaaatggaaaatggaaaatggaaaatggaaagtggaaagttgaaaatggaaagttgaaaattattttttatctgcttaaacttccttttgttgattttactatgcttgctaatagttttataagctctacgctatctgggtgaatggaattaaaattatctatgtttatgtattcactgtcttttaataacattaaccagtattccgtttcattggcttcttttaatgcaatgctcattttattaataaaatctttttttgattgagcgtgttctgcttctctaattaacgcgccaacacttgtgccacttctcaaaacctgcttagaaagcacatgctctttctgttctgaaacaaggtatttatacaattttattattcgcaatgcaaaagcataagatttatcagcaacaatattttctctttgattaatcattttcaaccttccattgtataaaacactaatcatacaaaaacatcgcatcaccataactaaaaaaacgatattgctgttttatagcatgttgataagctgtcttaataggatcataccctgcaaatgcagaaatcaacattaataatgtagattctggcaaatggaaattagttaacatggcatctactgatttaaaactataaccaggggtaataaataaatctgtatctcccattcctgcttgtagttgacctgctatagatgctgactccaaggctctaacagtggtggttcctattgcaactattcgccctccttctgctttagttttctgaacagcatccactgtactttgattcactgaataatattccttatgcataatatgctcagatagttcatctactctaactggctggaatgttccactacctacatgcaatgtcacgaatgctttagagatacctttttgttctatctttttaattgttgcttgatcaaaatgtaaccctgctgttggtgcagcaactgcaccaggctgttttgcaaagactgtttgatatcggctaatgtcttccgcatcatcttcacgtgttatgtatggaggtaatggaatatgacctatttgctctaatatttctagtacgctttgtgcggtcgtaaatctcaacttaaacaagtcaaaatccctgcctgtaacttcgcattcataaccattttcaagctctaaaatagtattttctttaggtgatttactggaacgaatatgagcgactgcatgttgttgaccagtcactctctcaatcaataattcgactttaccccctgttttctttttaccatataagcgtgcaggaataactttggtatcatttagaattaataaatcattctcattaagtaaattgacaaaattgacaaagctctggtcttttagctcccccgtcgatttttgcatactgagcaatcgactttctactctattggctaatggtttttgggcaattaaatgcgcaggcaaatgataattaaaatcacttttcttcatgtcactgggtaaattatgtggttcaggctgttttatagaaaaaaccagtattcggaatgattctttttattatttgagataattttatttttctgtctcaaaaatctctgtttatggagggaaactaattaagtgtagtcaagacacattcataattaggttcatccgctatttctgcaactaactctgtatagataatattgtcattttcatcagcgatgacaattgcacgagcagtcagcccttgtaaaatagtatccgctatttttacaccataatcttctgcaaaatttgatctaaatgttgaaagagggatcacattttttaaaccttctgtttcgcaaaatcgaccttgggcaaagggtaaatcagctgaaataactaacactactgtattctctattttgctggctttttgattaaatatacgtgttgatgctgcacatgtaggtgtatccagactaggcaatatgctcaatatttttctttttccagcatagttcgctaaagatatatcctcaagcttgccattaactaatgaaaagtctggggctttgcttcctactaaaggtaattcacctgatgtatttaacggtttaccttgaaatgttattgttgtcatttttttccttctttcattaagtttaacgattccccatctgtttataccattttcaaaaataaatggtattactttactttaaaaagaccaactacatgacctgtcattcctgtattcactaagaaatctaaatgtttgattgtggattgccgataaaagacttcgggaatgacgtgtactacaaagcgttacagatacttcagactttatttaagatggcaaaatatcataagtactcaaactattctcgcataataatcaagcacccattactttagatacgccttatttggggtatatgccatttgttttgcagtgtttatagcaatttcattagtataaattttactcaccagatacaagctcatatcaataccagctgatattccacctgaagtaattacattaccatcttcaacccaacgctgattttctaggacattgagagagggataattttctcgtaaaaatggaatatcctcccagtgagtggttactctttgggcggataatatctttgcttcagctaataaaaatacacctgtacaaacacttgcaataatttttgcttttttagatttctttttgatccagtttaaaacttgtcgctttttcatttctgaaatataaatacctccgacaattattaacaggtctatttctggatggtttgaaaagctataggctggatttacgctataaccgccacgggcagtaattgtgccgcctgtttcactaactaaaaaaacattaagcttgtctgatttttttagcattcttgatgcagtagaaaaaacctcaaacggtcctgaaaaatccaagacctctgctttttcataaatgtagatgccaatattcattttttacgcataacaccaaggtaacttgatgctgactgatacgctaaaaatatcataaatataccaaactttcaaaatccccagattattttaaaaaaacctactttaggaagtcaggttgaccgactggttggtgcggcgatgtaacctaatgtttgtaaatacaacaaacgatacgctccgcttcttttaaatgctctttgctgtaactgggcttggtttcataaagctctttactttcaattttgtttgcacgccatttgtttagcaatgccaattaattatgcttaggtgcatattaccaaacccattgatttttctattttgaacgaggtactaaaaaaatatttataacatctacgctattcccaaaacatcttgcatatcatacaaactgggatctttatcttttaaccattcagcagctctgatagcaccattggcaaaagtcatacgactgctggctttatgtgtaatttcaatacgctcaccttcatcagcaaacattaccgtatgttcaccgacaatatcacccgctcgaatagtagaaaaaccaatggtctttctatctcgctcaccgatatcaccttcccttccataaattgcacagtcttttaagtcacgatctaaagtatcagcaatcacctcacccatgcgtaaagcggtacccgatggagcatcaactttatgtctatgatgcgcctcaatcacttcaatatcggtatactcacccatcacttttgctgtcatttctaacagtttaagtgacaagttaacccctacgctcatattcggtgccaagacaatcgccacatcttcagcagcctgattgattattgctttttgttcatcggtatagcccgtggtgccaataaccagctttttacctgcttttcgacaaatttcaatatattccagagaaggagcaggacgagtaaaatctattaacagatcaaattgatcagtcactgaagataaatcatcaataactttaatattaactgttcctacccccgctatttcgcctgcatctttgcctaatgatggactttctggtctggatacggctacagttaattctgatttttttgatagcacagccgcttttagtaaacataatcccattcgccctgatgcaccgacaacagcaattcgcattttttatccagtcaatttatcaaaaaaacttttcacaccatcagtccaaccatgctcttgtggactgtgtttcttaccaccaccggataatgactgttttagatctgcaagcaatgctttctgctcctttgttaagcgaacaggggtttctatttgaactttacacagtaaatcacccactgcaccaccacggacaggctttacacctttgcctctgagtctaaataactttcctgtttgggtttcatctggtatttttaattttactcgaccattcaaagtgggaatctctaattcccctcccaaacaagctgttggaaaactaataggtacttcgcaatataaattggcctcatcgcgagtaaaaatatgatgatctttaacttgaatctgtacatataaatcacccgatggcccaccattaacacctgcttctccctctccagctaatcgtatacgatcaccgttatccactccagcaggtactttaacagacaaggttttattatcttgaactcgaccctgtccacgacatgggcgacatggatcttttatctgcgagccgctgcctttacagctaggacaagtttgctgaacagaaaaaaagccttgttgcatcctgacttgaccatgaccttgacagcttgtacaggtcactgggcttgaaccttttttagcccccgagcctttacattcactacaaactacttttaacggcactctcacagaagcttctgtaccacccaccgcttcctctagcgttaattctaggttatagcgtaagtcggatccaccttgtccgctgcttcgtctacgattgccgccgcctgcaccaccgccaaagatatcaccaaaaacatcaccaaagatatcaccgaaatcagcaccaccgccaaaacctcctgaaccgccacccattccttgctcaacacctgcatgaccaaactgatcataagccgctcgttttttagggtcagatagaatttcataagcttgcttggcttttttaaattttttttcagcctgttcaggattatcggtatttctgtcagggtgatatttcattgccgagcttttatagctcttttttaattcagcatcactggcatttttttcaacacccagaattttataaaaatcttcttttgccataaggtaaataaccgccagcgagaaccgccagttttttatagtccactttttaagggaaaaagggctataaaatagcccttatcaggaacgacttatttattatcgtcgtctttcacttcttcaaactcagcatcaaccacatcgtcatcgggaacagtagacttatttgtagttgctgaatctgcttcagaaggtgcgccttctgcttctgctttttgtgcatacacacgttcagccaatttaccagacaattcagttaatgctgttgtttttgcttcgatagcatctttatcatctgctttaagcacctcttttagttcagatactgccgcatcaatcgctgttttttcatcttcgccgacttgatctcctaattcttccatagatttttcagtggcattaatcatgccttctgcagagtttcttgcagaaactaattcagtcactttcttatcttcatcagcatgcgcttcagcatctttaatcatacgatcaacctcatcatccgataaaccactagaagcagtcaccacaatcgattgctctttacctgttgctttatctttagctgaaacattgagaataccattagcatcaatatcaaatgatacttcaacttgtggaataccacgctgtgcaggtggaatatcggttaaatcaaaacggcccaatgatttattaccactagctacttcacgttcaccttgtaaaacatgaactgttactgctg

SEQ ID NO: 129 - DNA, 10609 bp, synthetic construct
  misc_feature 1..10609: note = Synthetic
  source 1..10609: mol_type = other DNA
aaaaaaacagaggcaggaattttaaaaacctttattgcaatagcatttaaaaaaataagttaccctttatcaacaataagttacccctatcaacaattagttaccctgtcatctacaattagttaccctttattagcatcacactcaactggctacttcatccgtaactggctacctatccgcaattggctacactttttaattttaagggtgcttttttagctattttaggtaacaatcacaaccaaaaaaaatgcttacacagcaagggtttataccaaaattaataaatcaatttttaactggctacacttcatccgtactggctacacttcatccgtaactggctacacctatccgcaattggctacacttcatccgcaattggctacacttctatccgtaactggctacacttcatcgcaattggctacacttgttactctaaaacccctactacaatgggaaaaacatacttcctccttaaactactacaaaacttatttaaaaacttagtaaacattcaagaatatcattatgggtactgaaatgctaataccgaataatcgagaaagaacaattgacgctttagcgcgtaataatagcattattaaatctttgtttcattttgaaaagaaaattacttttttaattgtgtcgttagcaatccaaaaaaataaaagcaaatttacacatcggtgggcttgtgataatcacaaaaacttgaaatacaagatttaaaaactggaaacgatgctaaagtcggcatcaataaattaatcgaattaattagaaaagatttagagatacacaatttttttaatctttatagcccaaattctggcttgaaagatattaggcaaggcttaattcaaaagacagcactaacaaaagatttatttaacgacttggttattcattttgatgaaaatatgtttaaagtgtttaaatctgaaaaaaattatacaattcagtcacttaatcagctagtcaactgtaaagaaaaccaaataatagtactttatgcgctcacacaaccttatgcaaaaccaaactcgccttatttaaagcttaatgttttagaattaaggctttatttaagaattgcagatgattcttacacaatgccaagaactttaacattgagagttaagaaaatatgtcaaaagataacaaacacaactgatattaatcttacggttatcccaattaaaaaaatggaacaactggggtaactattggatatcaatttcgttctgaatttaagaaccaaaaaactattacaaaaattgaagatgtaaaaattattgattcaaaaccaagaagcaatcgtcaacagctatcaaattggggtgtaagtaaaaaacaaattgacacatggattgctaatttagacactaaaacaattaacgatgcaatcaatcaaacacttagtcggtcaaagcataaaggcaatagatcgaattctggtggatatatttatttgtcaggtttcaccacgttactccctactttcaaaaaccacactccaaaacatatcaggctttctgataaacaaatcaggcttcaaattataccaatactctaaagcctcataaggcgtccttaccttaatctcttttctaagtccaccatgtccacgattaaaattataaaaaatcaaaaacttgttcaaatcttgcttcatttcatcaatgttttgatacgttatcgccttaactgttgcattcttaatcgtgccattgacgcgctcgaccatgccattggttttaggggttacaggctgtgttaatcgatgttcaatctcgctgcgtgaacagagtttgtcaaatttgtgtttaccactaacttgcttgtctttagtgacaaacttatcagtaaactctaagccgttatcagttaatatatgcgtaattgtaaagggataaaagtccttgcaattattaaggaactcaacggcattgatagcggttttattctcataaatctcaaaataaagcaccctagtagcacgatcaatggcaacaaacaaatattgcttcttacccgctagttttggtaaataggtaacatcaatgtgtaaatatccaggctcatattccttaaatgtagaggcttgttgtttcttttcttgtggcactcggttaatgccaaaacacaccaaagtgcgatatacattactcctattggcatttggcatgcaggcaacaatactatcagttaagtcatcaagttctaaccaagtgagggtttgtactactcgaataatctcacgctcagtctcatttaaagcgtagtgtattgtctttggtcttgaggttttgtctttaacaaaatcacgactcttccatttggcaatggttttagtgctaacaccaaagcggtgtgctaaggtagtattcgaagccttagccctgtgtataatcgctcttgaatgtgaattagtattcgcattcatgtggtagttctgtttcatatattctcctttttgtagtagaaaaaaagttaatatgttacggcaactaccccctaatttagggggaagtttaagggtttgagtttttattttttagttttttgcaagcaaaaactcaaacccttaaaatgacgattgtaagtggcttgagaattattgattcaaatgctcaaactggaataacgtggtggaactggacagataaccatataccccatgttgttttaatcgggcaaagcgccaaagagctaggcaacaacatccacactgcaaaagttacctatgccaactctatggaagcagcggttaatgttgccagtaccttaattgacaagggtgcaattttgttatccccagcttgtgcgagttttgatatgtttgatgattttgaacagcgggggcgggtgtttaaagattgtgttaataattggggcgtataatccaataaaaattattatttaggactttaaactatgagcaaaattatttcaccaattgccattgatatgggggcgaaaaatacaggggtttatcttaatcattttgaacaaggtgaagacccaacaaccagtggcaatattcaaggaaagacgattgttacagatggcactaatatcacttggtcgcaagcaggtagaacgaaaaagcgtcaccaaattcgcgctagtaaacgcagtaaattatctaaacgcttgttaaaacttgttttaaatgaatatcagattaaaaccaatcaagcacaatctgagtatttaaatggtttgttaaatcgtcgcggttatacttatttagtggaaggattggacgaaggtttgatcaaacaagcctttgtagcaaagtattttattaaagaacatcctgaattttttaaaaatcaagatagtttttatattgagtttttagctatttcaaatgatattgataaagcaagaggattgcaaaaaattttaactttatcaaaaaatgaggcaaaacaggcagtagaagaaaataaacaagagtttgccgatgcttataataatattaaaactgttttaaagacacaaattaaggaaggggatgaaggacataaataccgaacaatctatttagaaaatattaaaaaagatattcaagattctgatttattgcaacctatgtttaatgacttaaccgccgataaacttactcatttaattggcaatatttgcaatttgcaattacgaatattgcgcaaatattttaatgatgagaaaatgaaatcgggtgatatttggctgcccgacaaattacacaacttattctttaaatgggtaagaagttggcacgctaaacaagaaaatgaaaaacaaaaccgccaggcaatattaaaattaaaaagcacaccaaatattttagatattttaacttcgttagaccctaaaaaaaccatcccaccttatgaagatcaaaacaatcgccgtccacctaaagatttaacccttaggctaaacccaaaagcgctagataaacagttaaaagattgggaaaaaattaccaaatcattggcagataattatattttgccatcaataaaaatccacattactgaaaatattgatattagcgagggcttggaagacaatgctcgtccgcaaaaaggagaaaccaaatcaaggcaaatattggcagatacactgcataggattttagatagaaccctcgttttagatccttataaattgcgttggaatgttcaagatagcaacacagaaactgcgaaaaacgcaagggcattattgaatcaacacagcaaccaccaagcagacaatgtgattgcattggcaaaaaaatattatgcagaagttgaaaaagccaagcaaggcttatgggcgtttgaaggaagtttgttttttaaatgtgaaaccaatccaccacacaaaggcaagattcgacataaattagtcggacacattttaagggaagcatttactgaagaacaggtggaagacttcattcaacagtgttggggtgaaaatgtaaagcgcacgacaatgaaaagccttgctggaaaaatagaggaaacacgcaaagaatatggcaatagttttaattatattgtttcaaccattagcaaacgccagcatgtattgcaaaaaaatactgttagtgagaagcaagaagccagatggaataactataaagatgaacataaagatgtcatcaaagcgattgaaaataccaatttaatcgctcaaaaaattgcaaaatttttaaaacacaatacaccagataaatacaacaacccttatagtatcgcccaactttacaatcatttagagggtgaaattagtggctttagtaaaactgatagatttaataccgaggaaaatgcatggcgagataaaacacaagtgcttgacattctaaccaaatcaggcgaagtggagaagattgaaagatctaatgccgtgcgtctaaccgctgacagtattcgcccgtttgatggcttgttagacagaattatcagtcgtcaagcgattgaaattgccagaatgaaaatcaagcaaatagaagcattaaatattgataacaacgatcctttatttgtgccaatttttatggaacaaaatcgctttaaatttgagcaagatatgcacgatattaaaggagttgagaatgttaaaaagaaaacaaaagataagacaaaagaggggctgataaagcaaaaaaaacaatggcaagataaagacactagaattaaaaaaaataccctctgtccttacacaggagatgtaataaccataggtgaaatagaccatattattcctcaaagccaatcaaaaagatacaacgatgtggtatttaattcagaagcaaatttaatttattgctcgggtactggtaaccataataaaggagatagtcgttattcatttgagcaattaaacccccgatatttaagagaagtttttactgatgaaagcaatattaaacaaagtattgttgattttgtcaggagtttggatgaaaatgactcagtcagttttcataatttagaactcaaagaacaaaattatttgcgtcatgcgttatttatttctgaattagatagtaaaactttcccactattaaatactcgatataaaacttttgtcaatggcacacagggttatttaggcaaaaaaattaggattttgttgcaagaagaatatccgaatatagaggttaaaacttatcaaataccagcccaagaagttagtcaattacgcacagtgttgggtgagtatgatgtggcatttaaaaaacaagaaaaacaaggggctttttctcatgtgatagatgcatctttagtgcttgccaccgccttacaaaatgcaaaaatttctgaggagttgaccacgacaaataccgtagaactcagtgaaaaagggcaatggttgaaagatttattgcctaaaaatacagaagtaatgcacattaaacgcaaacccaaatatcgtaaaaaattagagtctactcaaatatttaaagatggcttgtatggtgagcgatttatgcctattttgttagatgatgaaaaactttattatggttttgcattagataattgccatgaaatagaaccattaaaaacacctacaaaaatagttaaagactttaacaaaaaattacacagagccaaagaaaaacaacaagccaagcacaatgaatattttgagctgttaaagccatttttatatacaggcaagaagaatgcaaaaaaaccagttataggaaagttatctgataattggcaatatcaatatctgtcaattgataaaaccaaagccctaactcatttacaaaaatgcaccaaagaagtttgtaatgaggttgaaatcgaacaggcacaacaattggaaaaactgcgttatagcgttgagaaaaagaaaattaaagatgttttgctggtaggacaatataaaaaaaatttcattgctgaattagacaataaaaaattcaaagtttcaaaattaacattgcctgccaaggctcaatgggaggcgttaattaaacatccaattaaagattgtgatgataatttaatcacattagaagattgttttgataagtctaaacccaagcctgagcaagtggaaattgacaacccaggaatgtttaatttttggcagagtttatctcaagagagtgggttggaaatagactatttacagacgcatttatttaaaagaaatgataagggtgagttatataaaaaacttagcattattcccacaggtgtttttaacaaaaaaattaagacagaagcaaaattaaaaatattagagaataatgcacgactaaaaaaatcttttggtatggattttaaaaaaacgatagatttaattcctcaatcaagttgggaaaaattatttaaagatttttttcacacggataagattaaaaacgacagtagtcataaacaagttagaaaagattattcattgccagtagtaagtgcaccttcaggcggctttaggattaaacgaaaaaatccattaacgggtgagacggtttatcaagttagttgtattgcaaatggtggttacgcttgcggctttataagaggtgagaatggagcaatagatctttcggaaaaaggtgttactttccacccaaaacttaatgatagttcaaatgttgcttatattggaaaagaaaaaaagccaaagataaaaaagaaagaagagggcgctttagtagaaaaatttggcaatacaaggaaagtaattttaagcactgatagcgttcaagatgtttatttaaccttagcagagtcaaaaagggtggatataagtttgtctattgaaaggaatatttttgagaaaatgtgtcaattaggcaatattgaccataacaatatccagccaaatatttctattgcttttaaaaaagaagaaaataaaaagtgcagtgctgattttaaggagttttttgaaaataataaaataccaatacctagagacagtggagagacacaccgttgtgtgtataagttcgttgtagaaaatcaagtagataatgtaaagatattctatagaacaaggttttcaaaagaactgcaggatgcttatcaaaaaggcacgccaataaaataatgccaaccattatcccaaacccaaaaaaggccctattcctcgccaaaaaacaactcagcgaactggtatatgacgctgtgaatttagaaggagtgaattacactttgcctgaggtgcaaaccttgttagacggggtaacggtgggtgggcatcggcaaacggatgaattgatagcaaccaatcaaattaaggcgtggcagtttttatttgcagcagttgaagaggggggttttgaggtatcagcggcgtttacttgtcaattacaggcaaaagttgcacagcaagaggcacttacttgggggcagtttagaacaggaggtgtgagtattgctggtaccgattacttacccctcaacagggggattaacgggtttatggcgacaattgatacaagaacccatacccaacaataccgatggtatttatcaatacgccattagcctatttttgcaaatggcacgcattcaatttttttacgatggcaataaacgcacaggtagattgatgatgaatggcgttttattgacaaatggcttgccagtgatcaatctaccagccagcaaacagttagagtttaaccaactaatgctggatttttaccctagtaataatgaagcacctatgcgtgcgttaatgttgtcctgcctcaatcctcaacatttaaaaataatgaatgaacaatgcacgcccatctaacccttagtgagtacggtcagtttattggtgtcactagcgaatgtctcactgttaaagaggcgggcgttactaaagaatatccgcttaatcgtttaaaaagtgtgcaaattgccaaacgaggtgtgagtttttcctctgatgtgattattgcctgtgctaatcgaggcattaaatttttcattcaggattttaaaaatgaaactattgccagtatttcaggcacacaacaacacgctgtggtgcgtgttcggcaaaaccagtttgaatttattaaaaccattaaagtggcaactttgtcagcattggttatcgaaggaaaaattaaaagagacctttgcataaataggaatgattagcaaaatccaatttttgcccaattggtgatttctttaaaccttgtcctagcagggctaaggctgggtttaaaaaatcgccaagtgggtgaaaagtgggtttctggatgttatttatgcaaaggtctctaaaaatcagcgtgcaacattactttatttaaaaagtatcatcaactcataaaatgactattgataaaacggctgaacaattaaacaacattcttgcacaaataaaatgtagaaaatggcaagattttgataaatggaatgaaatattattaggattagaagggcaggcagcctcgcaatattggcagtgtttagtggcgtgtgatttaatgcaaatgattttaaaaatagaattggacggcaagcgcaagatgtgggcaataaggcactaaattatggttatgcgattctaacctcttatatttggaatgcacttttaaatgctgggctagagccctattgtgggtttttacatactactagagcaggcaaaccctcgttggttttagatataatggaagaatatcgtgcttgggtggtggatagaacggtaattaaattacgcactcaattaaatggaaaaagtgatttaacgcctgccataaaaaagaaaatcattacagatattcacaaaactttcaacactaaataccattacagaaaacgaaaaatgcgtcttgaaagcattttacagaggcaagtttatcatttggcagggtatttctccgctgataaaaaatacaaatcttatcggtttaggtggtagaattatggctcaagcaagattacacaatgaagtaatggtggcctacgatattgaagacagcaaaaatcgcaccaaactattcaaaaaactcaaagatattagccttaaacccatccaaaaatcggtattttgggggcatttaaacaaggcggaagaagacagtgtccaacgattgttaaaagagtattgtcagaaaaccgataaagcctttatcgccagagtcgcactctcagagcaagttaaccaaaataattcgattggttatgacaaagatgatttccctagaaatccccatgagtattatgtcttatagtttgccaattagtcttattcgccaatattgtttttgccctagaattccttattttcaagagttgttaaaactcaatcccaaaagaccacagtgggtaaaacaaggagaagaattacaccaaaaacaacaaaaagtgtttaaacatcgtaccctaaaacgctttaacttagaacatgccatacaaacatttgatgaatttgtcacttctgatagttttgctttacatggtgtggttgatagctttttaaatgatgaagaaaatatttacccaatagaatttaaattaggtggcaacaagccaatgaaggggcaaattttgcagctcacagcttatgggttgttactgcaagaaaaatataatctaccctgtcaaataggatttattttgtatgagaataaaggaaaaacacatcaaattaatttcgataaaaatcgcatccaacaagtggtcataattagagataagatcttatctgatttagacaattcttatatgccagatagccccgcaacccccgcacaatgcacacaatgtgaatatttaaaccattgtaatgatcggtgaatggtataatatcctcactgaattttagacaataaaaaacccgatatgtgcaatacagagatcgggtcaaaatttattttagatgatttcagtgcatcgctgtttaggttatgatgtgctggcactaagtggaaattataacaaaaaacttcgcaaaatttaacactttttaatatttttatgaacttcgtaaaaacatcaatttttcaacctttaaaatccttattagataagggttttaagccagaccagcacatcataacctaaacaaccagcaactgaaacacaaaacaaattttaaccagcacatcataacctaaacaaccagcaac

SEQ ID NO: 130 - DNA, 14589 bp, synthetic construct
  misc_feature 1..14589: note = Synthetic
  source 1..14589: mol_type = other DNA
ggcaacagacgcttgatgacgaacaggtcaaaccggcgcttgtgaaacctgtgaaggacaccggccgaaaaggccgcttccgtgattaggcacaagcgcggcaaaccctcatcagggccagagtcggcaaggccgcctcatcaacaggccggatatatggcagcagcctgtccctcatcaacttctgggccctggcaaacggggaggggggcatatatgtttttctgtgtccttccgtggcaaaaaacatctcttcattattgttccgcgcctttccgcgcctttccgcggcgaacccgccgactgtaagccattctcatcattcgcgaaaacaactgattacttttcgcccattgacgatcctcaaagggccttctaggctcagatctgtcgacccccacaaggggttccggcactgaagtagaaaccgtcgctggccacaagccggcagaaaacaacaagacgaccacgaaagccgtgatccggcctggtgggagaaggttttgacatgatggatccgacgtttgccctgggacaggtgtgtcccgcttctgcctatacgcggcactccgccgccgacctcacagcatcgccaaccgggcctgattggcctgatagcccccgaccccccggtcagcaccgttcgatacaggccgctcgcggccactgaatccgatttttgaacagagaatccttctcgtgagtttgctcacttgatgggagtccgtctgggggaatggttatgcgtaccaatgtcagtctgaatgacgtctgggaacgagagacaggtttcgtctacatgaacggcagccaggcactggcccggctgccattgctacaggcccggctcgatgagaaggccgggctgaacacggccggttttatttccggctaccggggatcgccgctgggcggtttcgacaaaacgctctggaccgcgaaagactatctgctcaaacaccggattcatttcctgcccggtgtgaatgaggacctgggggccacctcggtgtggggttcacagcaggccaacatgttcgaccacgcccgctatgacggcgtgtttgccctgtggtacggcaagggcccgggggtggaccgcagcggcgacgtgttcaagcacgccaatgccgccggcacctcccagtatggtggtgtgctggcggtcgccggtgacgatcacgcctgcaagtcgtcaacgctgccgcatcagagcgactacgggttcatggatgcgtccatgcccgtgctgcatccaagcggtgtgcaggaagtgctcgacctggggctctacggttgggccatgtcccgcttcagtggctgctgggtgggcttcaaggcgctggccgaaaccatggattcgagcatttcggcgcacattgatccggaccgcatcgagatccgccgcccgtccatcgaccatctgccggacgacggcctcaatgcccgctggccagaccggcccttgcagcaggaagagcgcctgcaccgttacaagctggaggccgctcaggcgttctgccgcgtcaaccgtctggaccggatcgtgctggattcgcccgacgcccgcatgggcatcatcaccactggcaaggcctatcttgatgtgcttcaggcactggccgacctggggctgggggaggccgagcgccacgccatcggcctgcgggtctacaaggtagccatgccctggccgctggagccggagggcgtgttcgaattcgcccagggcctggatgaggtgctggtggtcgaggaaaagcgcggcctgattgaggatcagctcaagacccagctctacggctggcaggatcaggcccggcccacgatcatcggcaagcgtgatgagcagggcaccgagctgctgccgtcggtcgcggagctgtccccggccatggtggcccgtgccatcgcctctcgcctgcggagccggttctgtaacgagactctccagcaacggctcgatttcctcgcggaaaaagaatccagcctggcgcagccgaaagaccggctcgaacgcacgccgcatttctgttccggctgcccccacaacacctccacccgtttgccggaaggcagtcgcgcgctgggtggcatcgggtgccactacatggcgacctggatggaccggggcaccgacaccttcacgcagatgggcggtgaaggcgtgacctggctggggcaggcgccattcactcacgagaagcatgtcttccagaacctgggggatggcacctacttccactccggcctgctggccatccgcgcggccatcgcctccggtgccaacatcacctacaagatcctctacaacgacgctgtcgccatgaccggcggtcagccggtggacggcacgctcacggtccagcagatcagccatcagttgtacggggagggcgtgcggcgcatcgccgtggtcagcgacgacatccacaagtacccctcgcgggccgacttcgccgaccgcacgacctttcacgaccgggaggacctggacgcgctgcagcgcgagctgcgtgagatcgaaggctgctcggtgctgatctacgaccagacctgcgcggcggaaaagcgccgtcgtcgcaagaagggcaccatggaggacccggaccagcgcgtgctgatcaatccggaggtgtgcgaaggctgcggcgactgcggcatccagtccaactgcctgtcgctgctgccacttgaaacgaaacggggccgcaaacggaccatcgaccagtccggctgcaacaaggacttcagctgtgtgcgcgggttctgccccagcttcgtgaccgtcaagggcgggcgcctgcgcaaaccggctggtgtctcggcggatgtggacttcggggagctgccagagccggtcttttccggcgagcacgatccctacggcattctgctgaccggtgtcggcggcaccggcgtggtcacggtcagtgcgctgctgggcatggcggcccacatcgaaggcaagggcgtgtcggtactggaccagaccggcctggcgcagaaattcggcgccgtggtcagtcacatccgcatcggttcggaccagaacgacatccacgccgtccgcattcccgccggcgaagccgacctgatgatcgccttcgacctgatggtcggtgcaagtgacgatgcgctcgccaagctcgacagccgcttctcgcgcagcgtcgtgaataccgaggaagccatgccggcgtcgttcacccgtcagccggacctggcctatcccggcgagtccatggaagacacggtgcgctcggcctgtgccgaggacgcgagctggttcctgaacgccggcaagctggccaaggccctgatgggggatgccatggcggtgaacctgttcatcatcggctttgcgtaccagaaggggttgttgccactgagcgcggaggccatcgaacaggccattgagctcaatggcgtcgcggtccgggcgaaccagcagtcgttcctctgggggcgccgtgcggcgcatgacctggagcgggtgtggacactggccttcccgccgaaaaacgacggcgtggccgtgcaggtcatggaaaccaccgacgacgtgatcgaacgggaaaaggcgcacctgacagcgtaccagaatgccgcgctcgccacccgctatgagcgcctggtgcgtcaggtggaggtgactgccaagcaacgcgtcggcggcgacccgatgctggtgcgaaccgtcgcggagaactacgccaaggtactggcctacaaagatgaatacgaagttgcacgactgttcagcgatggcagcttccgccagtatctggacgagcagttcgagggcgacgtggagctggaattcaacctggcgccgccactgctcagccgggcaaagaagggcgagcgcccgcgcaagctgacgttcggcccctggatggaacgggtcttccacattctggcccgtggcaaggtcttaaggggcacgatgttggacccgttcgcctacacagcggatcgccggctcgaacgccgcatcatccgtgagtacgaggcggacatcgcctggctgcagcgccacctcaatgaggaccatctcaatgccgcgcgcgaactggccgcgctacccggaaagatccgcggctacggcccggtgaaggaggcggcgtaccagagcacccgcaaggaacgggaccagctcagggcggacctgaacccgaacacgacatcgcaccggcagattgccagcgcggctgtctgaaacagtcaccggcggggcccacaaggcgctgccggtgtcaccatcacccacaaggtgtgtcgaaagaaaaggtaactgactcatgaacgttttcagccatcccgagtttgatgatcacgaacacctgtcgttcttcagtgaccctgaaaccggcctgcgcgccattgttgccatccataacaccacccggggcccggcgctcggcggctgccggatgtttccctacgccaccgatgaggaagccctgcgggatgtattgcgtctctcccggggtatgacctacaagtccgcgctggcgaacctggatctgggcggcggcaagtcggtcatcatcggtaacccccgcgagcacaagaccgaggcgctgatggaagccatgggccgctgtctggagcagcttggtggccattacatcgccgccgaggattccggcacgagcgtgccggaccttcaggtcatggggcggcagaccgggcacgtcgctggcgtacagtcacgaccgggctttgacggcgagaccagcaatggcgacccgtcgccggtgaccgcctacggcgcctttgtcgggattcaggccgccgtaaagcaccagctcggcagcgacagcctggaagggctcacggtcgcggtccagggcgtgggcaatgtcgggttccgtctggcccggcacctgcgggatgccggtgcccggctctgggttcacgacattcatcaggccaacatggatcgggccgttgacgagctgggcgcgaccgccgtcgacggtgatgaaatcctctacctgccggtggatgtgctggcgccctgtgccatgggcgcggtcctgaacgaccagtccatcgacgggctgcatgcccgcatcgttgccggtgcggccaataaccagctggcacgccccgagcatgacgcgatgcttcacgagcgtggtgtgctctacgcgccggatttcgtgatcaacgccggcggcatcatcgacgtgttccacgagcggaaaggatcggaaccggcggaggtgcgtcgccatgtcgaatccatcggcgagacgctgacggaaatctttgcccgctcggcccgggacggcctgccgaccggcaccatcgccaaccagttggcggaagaacgctttcggaacaccgtccgatgagaccctgtttgcaaaaaaacgccaacaaaatctggccatgaacggggattttatcggtaaaatccgcccccgaaatgtttcgggggcggccatcactgaggttccaacctcgctcccgaaaacaacaagactttgcaggagaccgtatgactgaatcatcttccgcagccgctgacagtgcggctggttcgcttcccgccaaccggggccgctggtcctcccggttcgcctttattctggccgctaccggctccgcagtggggctggggaatatctggaaattcccgtatgtcaccggcgaaaacggcggcggcgcctttgtgctggtgtatctgatgtgcattgccgccgttggtctgccgatcatgatggcggaggtcatgattggccgtcgcggaggccgcagtccggtcaacagcatgcgcctgatcaccgaacgggacggactcaaccccgcctggcggctgattggcgtcatgggcgtgctgaccgcattcatcatcctctctttctactccgtgatcgggggctgggccatctcctatgtgggcgtcacggccagcggtggcctggcgggccagtcgtccgaaggcatcggcgaaattttctccggcctgctggcggacccgggcacactgatgctctggcacacggtgttcatggccatggtggtcctcgtcgtcgcacgcggcgtgcgcgcgggcttggaacgggccgtgaaaatcctcatgccggccctgttcgtgctgctggtgatggttgtcggctatgcaatgacgacggggcacttcagcgagggcgtcgccttcctgtttgaacccaacttcgccaatctgagcacttcgggcgtcctggtggccctgggccatgccttcttcaccctgagtctgggcatggcgatcatgatggcctacgggtcctacctgccgaagaacgtctccattgccaaaaccgccatctccgtatcggtgatggacaccgttgtggctctgctggcgggcctggcgatcttcccgattgtgttcgccaacggtcttgagccgggtgccggccctgggctgatcttccagaccctgccgctggcgtttggtcagatgccgatgggcagcttcttcggcgcgctgttcttcattctgctggtgttcgccgcctggacctctggcatctccctgctggagccgctggtggagtggctggaagagcagaagggcatgaaccggaccatcagctccgtagtggccggcgtcgcctgctgggcactgggcatcgcgtccgtgctgtccctcaacctgtggtccgacttcgcgccgctgggcagcttcgccatgtttgagggcaagaccatcttcgacctgctcgacttcctcaccgccaacatcctgctaccgctgggcggcctgctggtggcgatcttcgtcggctggttcctgtcccgtcaggcactggaaaacgaactgtccatgtccgcccgagggttcgcgctctggcacaacgtgctgcgctacttcacccccgtggccgtggcggttgtgttcatctataacctgacgtaaccatcgcctctgtctgccgaccggtgactggcacaagaaccggtcggcagctaaccttctggtcggagttgttctcaccgcaaaccagaaggacccggtttgagtcgtatcgaccgcatttaccgcatccacgatattttccgtaatgcctcccgccccgtgccgatgcggactttcatggacgatctggaggcctcccgcaataccattacccgtgattttgaatacctgcgcgacacgctcggcgcccccatcgagtattgccgcgactggaatggtcaccagtacgcccccgatgcccctgtctttgagctgcccggcttctggatgaaccccagtgaattgtatgctctgctggcctgcgagcagctgctggaatccgtccagcccggattgatgacctaccacctggcgccgttgcgccagcgcatccgcaaagtgctgggagaagcggggcatgatgcggagcagctcagtgaacgggtgagaatccagccggttcagcgacgcgacaccgacgaccgtatctttgatccggtggccgaagcgacccttcgatccgaccgactggtgatcgactacaacagccgctccggaaacggtgcccgagagcgggaaatctctccccagcgcctgctccactaccgctccaactggtatctcctggccttctgccaccagagcgatgctctgcgcctgttctcccttgaccgcatccggaaggttcaagccaccgacggcaccgccgagccggtgagcccggaggaactggatgctttcacctccggcggcttcggcatcttcggcggcaccccgaccgccacagcccacatccgcttcacaccccacgctgcccgttgggtcgcggaggaacagtggcacccggaccagaccagtgagtggcgtgaaggctggtatcacctctgggtgccttactcccagcccaccgaactggtgatggatgtgctcaagtttggggccgatgcagaggtgcttgggccatcggatttgcgggagatggtggctgggaaagtgagggcgatgcgagatatctactgataattcgtccagtagtgcagtgtctgaggcacctgcatgtgtaatctttatttgaaagcccactcagagaacgattacttgggagagtcaacaatgacgaagttggtttcgccgatcgcagtcgatcagggcgctaggtataccgggatttattcactcagctatgaacccggggttgatccgttccttgagtctaaaaatgcggaagtggtcgttgtcgacaatgacaagttgactctcagcatggcaccaagacgcgccggacgtcatctaaggcgtgggaaccaacgattcaagctggcacgccggcttctgactctggtgttgcgtgaagcgttcggtgttgatccggatcaactggatcaacgcgagcgtgagtttctgttcgggctgcttaaacgtcggggattcacgttccttggtgaggagattgatgaggaagccatatcggggcttgatccggatttggtgaaacggctgcttcggaattgtccgccttttgagtcgttggagtccctatggcagtcgctgtcttctgatccgggaatgtgtcgagagtttctgcagctttcaacgggatcggacgactcgcttgatcttgaaaccttggataaacggtggcttaagaagtggttgaaggacaacgtcgaagaggcctctgacaaggaaacgattgaacgcctgaccagtggtgttcttgcactgcgtgatgggtgtcgtgcagttatccgggcgaagtgggatggtcatcacccccgacacatctacctggaaaatattgcgcaggatctgaagcatcagcccgaagggaacgcgctggctgaccgaattggtctttcgaccggggaactgtctcatctgattggaaatatcagcaacctgccgctacgaccgttgcgccgttacttcaacgataaacgcttttcgcggaatgcggatcgctggtatccagagagaatggcaaggcaactcaccagagagtggaaggggtggcagccggatggtgtttcaaaagacatcgtccaacgaagccgagaattgttgaagggactgtcaaatgctgcacaggatccggttcggttctggaagtatacagatcccctgcagacaataccgccctatgaacgacacagtaaccgaaggcctccgaaatgccagtcccttctgatcgacgttactgctcttggtgagcgttggccggaatgggagcgatggatagcgcctctccacaaggcgaatccggaactttccgagggaatcgacggtttttccccatcgatatcaggcccaaatgaaccgcggcttgcttttcttcaacgcgtattggacagaagcactctgtttgatccgtatggactccggcaactggctgttgaatcccgttcgcatcgagctgctcaaggaaaagagacgctgtttcgtgatctgggggatcaacatgccagagggttcctgtcattcgtgacggcatatcatcgcgagcgtgagcaggccagaagtggattctgggacaatcagcgggaaggacgtcttttgaagcgctgtcataccaatcctccccacaaaggaaaaatcctgcatttgctactgaaccggcttcttgatggagacatcgaggatgttgagggctttcgtgatgagatcacgaagacgaagatcggtcgatccacgctaaaagggattgcccaacgggcgagcgatgttcagaagcgttacggcaacgcgctcaacgcaaccctgaaagaggcggacctcgataaagcgacctataagcgattgaatgatctacaggctttaattgaaaaagcaggaccagagattggtcggatcgcaggctgtcctgagaatcgacggaatcgcttgggtaatgtctttatcctggctcagcttttcaacctgttgttcggggatccttcagggttctcctcgacatgtcgatcctgctcagaggagaacgcctggcggtcacgttccgttcctgttccgggagaagatcgggagggttggcgaatgatccccctcacagctgactctgttcgaccctttgatggtgtggttcggcgtgccgttgacgctcaggccagagcgatggcgcgccttaaaaagcaggaactcaaaaagcgtgatcttccggcaggctcctttgtcagcattcctgttctgctggagcagaaccggttcagttttagtgaggatttggcggccataaagcaacgtatcgcgccttcagcccgccatagaaaccgtcagaaggctgcacgtgaggctcaggaacaacagatctcgcgctggcggggcaagctggatcgcatcagagacgcgagtcacggcatctgcccttattccgggcgcgacctcaatcaggtgaatggtcagatcgaccatatcctgccacgtgcacagagccggaaactggatggtacaacatggaatcacgaagccaacctcatttattgcagcaccagcgccaatgtcgacaaaggagaaacgcttaagaatcttgaggatctggatccaggatatctggaggcggtttttccgggtcagtcactgacgagtatcaggcagtggattgcggatcgggttaagccattgctggcaaggtccgggcggatgccatccttcgttgaattggaacgtgatcagtccattgcactgcgacatgcgctgtttgatgaagacttgcgtccgcaggtgatggagctgctccgtggtcaggccagggcaacacgtgtgaatgggacgcaggcctggctggcaagacggtttgtcgaggagttgcgtcgttcagtgccggaattaaccctgtcattctcggtgaatcgcatccagcctgaggacgttggcctgatgcgcgagtccctgtcggagattcggcctgagttcctaaaggcaccggatcagcccctgagcagtcacgccattgacgccgcaatggtctacgcggcagcgagcagtctgcctcgtatggagagtgagcttcacgtgccggctgaacctctggcagagcttcacgatcgccttgcccggctgcttccggagagaattgatttcacggatgtgtcccgcaaacccgtttactccctgccgcgtgccgacagccagactctgtttaaagacacttactatgcggaacgtttcctgccgttgctcgtatcaagtgatggcgcgctacgagcagggtttacgccagagaacagtgtcgaagtgaaaccggctagaaaacggtcagagtcaacgccggctgagatcgccatttcacggcttgatggctttctgaggctcagaggagcgcggtggagtggtgatctcagttcactgttcgcttcggatgcttcatcagaccagtgggtcgcgctatccgttgacaggccgttggctttggcgcgcctgcagcaggttgggcgaggggaagacgagctgacggatacggatgccctcctaggcgccttgaagtacttgacaaacaaaaaagagcttcgaacagcggttgtcggtacaggcagtgctttgatgtcctgggaaaagctgaatgaagaaatcgagaaaaagacgacactgtctgtctcgataaaaggcgctgggttgaaatcagacggcgcgaaactttctttgcccgcacgatcgcactggctgcgttttgccgcccggctgaatgaagaaggtgtgctcggaagcaatccgggatggtcggacgcggagtggcgacgtttttttcagaccgtgtttccgtccgcgaaacgcgaccggcagcatcagaaggtaaggaaggtctggtctcttccagtagtccctggttcacccagcgggctagtgcgccatcaacgtcgaacgcgctcgggacagacggtatttcaggtagcctcgcttcatgaatttaaacacatgggagtggtcctgagggagcgaaaagcagagggcgttttcccaggctatctgagatggtcaaccaatctagcaccccttgctggtgttcttcagtcgcccagtcagagaatgatccggtttgatcaatggtatccattggatagaccgtcggtatgccagtcggcggatattttgtcggtttcggccgcctggggttcggggctgcgcagatcggtggaggtgactgtcagtcaagagcttgcctgtcgtgtgttcgacgtaaacagcgcctggaacttgcccgccaacctcaaacttcacaataacgcgtcggagctgtggcccattgaggcgatcgggtggccgcggaacaacaaagtggagttgcgggcgatcacaccatccggcgttgtgctccggtatcagaaggacaaagggggcaagcctatccagcaagagcttgagcgggccatccgggaggaggagtagtgtcatgcgacatctggtgcttgcagactatggtcgtcagattggcgtgacggggaaccgtgttgtcgtccgtgagggggataagacgctgggggagtacccgttacgtcgcctgcgcagtattacgcttgcgaagcagggtgttggtctgtccagcaatcttgttcttgcctgcgccaacaatgggatttcgctgcattttcatgatttccgcgatcagccggttgtcagcttacacggaagtcagagccatgctgtacccaaagttcgtcgtgaccagttcgcattttctgaaagtccgcaggcccgggagtggtcgagagaggtcatcgttggaaaactgcgtaatcagcgggcaacgcttctgtacttcggaaaatacctgaagagtcaggggttcgattcggcagagtccattgagcgaacagccggtattctggacggcatggcggggcaggtcagtcgtctcggtctagatcggcagtggcgggagtccctgatgggattggaggggattgccgcgaaccattactggagctgcttgcgggagacggggcttttcccggagagctttgaggggcgtcagggccggggtgcgcaggatgtaacgaaccaggcgctcaattttggttacgcactactgaaatccgcattgtggcgctgcgttgttaatgcaggacttgaggtctacgtcggatgcttgcataccgccaggccaggtcggcctgcgctggttctggatctcatggaagagtaccgtgcctgggtcgttgatcgcctggtcatcaagatgcggcaggatctggcggcgcagagccatttgaatcagaagctcaagcgtcgtgtgataaaggagtttcatcaacgattggccagctcggttccctataaaaacaaacgactacgtctcgaatcggcaatgcagcggcaggtttatcacctggtcggtcacatgatggaggggcggcggtatcgctccatgcgattccgctggtaggaggctgtatgctcgaacgacagtatctcgtctgctacgacatcagcgacaacaagaaacgcacacgattctttgagcacctgaaggatctcggcctggaaccggttcagaagtctgttatgtggggctttttgagacccgccgatgttaaggcgctccaagtctacggcaggaaagagctcgaaaagccggacgatcgactcattattacgccggtgcgattcgataacctgtcaccggactcgctacagggataccttgctcctttccactcggagcccagaagccatgctgttctatgaacccttacccgtcagtctcttgcgtcagtatcggtattgcccccgtgtcgtctattttcgggagctcctgggaattcccggtgatgagccgttgtgggtttcgcagggcaagcagtatcacgaaaagcagcgcaggctctcaagccgtcgccaactgagtcggtttgggctgacgcatgccgacatggcgttcgagaagatgctgcggtcagaatctatcgggcttcaggggcgtcctgaccttgtgctggttggatcggacgagctggtggttgtggagttcaaggcaagtctcaggaaaatcaaaagtggccataagctacaacttgctgcttacgcgatgttggcagagttgcactggcaacgaccatgcgtgaggggatacttcctgactgaagacgacctcaaacccaaacagatcaatatgggcagtgaactgcgtgacgcagtgcttgagacacgtcaacggattgaagacctttacgcactgcagcggatgccggattcctcagcgtctgaatcgcaatgtggccattgtgaatatttggcgcgttgtaacgaccgattctgaaatgaaaaacacccggtgcgcaatgcagtgcgggtgtcagaatcttcattctaccttttggtgatttcagggtatgtcatttgggatatttcttaccctagtccaggcttcgcaaaatctcaagcattttatgcaatttgaactcttgcgaagaaaagctcttcttgtggagagaaaattccccacaagacagcaccttgtcccagggcttcaaaggctatcccaaatgactgacctctgaaacggtagagcatcccgatcagatccgcctctttctcgagcttcaaaggctatcccaaatgactgacctctgaaacaggagctcaacaaggatcaatctcagaagctggccggcttcaaaggctatcccaaatgactgacctct

SEQ ID NO: 131 - DNA, 24338 bp, synthetic construct
  misc_feature 1..24338: note = Synthetic
  source 1..24338: mol_type = other DNA
gattttgaaggaccacaaaatcttttacttcagatcttaaattctcaaggcatctattttcgcgatattttgatttgcccgcacaagcctgaagatcagtgcgagtgcaggaaacctaaagtggggctggtgaaaaaatatttggaatcgggagaaatggattatgagcgctcctttgtgatcggcgatcggctcagtgacgccgaattggccgtcaacatgggcttaaaagcttttttgtatagccgagacaattggaactggacgagtattgccgagaaaatactctcctttggacttcgtcgcgcacagattgaacgtaaaacaaaagaaaccgatattcgcatttttgtggatttggatcactcgatggagtcagaaatcagcaccgggataggcttttttgaccatatgctcgagcaaattgccacgcacgcgggcatcacgctaaagatttctgtcaaaggcgacctccaggtcgacgatcatcacacgattgaagatgtcggattggttttgggtgaagctttaaaacaggctctcggagataaaagaggaattgcgcgctttggttttatgctgccgatggatgaatgccttgcccaatgtgccttagatctttccaatcgaccctatctggtttatagcgcaacttttaagtaccagaaggtaggggatatgtccacggaaatgattgagcacttctttaggtcactgtctcaaacactgggctgcaccctgcacttaaagacaacgggagacaatgatcaccatcgagcagaaagtctctttaaggtatttgcccgcgcactgcgggaagctataaaaattgaaggcaatgcactgccctcttcaaagggagtacttcaatgaaagacattgtgattttggacactgggtgctgcaatttgacctctcttttggcggccgtgaagcgcctgggtgttgaaccgcttgtgacagcagagcccgctcaagccaaacgcgcatcccgattatttttgccgggagtgggaacagcgcaggccgccatgcgtgagttgcaaaaaagggatctggtttcttgcattacagaaagtcgttgtcctgttctgggtatctgccttggaatgcagctttttggggcagagagcgaagagacaggtggcgtgaaaatgctaaatgtgattccagaatctgtcggcaaacttcaggtgggaagactgaccttacctcacatgggttggaatcgcgttaaaccgattatcaaggatccgctttttgaaggacttgacagtgagctgggtgagtacttttattttgttcacagctacgccttcaatatgaattcttacaccattgcgagcaccgagtatggagtgacattttccgctgccgtgcgtcaaaagaatttttggggtgttcaatttcatccggagcgctctggcgcggcaggactcaaactgctgagaaattttgttgtgggtgacctatgaaaagcgccaacaatatcattgcttcggttgatttgattgatggttctgttgttcggttacagcagggtgactacggaagacagactcgctaccgtgttgatgcgcttgaacaattaagccgctacattgaagacggctctcgcagacttcatattgtggatttagacggtgcgcgtgaccctgaaaaaaggcagatcgcttttattgctcatctggttaaggagctgtcagtgccggttcagaccggaggcggggtacgtacggaagccgatgttcgtgggctgctcgatgccggtgtcgcgcgagtcgttctgggatccgtagctgttagtgatcctcaaacagtttcccgatggtttcaatcgtttggtgcagatcgcttggttttggctcttgattgcagaatcgatgaaaaggcagtccccagggtggtcactcaggcctggcagaaggcgtcttcctttactgtggctgagatgattgagggctatttgtctgttggtttgaaacatgtcttatgtactgatgtggccaaagacggtctattaaagggcagcaatgtcaagctttatcaatggctttgtcggtgctatccgggattgtgcgttcaggcatcgggcggcatcggctctttagatgacatacgagccttgtccgcaacggcagtggacggaatcattattggtcgtgctcttttggaagaaaaatttacggtaaaggaggccattgaatgttggctaaacgcatcatcccctgtctagatgttaaagatggacaagttgtcaaaggcgtgcgttttcgcaaccatgagatcatcggcgatattgtctcgcttgctaagcggtactccgaagagggggccgatgaattggttttctatgacatcacagcctcttctgacggacgaacagtttctaaagattgggtaaagcgggtcgcagaagtgattgacatcccttttgcggtggctggtggtattcgcagtgttgaagaggccggcaggatcctttcaatgggagcggacaaaatttcaattaattcgccggcattggccaatcccggattgattacccaattggctgacgagtttggagtgcaatgcgtggtgattggcattgattcgtggtacgactcgcaaagcgatacttattgggtcaatcaatttaccggtgatgaaagtaagacgcgacgcacgagttggaaaacactcgattgggtgcgggaggtgcagtctttgggtgccggcgaaatcgttctcaatatgatgaatcaagacggtgtacgggaaggctacgatattgagcagctgaaaaaagttagagccatttgtcaggtgccattaattgcatcagggggcgccggcaaacgggaacattttttagaggcttttagtgaggctcaagttgacggtgcattggcggcgtcggtatttcacaaaaatattctcaatatagaagaacttaaaaactggttaatcagccaaggcgttgaaatgcgcaaggtctatggagttaaaaatgcttagtaatgaagatttaaagcgtttggattttgaaaaaggcaatggtttgatgcctgctgttattcaaaatgcggtctcaggcagagtattaatgctgggatacatgaatcgtgaagccttggataaaactatcaattcgggaagagtcacattttggtcgcggtctaaaaatcgtttgtggacaaaaggtgagacaagcggaaatttcttggattttgttgacgttgctcttgattgtgacggtgattcactgctgatattggtcaatcctcaagggcctacttgtcatttaggaaaagagagctgtttcggtgatttgactcctgctcatgaattcttggctcgacttgaaagaattctggctgaacgcaaaagcgcttcgccagaaagctcttacaccgcttctctttatgccagaggaacaaaaagaatcgctcagaaagtcggagaagaggcggtcgaaacagcgctggcagcgaccgtacatgatcgggaagagacgattaacgaggcgtctgatttgctttatcacctgctggttcttttacagcaggagaatttggacttagccatcatcacggaaaacttgaaaaaacgccacgaaattagagaacagcggatatagaattttgcgatctttctggccgaccatagctcggccagaaagcggttgcctagaatcgataaccttcgatattgagcaaaaatcgcttagcctcaaaaccaccgccgtatccggtaagcgtcttattagaaccgataacgcggtggcacgggatgatgattgataagggattttggccgactgctccgccaacggcgcgaacggctttagattgcccgatcgctagagcgacgtcaccgtatgaaacacattgcccgtaagcaatagtttgcaaagcctgccagacctttatctgaaatggcgtcccgatgagttcaatgggaagatcaaactgctttcttttcccttcgcagtattcttgcagttgatcaatggcgcaatcaatgacagccgtcgttgcttctttaaaaggaagattaagtaacttttcaaatcggttaagaatcgtttgatggtgccaactgtttaaccagtcagtcatcactaatttattgtctaaggaggcgacaatcattggcccgcagggtaatttccattgacggtaaaaaatagctctatccatttttaaattcacagaaattgcagaacttttttacacaaaaaggattatataaatcaatcatagcagtcgcgcagataggtgcgattcgcgaaaaactttaaagtatgaagcagtgttctcaaaagccgcatcaaaataaccgcttatgaataaagccaggcgagacactgtgttttcttatttgggtggcaaggagcggtgagagctaaaaaagtcactgatttttatgatttaaattgatatacacttgcctgaatcggtcttttttggcttttacactaagttaaatcaaataagcttgacctctcatttttatgaagaggaagtcaaagattcttaaatgcaaacttcaaaaagcgatgatagctgattctcatcggcgttcctaaacggaacctgcggtaaaatgggcagaatgtggatgtcacgatgagggtgaaatggctcaaccgaaatcagttcaaaaattatcatttgaagaagctatgcaagagatgcaggccattgttgagacgatgagaaagggagagcttacgcttgaagagagcgttaaggcctatcagcgtggaaaggaattgtcggctcgttgtcaggagttactcagtcaggcagctgaggtagtccgacagcttgaagatggtaccgaagtgcctctgcgggaaatggaacttcgtcagaaaggaattacggatggactttaagagttggagcgctcaacgcgcagcgcattttgaactttgcgcaaagaaggcgctgccgccggataatcgtttgccatggaaacttcatgaagccatgcgttacgccgttttagatggtggcaagcgcattcgtccgttattggcgtacgccgccggggaactggttggcgccaaagaagaagcgctggaccatattgccctttctcttgaatatattcattcgtattcgcttgttcatgatgatatgccatgcatggacaacgacactctacgccgcggcaaacttacaacacacaaaaaatacggcgaagccatgggaatgcttgccggtgatgcccttcaggcacaagctttttttgaactgacacaaacaaaattgccgggtgagcagattgccatgctggttaaattattagccgcggcggccggatcggccggtatgtgcggcggtcaggcggtggatcttttatccgttcaccaaaaacttgatctggatacgttgaccttgatgcataggatgaagaccggtgccatggttcgggcgagcgctctcatggggctttatggcgctgagcaaacgcctccggcctcattaattgggttagtcgcccagtatgccgatgctatcggcttggctttccaggtcatcgatgacgttttggatgtgacggctgaaacggctattttgggtaaaacggccggcaaagatgcggccgaggacaaacccacctttgtatcgcttttagggctcgaacaatctcgtaagatggctcaaaatgaaatcagtcgggcgcttgaggccttgcagaccattgaaaagttgtccaaagagtatgagggcaaaacggaacgtctggccgatattgccaactatattttgagccgagatcactgacaggggaagagatgcgtttactcaatagaatccattctccgaaagatttgaaaaagctttctgtgccaatgctgccgacgctggctcgggaaataagagagtttatggttgactctgtttcaaaaacaggaggtcacttggcaagtagcctgggggctgttgacctgacattggctcttcactatgtttttaattcgccttacgacaagattatttttgatgttgggcaccaagcttatgcccacaagatgcttaccggacgaatggatcaatttaaaacattgagacagtatcacggactctcaggctttcccaagcgtggagaaagtgagcacgatgcgttcggcaccgcccatagctccacttctatttctgccgctcttggtatggctgttgccgatgccctaaacggcgagaaggacgcttggcacatcgcggttatcggagatggagctctgacgggcggtatggccgttgaagcgctcaaccatgccggtacatataaggatggcattaaacttttaatcatcgtcaatgacaatgattgttctatttcgccatcggtcggtgcactaaaccatcacttagccaagcttgtatccggtcacgcgttttcaagcgcacgcaatttctcaaaacgcgccttgaagccgcttcctaagctttggaatcttttcaaaagcatggagcagcgcacggttaactttgttgcgcctcactctacgcttttttctgcctttgatcttaactactacggtccggtcgatggccatgacattgccaacctcataacagttttgcgaaatatcaaggcgcttgacggtcccatggttttgcatgtcgtcacaaaaaaaggcaaggggtatacgcctgcggaagaaaatcccacgctctatcacggtgttgggaaatttgatcctgaaaaaggaatcgttgagaaaaagtctgatccgaaacaccccacttacacggaagtgttttcccgctgggtttgcgatatggcagcggtcgatgaacgactctatgcaataactcccgctatgcgagagggttcaggtttagtcgaatttgaaaatcgttttccggagcgttaccgcgatgtggctattgccgagcaacacgccgtcacttttgcggcaggactcgcaacttcgggcatcaaaccggtggtggcgatttattcatcttttgcccaacgggcctatgaccagattttgcatgatgtcgccatccagaatcttccagtgatgtttgccattgaccgtggcggattggtgggggctgacggtgagacacatcagggtgttttcgacattgcctatttacgcagtatccccaatatgacaatcatgacgccgtcggatgaaaacgagtgtcgaaagatgctcacgacggccttcaaaatggatacgccggctgcggtccgatatccaagaggtaaaggtcccggagttcttcaggatgaagccctggaaactctcgaaatcggaaaagctcgaattattcgagaaagcactagacaggataaacgggtggcgattcttgcgtttggcttgatggttagccggatgcgtgaagtggccgagaagcttgatgccactttggtggatatgcgctttgtgaaaccgcttgatcgtgaaatgttggctcaaatggcggcaacgcatgatttgctttgcacagtagaagacggtgttgcggcgggcggcgcgggaagtggtgttcttgaggccctgtctgaaatgggaatggatgtgcctgttttagttttggggattaaagatcgcttcattccgcagggcaccattgatgaactgatgcgtgaaaatgagttggatactacgagtgtccttcgacgtatagaagaagcgcttcttgttcgaagttttgtggacttaaaaccctacaatacgatggctgttggttctaaggcgcggtattttgctgaggtcaccaatcgcagagagttggaactggcactggatttcgctcatcgggagaatattgaacctttcattttgggcgggggttcgaatttgctgattgcttctcatcttgttaatcgattggttatcaagatgaatttgaagggctttgaagctcatgcagtcgaaaaagttgtaaaggttggcgcaggggagtcttggcacgaaacggtccgaagagttttggatttaggttggggcggccctgaaaacctggctttgataccgggaacagtcggcggagccgtcgttcagaatattggtgcttacggagccgaagtggcgcagtttgtcagaagcgtggaggtttttgatccccagacgtcctcggtgcgcataattccaagtgaaatgtgtgattttggctatcggcacagtgtttttaagacacaggcgggatcagaaatgatcgttctttccgtcgagttggcgtttgatgcccagtggtcagcgaatttaagctacaaagaattggccttgggatttaaagattctcaagagataacgccacaagctatttttgaggcggttgttgctgcccgttctcgcaagcttcctgacccgaaagtattgccgagcgccggatcttttttcaaaaatccgatcgtcacccgggaggttttccaacaattgctcgagaaattcccaagtattgttcattatcccttatcgggtggtcgtgagaaattagccgccggctggctcattgaccaagcggggttaaaggggatgcgacacggatttgccggaacatacgaaaaacaagctttggttttggttaaccacgacggtgcggccgacggccaggccttgcttgattttgcttcctttgtacaagacacggttgaggaaaaattcggtgtacggttggaacctgaacccgtggtcttgaagtgagctatttataattatcaaattagtctttttcttttaaagggaaataaaccatgcgagtgacaactcttgaacaattggtcaaggccggagccttgaaggataagcgcgtgttcatccgttctgatttgaacgctccgcgtgatgaaaacggcaacattacaaatgaggcccgtttggttgcctcagtgcctgccattcgcatggcccgtgatgcgggggctcgagtgatggtggtaagtcacttgggccgtcctaaggaaggcgaaaagaccccggctgacagtctcgagaagattgctcaacgcatggctgaattattaggtagccccgttcgtttgattgacaattgggttgacggcggctttgaagtggctcccggtgaagtggttatgcttgaaaactgccgttgcaacgtgggcgaaaagaagtgcacggaagagctctctaagaagtacggtgcgctctgtgacatttttgtaaacgatgccttcggtacagctcaccgtgctcaagcatcgacctatggtgtggctcagtacgccgacgtcgtctgcgccggtccattgatggcagccgaaattgatgccttgaccaaggccgttgaagaagctaaacatccgttggttgccattgtcggcggttccaaagtgtcaacgaagttgaccattttgaataaccttgctcaaaaagtggatcagctgattgtgggcggcggcatcgccaacacattcttgatggctgccggctacaaggtcggtaagtctttggctgaggctgatttacttgacgaatgtaagaagattttaaagaccttggaagagaagggcgcaacgcttcctttgccgacggatgttgtggttgctaaggaattttctgagacggcagaacatcgtacttgccgcattgaggatgtacaagacgatgaaatgattttggacgtaggaccggaaacggctcaagctttagctgacatcttgcaaaaggccggcacgattgtttggaacggtccggtgggcgtgtttgagatggagccctattctcacggtactgaagtgatggctgaagctattgccaaggcaactgaaaacggcgctttctccattgcaggtggtggtgacacggtagccgcagttggtaaatttggtatttctaaccgtatttcctacatctcaaccggtggcggcgcgttcctagagttcttggaaggcaagattttacctgcaattgaaattttggaaaagcgcgctcaatagctatttttagtttgagccagaatcccaggactctatttttgacggatcctgggattttttgtccttagagggtgcgctttgaaaagtgtgcactgtaaaagcacaaggtctgtttttatttgcatcacaaacagaagtcttgtttgttaaactgaccaataaccgattcaatattcatgtcagggaacataaaatgacagttaaatcaacattagccgttgatatgggcggacgttatacgggaattttctcttatacaacagattcaggctttccaaaagcaaaagaggttcgcgcttatgtgcttaatatgcccgataatgatgccctgacctatagcatggcagccagaactcagaccagacaccgtattcggtcacaacagcgattcgtattggctagacgcctgacgtacatattgattgaagagaaacttaaaagaaagctatctcttcgggaaaaggaggcgatttcgtcattgcttagaagacgaggttactcaaggcttgaatcagagctggatctttctgtactacaaggagttgaaagcggtttttttaagtattttttgcccaattttgatgaagatgaaaatttgttaacgcaatggacttctctgacagatggctatttgcaaaataattcagactcaaggaggcaaattcagatattcctagagagttcaaaagactctaaggagtttctaaccgtagttaaaagtcagcatcaagacacaaaagagtataagaatgcacttaaggtcatgagagatgatgcagaaagcatgatcgaacagagcatgtttgggcataaacaccgccgcctttatttggaagccatcgcgcaagacattcctcgtgacagtcgtttaaaaccaattattgaagctttttctggagttgagaaatttcatcatttcatcggaaacatctctaatttacagttaagagcacttcgttggtactttaatgatccatcgatgaaaaataatgtgttcgacaaggaacggttacagtcggtacttgttcgtgcgtatcaatttttccattatcctaaagatttaacccaacaacgagatgaagtcttaaatgcttatgagggatcgactgatattcttgagacattgcaaaccctgaatccagaactgacgattcctccttacgaagatcaaaataaccgacgtccgccgttggatcagacactttggttaagcccgagattacttgatcagcgctatggagaaacatgggagatttgggttcagaaccttcttcgttctccgttatccaaagggattgatgaaaatttggatacaattttgataacgaccgatcgcaaagctcgcttattagaacgtcaaagtggtcggctgattcattacacctcccaaaagttgtatcactcttatgttctgcaacgtttgttggatagaacggtcgaaaatgatgcctatttgctcaagacccttgtttcatctaatcgcggaaactctaatgaaattcatcaggcgcaagaacgacttactcgggatttggggtcacagcacattaaaaaatttttagactttgttcgtcaatactatgatgaggttgataaggccaagcgaggcttatggtttattgttgagaagcctttgatggaaagagcggatattcatccgccgatgaaaaatgactctgtgatactgcgtttggtcggtaatattttgtgtgtttcagacctggttgatcttagtttctggacacgaaaggtaaaggggcaaagcacggtcagaagtctttgcactgcgattgaaaaaacaagaaaagagtacggaaacagcttcaattatctttaccaaagagccttgtatctgcaaagcaaaggcaaaaaactttctgcagaagacaaggattttattaagctacagtcgaatgtgttactggttagtgatgtaattgctgaagcgttagacataaaagaagagcaaaaacaaaaatttgccaatcctttctcattggctcaactttataacatcatagaaacagaaaaaagcggcttcattagtaccacgctagcagcggtggatgagaacgcttggagaaataatttacaaggtaaagctcgttgcgttcaattgtgtgctgacacagttcgcccctttgatggtgcgctcagaaacattttggatagacaagcatatgaaattgctaagttaaaggcagaagaattactttcgacagaattgaaaaatcaaacaattgatttggttgttttattagaaagtaaccagtttgctttttctgcgtcattagctgaagttaaaaagagtgctaacgcagcggctattagacaaaaagtggcaaaagctcagaagcgtcagcaagatcgctggcttagcaaagatgaacgtatcaaatctgcgagtagaggtctttgtccatatacagggaagaaccttggtgataaaggggaagtagaccatattattccaagaagtttatccatgaactatatgggatctattcttaattctgaagcgaacttaatttactgctcccaagaaggtaatcaattaaagctcaacggtagaaaaaaactttccgatcttgcagataattatttgaaagtcgtatttggtactgctgatcgaggtactatttgcgagtatattgagaagtcagtatcagagttgacagatgccaagattgttcaatttgaattattggatcgatcccaacaagatgcagtcagacatgctctttttttagaggatttttctgaggctcgtagaaggattattcgccttttaggcaagattaatactgcccgagtcaacggaactcaagcttggtttgcaaagagctttattactaagttgcgtgagttgaccaaagagtggtgtgctaacaatcaaattacactcgcttttgatctatataggcttgacgctcagacagtcagccaagactacagaaaaaagtttgccttgatcaataaggattgggcaaaacctgatgataaaaaacaacctattgcttctcatgcaattgatgcgttttgtgtttttgcagctgcaaaagacaaacgcagtattgctaacgtcttaggcgtttttgatgaggcagccgaagagcaaaatcttaagaaaattgctcggttgatgccttccgaagtcaatcttatttctcccaagcgaaagtctattttggataagaatgaggtaggttcgcgagcattaatgaaagaagggatttttgcagaacatttcttaccaatattagtcagaggcgatgattgtcgaattggttttgattggtctgaatctggatccgttaaagtaaaagattctgataagctttttggtgttctagacggattattaaagcaatctcaaaaacgttcagtaaatggatttgagacctatacggtggatcggataaaggcatttgaattgttgcatgatgtctttattcgtccttgttctcaaaagatgcttgagcaggcagaagtcttagagaagcttcactatattacacaaaatatatctgtggcttccgtctatgatgctgttaaccgtcaatttaaatgtcgtgaagaaattcttaaagataaagattttgacataaaagtagatttgggcaaccgttttggttccgctaagggaaagattactttaccggctaaacgcgagtgggaaaaacttgtaaatcgaccggaactcaagaatctaatcggagataagttgtctgataaaggttcagagaaaacccctgatggtgaaactctcatttacgatattttccgctcgataccagtgcagaaactttcgcataaagcaacaagaagagtatggagtctgcctaagattccgtctatttcaagtggagttcgaatcaagcgaaaggatagtaacggtaatgatatttatcaactgtatatgctcaatgacactaagtgtaagggctttgttgtcaatggaaagggcgtgattgactggagctcagatttagttgctgacctttataagcaacctacgttaaccattctgaatggtagatatttaaaggcagatcaatatgtccggatggatcagtggtatgaagttgattgtggtcgagatgatattattgtcaaaatgtgtccaggcacaagccggcggcgatatatcgagattactcaatcgaaaaaacaatttgaagattggactggttatatatctggaagcttctggaactatcctgtaacgatcaaactcagttctcaacagataaccaattttgtcaaaaattcacaaatgcctctgttaggtaaacctagaagtggacaaattacggtcataactttaggtaacacactgaaatataggtattgtgttaagtcaaagaactcaatgatgaatgaagcatatcaaaaagcttatttagctcattttaagcaatgagacatttaactatcgctaattatggaacgtttctcggtgtatccggtcagcgtctcattattgaagaaaagggagagattatccgtgaggtagccctctcccgccttcgaactattactgtttgtaaagcaggaattgcattatccagcgcactggttcaagcttgtgcgttgagagggattcgtttgttttttaatgactggcgaggacagaatgtggccgcggtggttggaatgaatcagcatgcagtagtagctttacgaaagaaacagtttcaatttattgatagtccatcatgcaaagaagtagttagagagtgggttcgctgtaagcttctcaatcagagagccgtgattctttatttttctaaaagcctacttaaagtcaatccgaagctagcgttgaatttgcgatcacatgcatttcgtatatccaatttagtttcccgtttaaatacctttgaactttctgatgattggaataatcatctattgggttttgagggggctggtgcaaggatttattgggaaagtttgcttgcatcgggtcttgttccatcgtctttttctagaagagaaggaagaggctctttggagataacaaaccagtgtcttaattatggttatgctattttggcttcgtacgtatggtcttccttagataatgcgggtcttgaggtttatgccgggctttaccacgcggatagacctggtaaaccatcgcttgttttagatgttatggaagaatatagagcttgggtggttgacaggaatgtcataaaaatgaggtcagctcttgggaaggaaaaggcgattactcctgctttgaaaaaacagttaacaaattctattcatcaaacaatgaatgacctctacccttacaaaggaaagaaactcaagttgcaaactattatgcagcgtcaaatttaccgcttttgctcttgcatagtgaaagataatcgatatcgcggttaccactttaaatggtgattcaaatgggaatgttcggaaaatatatagtgtgttacgatgttgaggacaataaaaggcggagtaagttttttgattttttaaaagatattggcttatttccagttcaaaagtcagtcttttatggtgatttaaatgcagcggagcttcgttctcttaaaacagctgcgagaaaaatgttaaagtctgagactgattcttgtatatgggtagcatgttctcttgagccaaacgagtttaaacaatttattggctataaggacttcgagtacgttgaggctgacggtcatgatactctctagcgtgccagtgagtcttttaagacagtattgcttctgcccaagaattccctattttttactcgttaagggaattcagccaggggaaacaccgtggatgaagcaaggagaatcctatcatgagaaacaaaccttactaaataaacgtcgctcatttgaaagatatggtttagatggcaatattcgaattgaacacagagtctcccttcgtagtgagctgctgagactccatggaatttgtgatgccatgttgtttaaggatgaccagcccgtggctatagttgagtttaaaagtcgagtaaaaactaagctcaatatgggtgagattattcaaatggctgcttatagtatgatttgcgaagtggaatttggaagacaaatttcttttggttatattctttctggcgataaaggaaaggtaaaaccagtgtctattaacccagaaactaaactcaaggtattacaagttcgcgatgcgcttattgcgcaatgtgaagaatgtttattaccagatagctcagcaagtattctgcagtgtgggcagtgtgaatatctgaatttttgtgctgatcgactgtagaaataagtaaacccggatgacagagtcagtagccgggttcaatcttaatttttagtgatttcagctcacttaaaaagtgacttcattcgttggatatgtgaattttacaagagcttaaattgaaatatcaagcttctatgaagcaattttcgaataaaaccgccatttttttgcaaaatgatactattcgaaaaaggaacattgccacagcccctcaagccctattaaacagggggaagaggagctgtttcaattaaacactatccaacgaataactgaaactattcccgacacgtgaagcaggttataacgctgccggtttcaattaaacactatccaacgaataactgaaacaggaagtctccagtagtgaaggagcgacgcaagacagtttcaattaaacactatccaacgaataactgaaacctgcagttgttcgatgtactttgccgctcgatcacgtttcaattaaacactatccaacgaataactgaaacatgtaaagactgcggttaagaccgccacgaccgcgtttcaattaaacactatccaacgaataactgaaacatcaaatcaatgacttagctaattcccaaaactcaagtttcaattaaacactatccaacgaataactgaaactgtttccaatcacgggcagggcgtaggcttcaattgtgtttcaattaaacactatccaacgaataactgaaacttctgcccctcagactaaagcgttggtcgcctttcagtttcaattaaacactatccaacgaataactgaaacattgctgcgccagttgtgccttctctgccggagtgtttcaattaaacactatccaacgaataactgaaactcgtgaaaacgggggctttgctttcggccattggtgtttcaattaaacactatccaacgaataactgaaacatcgagcgcagaaagcagctcgaaccgctgaatatagtttcaattaaacactatccaacgaataactgaaactacacgcctgaaaagtacgtcgaagcaattcaagcagtttcaattaaacactatccaacgaataactgaaaccttgttcagccgtccccgcaatcgtgagcttgtttgtttcaattaaacactatccaacgaataactgaaacctactcgtttttactaatccttaacatatctattatgtttcaattaaacactatccaacgaataactgaaacgaggaaacgactggtacacaagtcttatttgcgttggtttcaattaaacactatccaacgaataactgaaacctggcgaagagagcgtaaagattcgtgacggcatgtttcaattaaacactatccaacgaataactgaaacagatcagcatttccgctctcttttgcatactcgatgcgtttcaattaaacactatccaacgaataactgaaacccgtcaagttctcaatggctttttcaaggctcattgtttcaattaaacactatccaacgaataactgaaacaggccatcagtgcacacttaagcacgtgctgatgcggtttcaattaaacactatccaacgaataactgaaacatgttgtaagcaagacttgtgaaagcgtcatattcgtttcaattaaacactatccaacgaataactgaaacaacttctcacgaagtgtagtcataatagctcactgtttcaattaaacactatccaacgaataactgaaacaaaacatcatcatcagcatcagtaccttgcgcataaagtttcaattaaacactatccaacgaataactgaaacctggcgccacgcgatgacaagagcgggtgtgacctgtttcaattaaacactatccaacgaataactgaaacaataggtagcttagaaattattgtttttatttttcagtttcaattaaacactatccaacgaataactgaaaccgcaaagcccacatgcgagaataatcaagccgacaagtttcaattaaacactatccaacgaataactcaaacttaattaaaagaaatcagttatgacgcataatctcgatgatcttttcatcggtttgctgcatccccttggtaatcatcgcaccaaggttatcaattgtttgttcgacatcggcagagacgattccctgaccttcaacgccgtgaccagcgagtgctaagaagcagcatttataagctgtctgcgcagccgtatgaaccttcatggcgcaggtggacttggcaccgtcgcaaaccatgccggaagtgtcactgatcacgttgttgatggccatgcagcattgctcaaatgtacccgaattaaggtaaacgagagccatcgctacggccgaagaggttgcagtgttgccgcagaaagcggacagagacgggtagtgcgatttaatgtaaatggctcccaggtgcgagagaatgagtgctcgagccaatttttcatcgtcagctttaacgtactcagccattttgacaacaggaatggttgccgtgataccttgattgccgctaccatagttactcatggcaggcagtgtcgcgccgcccattcgcgcgtcagaggctgcagctgtgcaggcggccatattgttgattaagtcagaactcaaaatgccggctttgatttgttcgttaatggttcggccaagttcaagaccatattcatttgccaagccttcagcggccaaagccatattgatatcacgtgcctggagaataaaagcgatatcctcaaagggagctttcaatgcgaaatcatagatagcctttaagttgatttcttctccgcccacagcgctttgtccttccgcattggtactaatagagggttcttttttgaaaacaacttcaccattttttcgttcttcaacaataccggtatggtcaccttggacggttacttgcgcggaatcacttccggcatacgcagtggcgctgcagtagacggcatcagggctatcggctctttcaatgctgacgcaaccgttttcaatcattgtcatggcttctttcacatgagcgggtgtaacggttgccaatacttcaagcccggcgtcaggattgccgcccaaagcgccgacagcagcggcgatgggaagaccgatttgaccggttcccggcacaaaaacacccatggcatttttgtagagattgtcactgactgcgacagaaagacgttcaggctttttccctaaaagtctggcggcatgggctgcggcataggcgatggaagttggttccgtgcagcctaaagcgggttgaacttcctttttgataatcgcgataaagtgttcccactgtcgcatgtctttctccttatgagtcaatgggcgcagaaccgtgagattttgcgcccattgttaaatgattattgaatcgctttttgctcgcctttctttttctttaagaactttgaaacggcgatgatggcagtcggaattaaagcaaacccgataccgcaaagcaaaatcgttgtcaggtggtcacgaataaaaggcatgttgccaaataagtgaccggcccaaactaaaccgtaaacccatgcaaaagcacccgtgatggaataaaactcaaagcgccaaaccggcatggaagcggctccggcaattaacggagcaaatgttctgacgatgggtacaaaacgggcgagaaagatagttttcccgccgtggagtaaatagaactgatgcgttttgttaagggcttcttggtcaatccagctgatcgagccatcgtagattttatggccaagccaagaaccgatatagaagttggacgtattgccgagaatagctccaagtgtgacaacccccgtaagccaccagggatcaattgcccccgttgctgtcacggcgccggcaacaaacaaaagtgaatcacccggtaaaaaggccatgaccacaatccctgtttccaggaaaaagatcatgaacatgatgatataaatcagaatgccgtaatcgttggcgatcgtaattaaaaagcgatcggcgttggtaaacaaatcaatgaataaagaccagtccataaacgggggagccaatcaaaataaggttatttttattaatttaacgttggagagtttactcatttttagaccagttttaaagaggttggaacgtacgaatttgttaggccgtatgtcagcttgaaagagcgaatttcgaacacacaaaacccagcataaaatccaatgctacaatcccgtcattatgcaagtactgaataacacagaacattccccaaaaagagcgattaaagagctctcggatcaattggtcagtcaaatagccgccggtgaagtgattgaacgcccggcctccgttctcaaggagcttgtcgaaaatgccattgacgcggatgccacccgcattgaggtaagactggagtcgggagggataaagcggttgacggtgacagacaatggtcggggaattgccaaggaagagttgcctttggccctaaagcgacacgcaaccagcaaaatccgagatctaaacgaacttgaacacgttttgagtttggggtttcgtggtgaagcgttggcttcgattgcctcggtgagcgcgctgacattaacgtccagaacacaggatcaatcctgtgcatacagcattcatgaaggtgaggtggacgttgcggccggtacacaaggcaccaaggtggaagtggaggatttgttttttaaaacgcccgcgcgtcgaaaatttttaaagtcggaggcaacggaagcggcgcattgcaaaatggctttggagcgaatcgctatcgcccacccgacgattgaatttcgtcttgtcaataacggtaagccggttttggtcttacccattgaagaaagccgatcgcgcgtcaaccggatattgcccgatgagtttgctcgtgcgcaacgggaagtctatgcggaaacggcttctgtgcgtgtttatggatgggtaggattgccaacggccggccgtgcccgaaccgatgctcaatattgctatgtcaacggtcgttttgttcgtgacaaactcttagcccacgcagtcaaaggtgcctatgccgatgtgctgcacaatcagttgcaaccgatgtactgtttgtttgtagacatcgatcccgtgaaggtggacgttaatgttcatccgacaaaaagtgaattgcgcttcagggattctcagtgggttcaccagtttgtgatgcacgcggttcagaacgctttagctcctgccttatcggcaatggaaagtgatgctggtgcttcagatcaatctcaaccgcacactcaaacggtgcaaaaaccgatatcggaggggacgggctcaactcatgcccgcgcatttgagttgcgttcccaagccgcaccggcttatgaaccgtcgcaattgaatcggtacttagacttttatcagactaaagcagaaccgtctcgagggcgtgttattccggacactgttcaagctatccgctcgggtacggcgtttactcaggcgcatgatcaggagcaactgacttatcccttgggaagagctttagggcaggttggcggcgtattcattgtggccgaaaacgatcacggtatggtgcttgtggatatgcacgcagcgcatgagagaatcgtttatgaaaaattaaaagcacagatggacgctcaaacgcttgctgttcagcaacttttaattccgcttgtgtttcaagctgatgctgaagaaatggcaacctttgaagacaatcagtcattgcttttaaatcttggtatagagttggaaattgcctctcctacacatctgcgattgcgagctgttcccgctgcattggctaccgatattgaaaaaaccggagaggcgctgatcacggagttgttgaccgacattaaaaagtttgggtccagcaatttggtggaagaaaaacgcaacgaaattttggccactatggcttgtcacggtgcagtgcgggcacatcgatatttaagcatcgatgaaatgaatgcgcttttgcgtcaaatggagcaaactgagcgcattgatcaatgcaatcacggtagaccgacttgggtgcagatgtccatgtctgacttagataagctttttatgcggggcaaataatggctaaggctgttttattgttgggaccgacagcaagtgggaaaacagctttaggtataaagctcgcccatacatttaatgccgagatcatttccatagactcggccttagtgtatcggggtatggatatcggaacagcaaaacccaccgaagaggaaaaagaaggcgttcctcaccacttaattgatattcgtgatcccttcgacagttacagcgcagccgatttttttaaagattgtgaaagattgattgctgagatttcagctcgaggccgcctgcctttaatagtcggtggtacgatgctttacgctaaggcgctcaaagagggcttaaatcaaatgccttccagtgatctgaatgtgcgtgaagagatcgaacgacaagcgaggcaattcggctggccggccatgcatgagaaactgtctgaagtggatccccagaccgcacacagacttcatacgacggatgcgcaacgtatcagtcgagctcttgaagtgtaccgacaaacaggtaagccgatttctttttatcaaagccagcaaaataaaggatcagatcacactttcctgacgctggggctcttacctaagaatcggaaacttttgcacgagcgcattgaaaagcgctttttaatgatgatccaagcgggctttcttgatgaagtcaagcgcctaatggccgatgagcgtttcgatcggcaaagtccctccatgcgagctgtcggctatcgtcaggctatcgactatctgctcggagagattgattacgatcgattcgttttggctggaatcgcagccactcgccaattagccaagcgccagatgacatggatgcgttcgatgccgcaactggtgacaattgatccgtttgaagaagacgctaatggtttggcaaccgaacgcatcaatgaatttttgagcccaaactaaaagtttaccgcccggtcaggcggcaagcttcaaacatcaatccttcagataatattcgacggtggtaaccacccgaacgcgtttaatgtagggcgtgttgctgtctcggtcataaattgagaattgtccctgagacgctcgcctgattttccctaattcactatcgctgtcttcggcaaatttttgagcggtggatcgggcgtttttagtggcttcttcaaccatttccggtttaatggagttcagaccgttaaaggaaaattgcgtacggtagttctgcgtaaagagaacccccttttgaatcaattcgctctggttacccatggctttcaaaaccgtgtcaacatcggtggttgccacagaaacggccatttccatacggtatcgttcgggcggtaggttattgccgtaaaagtcagcatgcagatcctggacagaaggagtgccctgagagatatcttgagcttttatgccctggctgattaaaaaatttcggatttcttcgctttgtgtttgcgctttttcatagagcgcactcaaatcgttgccggtgacgcggaaggtgacaggccagatgacgtaatcggcttgaacgtttctttcagccagtcctttgacggtaacgacacgatcacgatcgacaaaatggtcaataccggcctttagagaaatgccgacagaggcgataccgatggccacacagacgccggcgattaaattttgttgaacactcatctgcttctcctttaaccattgctcttagaaaacatgatagggaacagaggatggttcagggaagaaaattttcaaattgttttgaatttaacaaaagctttgatattttgtctttttgactaatcgcctgaaaaattcagaactttttttgaagattcaaaggagaggcaaagtcttttgagcgtctgtctctcctttttgattaagaagccatttcagcggctttcttggcgaccgcttcttcttccttagtacgggttcgggcaacataaagcgcagttacggcaagtgcaactccggccaagaagagcccaagggctgtcatgccccagaagccgtacgcggcaagcggcgtgctgaatggttcgccaatgaaggccatgtagtagccgc

SEQ ID NO: 132 - DNA, 21097 bp, synthetic construct
  variation 8643..8644: note = n is a, c, g, or t
  variation 20354..20355: note = n is a, c, g, or t
  misc_feature 1..21097: note = Synthetic
  variation 18314..18315: note = n is a, c, g, or t
  source 1..21097: mol_type = other DNA
ctttggcgtcagtgaaggcatgcttttgtcagccagtgacgcctcggagaaaaaaggactctatatccttgaacctcagaccggtgccgaacccgggatgcgtttacactaacatttcattacaatacgctcggcacttttagtattaaaaacagttggctgatcagccaactgttttttgccattttgaaatcggtgtttacacgttagaaacaactctttctcgaaaagaaaatgtccatcgtccaacgtctcaaatctgcgctgcacaatgctccgtttgagccttttcacccagccagtttcgacttaatcggtcactacaacggtaaaaatcttgcccgcgacatcagttctggcttaactgtcggcatggtggccctgccgctggctatggcttttgccattgcttcgggtgttacgcctgaagccggtatttacacgtcaatcattgccggctttttgattgccattttaggcggttgtcgtgttcaaatcggcggtccagccggcgcttttatcgttattatttacggcattatcgccaactacggtctggccaatttgatgattgccacaatcggtagcgggatcttgcttttcctgatggggttgctaaaaatcggtaatctcattcgttttattccgatttccatcgtgatcggtttcacaaacggtattgccgtactcatcggcctgtcgcaggttaaggatttcctcggtttgcaaatcgataagatgccggcagactttttcggacaaatggatgcgatctaccatcacatccacaccgttaactggtatgcgctaagcattgccttattctcctttgccattgttaagttctggcctaataacacctcgacgcgcgttgctcaatggcgtcgttggttggcgaaaattccgggaacagtgatagttttggcgctctcgacgattgccgtcacaagctttaacctcccggtcgaaacaatcggcagcaaattcggcggcattccgcaaaccttgcctgatttgcaagtgcccacatttgactggcaaaacattcgcaatctcgtcggcccgatgatcaccattgctcttttaggcgcgattgaatctttgctgtgcgcacgcgtggctgacactttgaccgacgatcgccacaaccccaaccaagaacttatggggcaaggggttgccaacatcatcgttccgttcttcggcggcattccagccactggcacgattgctcgtacggttaccaatattaaaagcggtgccgtctcaccgatttccggcgtcgtgcacgcaatcacattgcttgtcatcgtgctgatagctgccccattggcctcgaacatcccgttagctgcgctttctgcgatcttgttctttgtggcctccaacatgggtaactgggctgaattcaagcgcttgcgccatatgacgatgtcctacaaggtcacgttgcttgccacgttcttcctgacggttatctttgacttgacggtagccgtcgaagtggggttactcatctcgtgcttgttcttcatctatcgtatgaatacgctcacgaaggtcacccccatgacgttatcggctgattgccctgaaggcattgaagcatggcgcttacaaggttcgcttttcttcggttctgtctccaagctcaatcatgtgaccgatccgaagcgcatcacggctcacaatgccaacaaagtggtgatctttaactgcacaagcctcatgaatatcgataactccgccatggatatcatctctacctacatgcgcgctttaaaacgtcgtaattttgagttgatcatttgcggtgcaaccgatcacaccctgcgtcaattgcaacgcacgggtattgctcaaacactcggtcgcaacatggtcgataacatgtttgaggcggaaaaactggctcgagaattgttgagaaatattcattaatatctcgatcttctatattcgaaaacgctcgaagcattgtgcttcgggcgttttcttttgtttcataatcagtgagaaatttcttttggagtctatgtcatgatcgttgaacaaaaactggccgaaatgggattagaactgcccgccgtggctgaacctgcaggtctttacaccttttgtcgtcgcgtcggcaatcttatttgggtttcgggccaaacgcctgatatcaatagcgagttgcagattgccggtatcgttggtgatacgttaacactcgaagagggccagcgcgccgcacaactgagtgccttaaatgtgctcgccgttttaaagcgtgaattgggcgacttggatcgaattaaacagtttgttcatttgacaggttttgtccgttgcacgcaaaactttggcatgcatccgcaagtcattaacggggcgagcggtttatttaaagctctttatggcgaagccggtgtcggcacccgcattgccttgggcgcgtacgatttgcccgaaggcgctgctacagaaattacctgtgtagtagaagtaaccgactaaaaatgcaaagcgggatgagttcgaaaaatctcatcccgcttacttattctcgaatcaaattaaagcaattcaatcactttatcgattgtctcttcgctagtggcccaactcgtgcacaaacgcacggcggtgtgagtgtcatcgacttttgcccaacgacttacagccacttgctcttcaagttttgccaattgtgcattctctaaaatgacaaattgttggtttgaggggctttcagcatagaattgataccctttcgctttgagcgcctctttcaacttcatggccatggccacagcatggcgactaatttcgaagtagagattgtcggtaaagagcacgtcaaattggatacccaacatgcgacctttagcgagtactgcgccgctttgcttttgaatcgtaaagaagttgcgtgtaagcgtcttgttggtaaagaccacggcttcaccaaacatggcgcccactttcgtacctccgatatagaaaacatccgtcaagcgtgccaagtctgccaaggtcatatcactgccttcactcgccaaggcataacccaaacgagcaccgtcaacaaacaacaccatgttgtgcttgcgacagacttctgagatggcggtcatttcggctaacgtgtagacagatcccgtttcagtcgcttgagagacgtaaaccatggcaggaatgacggaatgattccaagcatcgtcagcgaaagtatcttgaatgtattgatcgagttcttgagggcacatcttgccatcgtgtgcagcaatggtgagcaccttgtggccgcccgcttcaatagcgccgccttcgtgtccgttgatatggccgctcttaacagcaatcacgccctcacaaggacgaagaatggagcgaatgactgtggcattcgtttgtgtgccgcccactaacaagaagacctctgcatcaggagcttgacaagcttcgcgaatcttagccttagcgctttcacaataagcgtcgaaaccatagccgaccgtactttccatattggtctgaatgagcttttccaaaattttgggatgacaaccttcttgataatcgcaggccaaacgaatcatgacataaactcctttagagatacagaacccatagtgacaccaagtaattggcgctggaaaggatgattgtagcgctgggaaatttttcgcgtttaatcaatttgtcatatttctgtcacttttcggtcatgccctgctcgtagacttcgcccaaactgtttgtaatggctaactacttgtcactcttgaggagttttcgggatgtctgaattgactgcaccgactaaacttgaagtcaaaaacttcaatttctactacggcgcttttcacgcgcttaaaaatatcaacttgtcgattgctgaaaataaagtgacggcgttcatcggcccgtcgggctgcggcaagtccacgctactgcgcacctttaaccgcatgtatgagctctatccggagcaacgcgccgagggtgaaatttggctcgacggcgaaaacattgtgaccaaaaccgaaggcgttgatcgcttgcgctctaaggtcggtatggtgttccaacgaccgacccccttcccgatgtcgatctatgacaacatcgcctacggagtacgcttgtttgaaaaactcccgaaatcagaattagatgaccgtgtcgaatgggctcttcgtcaagccgccctttggagtgatgttaaggacaagttgcaagaatccggcttcgcactctccggcggtcaacaacagcgcttatgtattgcccgcgccattgcggtcaaacctgaagtgctcttactcgatgaaccctgctcggctcttgacccgatttctaccgctaagatcgaaaacttaattgacgagttaaagaaagactacacggtggttatcgttactcacagcatgcaacaagccgctcgtatttccgactttaccgcttacatgtatttgggcgaacttatcgaattcggtaccacggaagtcatgtttaccaagcccacgcgtaaagagacggaagactacattacgggtcgcttcggttaatctgcaggagattaaaaaatgattatgtctgcacaatcgcatttggtgcaccagtttgatgaagatttggacgaattacgacacttgctctacggcatgggcgatctggtcctggaacaaattaccaacgccgggaaagctttccgcaacggagacattgatttagcccaaagcgttcgagatcgcgactctgccattaacgccttggaagtctccactgaccgcgccatcacgcttttgattgctaagcatcagccggctgccaaagacttgcgcttagtattcgggatggcaaaaatgtccaccgactttgagcgtatgggtgaccaggcccgcaacatcgcacgtgaatgtaaggctcaagttcctgatgaattgatcaaaattgttgccgactctggcatcgtagagtcgagcaccaaagtggttaacatggcaatgttagcgctcaaaaatatgagcgaaacggccgcagtgaacacacttcgtgccgataaagaagtggatcagtgtttccacagcggcattaaggaaatcacaaagttcttacagcaacaccctgaaaaaaccgatgtcgcgctctcatgtttgaacattctgaaatgctatgaacgactcggcgaccatgccaccaacattgccgagcatgtcatttttgtgctcgacggtgaggatattcgtcatttgaggcttgatgcgttacctgaaaatctagccaatttgccgtgataattaaccttcgtcaaatagacgaaggtttatcctttggtgcacatattttcgcttatcatgaatataggacttttcaggaggtcgcatgagcgacaacgaaattaaatctgcccgcatcttgattgttgaagacgaagcgccgattcgcacactgatttcttttgcttgcgcaggcgctggctttgaagtcgagtgcaccgacagcgccgtgacggctcagcgaattgtcgaagaaaaccgccctgacttggttttgctcgactacatgctccctgagctctcgggtgttgagtggttagagaagttacacgccgatcccaaaacgaaggatctgccggtgattatgctcacggctcgtggcagtgaatcggatcgcgttaaaggacttaacgccggggccgatgactatgttgtcaagccgttcatgcctcgtgagttaatagcgcgcattcaggccgtgcttcgtcgctatcgcattcaaagtcaaaataggggcggaaccgatgatgtagttgtgtgcggacctttgaccatgaatgagtcaagctttgaagccaaagtcgatgatgtgcctctgtcactctcggctaaagaattcaagctactcttggtgtttgcaaagaatcccgagcgcgtctacagtcgcgaaatgcttttgcagctcgtctgggacaatgccaatgtcgatgaacggacagttgacgtgcacatgcttcgtttgcgcaaacaactacaaggcacaaaggctgaaaacctcctgcaaaccgttcgcggtttgggctatcgagcccacgtcgagtagtacttttgccttggagggctagccatgccggctaaagatttaaatgccaagcagcgctgtttgttaggccttactcttgttgcgatccttgccactgtgatgttcttgtccagtccgcttatagtggcaatgggcgtcacgttggctgcgcttgcacttttggtcgtatacattgttttcaatctttccgtgcattgggtggatgtggccgaggccattgattatcgccaaacacaaaatcgctacacggcccgtatcgatcgttatcgcttgtcattatctgctttgcccgaaggcgttgtacttttcaggcaaggtaacacgttggaatggtgtaaccctgccgcagaacgtcaccttggaatcaaattaacggaacatttgggtaaaggcctgcgagaagttttctctaatgaagcattggtcagctatctcgaagccggcgactttgccaagcccatcgaggtgacgtcaaaactcacgggcggcattttatctctctcggctgtcgttgcagaccaaacccactttatcgtgacaacgcgtgatgtgaccgaacaacgccgtatcgaacagatgcgtaaagacttcgtcgccaatgtcagccacgaacttcgcactcccttgaccgttattcgaggcttcttggacatgattttggccgacgacaacatcgatcccaaaattatcagagagcaacttgaactcatgcaagcggaagcttctcgtatgcacaatctagtcaatgacttgctttcgctctctcgcctcgaaaataaggacgacaccaaaaacgatctgccagaggttgtcaacatgagtaagcttgtggcggctttagccgaagacgcagtgatgctttcaaatggcagacacaccatcaacaccgatatcacgacacaaaaagccgtgatgggctttgtcgatgagatcaaaagcgcctgcttgaatcttgtcagtaacgctatacgctacacgcctgaaggcggcaagattgacatcagttggcgagtcaacgatgatggatctgcggtgttctctgtggctgacaccggtattggcattgcgccgcaagatattcctcgcttgactgagcgcttttaccgcgtcgataagagccgctctcgtgatacgggcggtacgggtctaggacttgctattgtcaagcacgttgccatccgccatcaatgccaattaaagatcgattcagaacccggaaaaggctcaactttcagccttatctttgcaccggaaaatgtcattgattaactttctgtcatacatttctcaacaacaaaggccgcgaggccttttttgttgggataaatggtagtacattggttggatacgcactgataaaaggaattcaatcatcatgacaacaagaaagaaatctcgctcagaaaatcaaactgaaaccaaaggcaatattctgtccgatcaagaacttcacgctcaaaccgaagcgttgcgctctatcttggaaaaagagcctccgtttgatcgcttgcgtattctcaaactcttgacaaaagaagcagagctgagcgttggccccgctcccggtgaaggtgatgacgatgaactcgttgaaaattgggaaaaagccgactatccctacaagcacaacatgaataaaaagcgctacaaccttgaaaaatatgcgcttcaagttgagctattgaaacttcagaaatgggtcaaagaaaccggtcgcaaagtgatgattatctttgaaggtcgagacgcagccggcaagggcggcacgatccgcacctttatggaaaacatgaatcctcgcggttgccgcgttgcagccttaccaaaacccaacgaacaagaaaagggacaatggtatttccaacgctatgttgctcatctgcctagccccggtgaaatcgttttatttgaccgttcgtggtacaaccgcgccggtgttgaacgcgtgatgggcttttgcacggacgatcaatatgtggaattcttgcgtgaatgcccgggttttgaagaaaatctgattcgctcggacactatcttgattaagttctggctgtcggtttcccaggaagaacaacgtcgtcgcttcaaagaacgtcgcattgatccgttaaaacgctggaaactctccccgattgacattgcctctttagacaaatgggatgactattcccgagccgccgaggtcatgttcttctcaaccaatacgaacacgagcccctggattgtggttaagagcgatgacaagatgcgcgcacgccttaacgccatgcgatacgttctctcgatgattgattatgaaggtcgtgatcttgaccgtatcggcaaagttgacccattagtgctctctcgcgctaatgtcgataatcgattcacggctatgctcaaagaaaaaacaaaagacaaagactctaaaaagaagaaaaaagacaactaacgcgcaatctccataaacataatccccggaaagagaacttcaactttccggggattatgtttggaggatgtgaccaaattacgctttcttttgggtgataagctcaataatcttannctcacgtcaagcgaagcaacgaagctgtcaatcggcatgaattctgcatagccgtgcggattatgcgccccggtgaagtagttaggcgtaaccaaaccgcgagccgtcaatgccgagccatcagtgccgcctcgcatggcaacagtattgtccttaatacccaacgcggccaaagcttcgtacattaaatcaatcggcaagcggtcttcacccaagcttcccgaaatattgctgtaaatatcatcgatggtggcttcaatctttgcttttggatagcgttgacgcagcacttccaacaccgatctcacataggctttacgctcttcaaaacgcttattgtcaaagtcgcgaatattgagttgaacacttgctcgagcaggattgccttgcatgttcttaaaccagaaatacccatcacgctcatcggtattttccggcgtctccagacgactgaagttattgatgagatccgtaacaatcaaaagcgggttaactaaaacgcctttagccgcacaagggtgtgtcgtgacaccgacgatatcaaagtgcacttcagctgcgttataggtctcgtaaacaagttctcctaaacagccgccatcaatcgtataagcgaaatcgggtttaaatcgttcaagatccaagagttttgcgccacgcaaccccgtttcttcatcgggaacaaaggcgatataaatgtcaccatgcgggaccttttctgtgatcaagatttccagcatcgtcatcacgttggtcacgccggccttgttatcagcacccaacacgctcgtgccgtcggtgaaaataatgtcctgccccttgtactgagccaattccggatgatctgccaaacgaatccaaatgtctttttcagcatttaagcagacatctccgcctttgtattcaattacttggggatgaatttcaggcgacaaccccacatcaaccgtatccatatgagctacaaagcccactgacgggactcctttgacagtaccgggcaagaaacctgttacattagcgtgttcatcgacatgcacgttttcaagcccaaaatgacgaagaccggcttccaaaacacgagccatattccactgaccttcggtgctcgggattgtcttcactttgggatcgctttggcttgtaatggccaaataacttaagaaacgttccaccaacgcttgagctttttgatgctgatccatgtcaccctcctaaagacttttgaacatgcacacaaggactagtgtattcccaatttcaggcgttgtcatgattttgacacggcttttacatgtgcatatttgttatattttcagttgttttcataatattgtctgagtacatcttaaatagatgctatttgtgataaaaggttgggatatatcttttacaatggacaatggacattatccattagaacaaatcgaggatctcatgaaatctacattagcgattgatttgggtggtcgttataccggcgtggtttcttatacttctgagtttggcttgccttcggctgatagtcttaaagcctatgtcattaatactccaaacaatgacgagctaaccgttagtgtcaagtcgagaactcaagtgcgtcatcgtttgcgttctcaaaaacgatttaaattggcacgtcaattaatgactctgattgttcagcataaagtggctcgcaatctaagtaatagtgagaaagaagctctttttggactactgaagcgacgcggatattctcgttatgattctgaattagatctttcatgcctacagtctattgaaaccgaaccttttcaatcttttatcccagaaatttcagaagatgaatccttactgacccaatgggaaagttttaaggccggttactcaacaggaaacgtagactgtatcaacattgtccgttcttttgctagtctcctggatgcaaagcaatttaaagaacatctgaaacagtactcactgagcaaagaagaggtcaaagactatctaacagctttatctgtgcttcgagaagatgccctgttagttgaacaacaaagtttattcggacacaaacatagaacacaattctttgacgatatttatggtgatattccgaaagactctcgattaaagactatcgtcaatgacttcggtggccttgagcctttctatcgaacgattggcaatatttgcaatctgcaacttagagctcttcgttggtacttcaacgatccttcaatgaagaatccttattatgatgacaagcgactgaaaagtgtactttccagagcttatcatttctttcactatccaaaagaagaactcgagaaatgccgtgacatcttaagtgccatcgaaagtgctgatagcgcactcgcctttttggcttctttcgatcccaaaaagacaattccaccctatgaggatcaaaataaccgcaagcctcctcttgatcaaactctgttgttaaatcctcgcgcactggatctccgatatggttctcgctgggaactttgggtaaataatttacttagagctcctcagtccaaaggcattgatgatcaactggatgttattctcgccagcacagaccgcaagtctcgtctacaagaacgccaatccggccaaattgtgcactacaccagcaaaaagctatacaacgcctacgtacttcacaggctcttggacagaactcttgataatgatccgtactctctgcgcctcattagcaaagaacgcattggccaatccaatgatattcatgaagcgatgagtcgtttaaccaaagacttgggttctcagcacttaaaagaattccttgaatttgcacgcaattactacaacgaggttgagctcgctaaaagaggtttgtggtccattgttcagactcctcttttagaacgtgctgacattcatcctccaatgaaaaaaggcaccattatttcgcgattaatcaacaacgttttgtgcacggagaatgtgtctatttcacagttctggcatcttcgcgtaaagggaacgagtacagtaaaaagtatttgcgcaagtatcgaacgaacacgcaaagaatatgggaatttctttaatgccgaatacaaaaaagctctcgcaaaacatcgcgtgaaagaaaagttagatgcacaagacaaagaattcataaaaattgctgacaatgttcaattaacgagtcaacgcattgctcaagcactgaatttatcggaagagcaacgagaaaaatttgcgaatcccttctcgttagctcaactctatacgatcatagaaacagagcctaacggtttcattaaaacgtctgttgcagttaacgacgagaatgcttggcgtacaaatctagctggccatgctcgttgtgtccgactctgttccgatacggtcagaccgtttgacggagcagtgaaaaaaactcttgaaaggcaagcctatgaactagccaagttgaagttcagtgagttacaaaatagcgtcaaaaatgactgcacagtcgacgtgacgctattgattgaaagtaatgaatttgcatttacctcttcaatggcagaaattaaaaaaagcgataaggccaaagcaatccgtaacaaagctgatcgtgctatgaagcgacaagatcaacgctggcaaaacaaaaataatcgaattaagactgctagccgaggattgtgcccctatacgggccaaccgcttggagataacggcgaaattgaccacatcgtttctagaagtgcgagcttgatgctttacggggacattttgaattcagaaccgaatttaatttattgctcgcaaaaaggtaaccaactcaaatcgaaccgaattaaaactatccaagatcttgcgtccaattatcttgaaaaagtttttggtacctcgaatttctctgctgtcgaggaactcatttgcagtacggtgagccgtctttcggacaatgatatcgttcaatttgattcactaacccagcaagagcaagacgctgtccgccacagtttatttcttaattctgccaatcctgtcaacaggagagtgcgtcaggctctagccaaacaattcaaatctcgcgttaatgggacccaagcttggtttgcccgccaatttatcaaaacgctccaggaactaagcgccaattggtgtaaaactaacaacatctctctgacgtttgacgtttatcgactaccgtctcagagtgtacaaggtgattatcgggcgaaaatcgcgacttccgctccggagctggctaaacccgacagtgcccaacctatcggctctcacgctatagacgctttgtgtgtatttggtgctgcgcttgataatcaaaaaattgcaaaacgaatgggattggacaatctgacattgtctgattcacttgagcatctcactgcccttttgccgcaaagcgttgatatcatcaacatcaagcgcaaatcattatttgataaggacgacctgcagtctatcagctggtttaaagagaccatttatgctgaggaatttttgcccattatggtcaaaaaagatgaaacgcgtattggctttagttggaatgatcaatactcgttaaaagtcaaacacggagatatcctcatcaaaactctttctagctttttaaacgaggctaaaccagttcgtgaatacgaaattcagactttcacgattaatcgagaaaaagcctttgagcttctacacaaagtttttacggcaccctgtacgtctgaagaatgtcaaattgcggacctactggaaggcatgagttatgtcacgcaaaaaactcccatcagcgacttcttcgatgaaaaatctcgttcctttaaattaaataaggccgataagcttttctctatcaaaattaaacttgaccgccggtttggtgcttcagggaccattttcttgccctgccagaaagattgggaaaatgaaatcaaaaaaataaatcaatttactggtcaacttagcaattctcaaaacggacaagacgttgttttgagcatgaagaagaatctcaagcgttctgctttgaagcatagacggactagaagagtttggagtatgcctatcgttccttctggtctcagtgctgccatcagacttaatcgcaagagtcatgatggacgcaacatctatcagctgcaaatgatcaaaaatgccaaatataagggactttgcgttgacaacgaggggcaaatcgactggaaccaactattggttgcggacatctacaaacaaaactcattaactttaagagccgaacgctatcttgacagccaaaaattcatttcgatggatcattggcttgatattgatattggaattcctgaagttaaggttcgtatgagtcctggggaagccaatcgtcggcatatttgcatcacacaaagtcgacaacaatttgaaaattggattggatgcaccttgggctcaatgtggactatgccggcaacgaaaaaactcaatgaggaggagctggccaactttattaaaaatgcaaactcaccaattctgggctctccgcgagatggcgtaatcaaattcgcacgacttggagaaactattacgtactactactgctctcaaagtgctaatgctcagatgaagaatgcctatcaaaaggcttaccttgcgtcattggcgaaatgaggcacatcaccatttccaattacggttcgttcctcggattatccggggaacgactcgtaattcgggaacaagatcatattatccgcgaggtggccctctctagattgcggtcaatatctattgctaaaaagggaatcagcctttcttctgacttagtccaagcctgtgcttatcgaggtatcagaatcttctttcttgactggagagcacgaaacgtcagtgcactaatcggaatgaatcaagatgccgttgtggccctgagaaaacaacaattcgctttcgtgcaatctcctcatcttccacgtactgtcgctgaactcatttcttcgaaaattatcaaccaacgtgctgtcctactttactttgcgaaaatgctgaaatcctcagttccgcaacgaagttttaccttacgacgtactgctgaacatctcgacgtaattattcaagatctaaaaaatacgttaccagaaaaccactggcgagctcgcctcttaggtgcagaaggcagtgcagccaaactttactgggatgctttatctcatacgcaactattttctgcaagcttttccaaccgtcaaggacgtggagcaactgaaatcaccaatcaactactgaactatggctacacaattctgcaatcttacgtttggagcgcactcgacaatgctggattagaagtctattgcggtttttatcatacggatcgcccagggaaaccatcattggttctcgatactatggaggagtaccgagcatgggtcgtagatcgcaacgttataaagctacgccacggactttctaaggacgaccaattaagtcctgctttgaaaaaacgattgactgacgaaattcaccaaacgatggcaaccatttatccctaccgcgggaaaaaactccgattagaaagtatcctgcaacgacaggtttatcgactctgctcgacaattgttgatcaaaagcattacaggggctttcactttaagtggtaaagatatggggttatatacacggtacatcgtctgctatgacgtagagaacgataaaactcgatcgaaatttttcgattttttaaaggatttaggactcgagcctatccaaaagtcggtgttttatgggcaactgactcgagctgaaattcgctgcctaaaaaataaagctcatgaattgctgaataaggactctgattgttgcctgtggcttgtttgtccattaaacccagaagattttaaagattttgttggctatcaaagtcttagtattacagaggcagagggctatgagaccatttagtgttccagtgtcactacttcgacaatattgtttttgcccacggattccctttttttaccttgtcaaagatattaagcctgtcgcaaaaccatgggaaaaacaaggggtaatttttcataaaagacaatgttttttaaacgctcgaagacgtatgacaagatttgggctgtcagatgctaccatgaggtccaatcaattagtttcttccgaactgctctatctacatggtgtttgtgactcaattttattttctggagactctcccgttgccattgttgaattcaaaagtcgagacgttgcctgcaccactccaggcagtctgattcagttgacggcatattcaatgattttggaagatctgtacaacataacccttcgacaaggattcttcctgtgtggagaacgaggtaaagttcatcaaattgacatcactaacgaaaggaaagagcaagtcttacttgtcagggattcaatttatcgagactgtgaaagaagtttacttcctcactcatgcgcaagcgaatttcaatgcggtcaatgtgaatttataaatttttgtgcggatcggtagcgcaaaaaacggatggctggacatcagtccagccagtagccgttatcaaccttgatttttgatgatttcagctcgcttcgaaaagcgacttcaatcccttaactagtgcaggatctattttatcacaaaatttaaatgaaacaagattgttgctcatttactttcgaaaaatatcccctttttaccgcaaacagcatacttgcgaaaattttctggattggcataaagccaaaacctgaaaaccttgagcattcggtgccgtttcaattatgcactagcaaaggatttcactgaaactcatcaaagacatttgcatagccttcggaagagcatgtttcaattatgcactagcaaaggatttcactgaaactacgtgaaactttacgacgcttacgcataaaccacctcgtttcaattatgcactagcaaaggatttcactgaaacccaatccagggcaaagctttttggccacgatcaatgtttcaattatgcactagcaaaggatccactgaagctacagcattgagcgatcgcaactgcagttaatgcaaatccaattgtgcacgatcagacattctaaacaaaactagcgtaccaaaacaaacgtacaaaacgctgtgcatctacacctgtgaacaacatcaagagcattcacacaatcggaaatatcaacgcaaaaaagcgcggtttcccgcgcttttcctgcattttacgaaggttgcttaagtctaatgacgagcaatctttcgctgtgcacgttgacgaatgaaaagcgccaccgtgtttaaagacaaaaccatcaaaaccaacaagaaggccgtagcgtattgaatcggacgagtggcttcaacatcaacactggatgttgccaacacatacacgtgatacggcaaactcatcacagggtcgagaatagaagcactcatctcgggcgtatagaacaccgccgccgtgtacatgattgcagccgtttcacctgccacacgagacaaggccaaaatgttacccgtgaggataccgggcatggccgccggcaaaatgatcttaaagatcgtttcttttttcgaagcacccaaggctaaagaggcttcgcgccaagcttgcggtacttggtttaaggctgcttcggtcgtgttaatcacgatcggcaaagccaacacggccaatgtgagaatcccggaaatgaggctaacgccaaatccgcaaatcgtcacaaagaacgttaaaccgaacaaaccgaaaatcacggacggcacaccggaaaggtttgacaccgccaaacgaatggcgcttacgtagcggccgcttccaccatactcagtcaagtacaaagcagtacacacacccaaaggcaaagcaatgacggttgctcccacggctaaccagaaagtaccgactaagcacggccagatgccacctgcggtcatcatctcacgtggagaatcaaacacgaagtcccatgagagggccggcaatgcattgtcaattaagtacaacaagatcgccacgatcacgccggcgttgatgacggtagcaatacgcatcatccaaatcccgatgctttgagacagataacgccaaaacggatttctttcaactgacatttctacgttctccgttcttagtgtttgccgccgatctgatacttcttggtgaagtagaaggctgttgcattaaaaataaatgtcgtcacaaaaagcaccaaacccgttgcaaacaatgcatggtagtgcgtcgagcctacggcggcttcagccatttctgccgcaatggaggcagtcatgggacgcaaggggtcaaagaagctttccggaatgattgcagcaccacctgctaccatcaaaaccaccatggtttcacccaaagcgcgggaaataccgagcataatggcggtaccgatgccccccaaagcataacggaattgaaccttgcagagcgtttcccaacgcgttgctcccaatgctaaagaagcttcagataaagccacgggaacgttacgcaaagcatcttcagaaatggagcagataaagggaatgcacatcaggcttaacatcacggaagcattcatccagttaagacccgaatccaaccccatcgtttcttgcagccacggagccacaagtaccatacccaagaaaccgataatcacagaaggtaaagccgccagcaattcaatggcnnaagaaatcatggtcgtggtcgccgcaacggctaaagatgcgactaacagtgccccgatttcataatcggggttactgcctgtcggataccactccgtgccgaagaagaaactaaacatcggcacttcgcttatcagcggcagagcttgagagagtaagaacaacaagatggcagcgagagctacgatcgagagcgtagcaatcactgccaactgtacttcaaaccccttgccctgtttggcaatcgaaattgtcataaaggaatctcttcaggggttaaagccctattatttagcaaccggcacgaaaccgacttccttcacagatacttgaccttcggcagacaacgcgaagtcaatcaaagccttcgtgtcaccggcgggtttgccgttcgtgaagaggtagagttcgcgtgacaagggccaggtgcgcgtttcagccgtcttcatcgtggccttcacaccaccgatgtccaaagccttaatgtctttgaccaagtagcccaaaccgacataaccgatagcgttcgggttcttggctacggtttggagtacagcaccgttggatgcttgcaaaagagcacgttgttgaacacgttcacccttcatcacaaggctttcccacgtttcaaacgtgccggaagaagagtcgcggctaaccaccgtgatacgggcatcggcaccaccgacttctttccagtttgtgatacgaccagcataaatgtcacgaatttgatccaagctcaagtccttgactgcatttttcgggtggacaaccggaacaatagcgtcgatagcaaccacgtagcgaacagcttcaccgcccgtcttcttcacattttcagcttcagccggcttaatgtcgcggctggacatggccacgtccgtcgtcttgtccatcaaagccttgataccgtggccggaaccaccgccggagatagagaccttaatgtcggaattcttcttcatgaagttttcagaaatcttttgcatagcgggcaacaccgtcgtagaaccattcacaacaacggtaccggcgctggcagccacagaggccaaaccgacagcagaggccaacaacacggagatcaaagtacgtttcatttttaaccttcctttgtaaaaaagagaatgatgttttcgtctttaggtttgaagcgtattgtgaaactgcactgtgaagtcgacgtgacggttgtatgacatttctgtgaacaaaaacgcccgagagaatttctcgggcgatatggaaaatgcaagtgtggagttactaactgataccgaaaacctgcatgacaacccaaatccagaagggaatcgtagcaatggcagcgagcgtatgcgctgttgtaatgcctgccaacaaaggtgcattgccgcccatgcttgccgtcatcacatagcaagattgagctgtcggcaacatcgcaaatatcattaaggctcccatagcaggaccttcaaggccgaagactaagcaaaagagcattgccacaaaaggcactgccatcaaacgttcaaaagtattggcaatcactaagcccatttgttcacgcataccagccaaacgaagtcctgcaccgatgcacaacaagcccatcgccaacgaagcgttaccgagcgatttaaagaacgtcatcgcgatttgtggcacgggaatttggcaaagattaacaatcaaaccggccgttgtggcaataatcaaggggttcgtaataatagctttgatggtgctctttaaaactgacgtctttttaccctctccttggttttgtcgggcaacagcacctgccagcacagcaacggcaatcgaattgctgataggaacccagaaagcaatcaaaagagacatcaatgccaaaccttcttgaccgaacaggcggctaaccacggcaaagccgacatacgtgttgaaacggaagccgcagtgaaaagccgaagcatgcgtcacttcatcggccttaaccacgaagcgaattaaaaagctcatgagtactgcgcacatcatcgcagcgatggcgacgcccaagaaaagcccggnnaagcggcggaaagagtacatagaaaacgagtttttctgcaccatgccaaaatccatcgttgaaaatcgacggcgtgatgtggtttctgagtaagtatccgacaagaataatcaggaagtcagggagaactaaaaacaccgtcaacatagttctactctttatagaaagttattttgttcatcttaagctcaagtgcttttattgacaattgtttcgtacacctcttttgataggcctcaaatgtcaccgactgacatttgactcaaaaattccatttgtttttgatattttttcacgcgtgccagatctttatctgtcggatttgcaattcgtgtcaaatcactgttgtgcgaaagatcggctagtttcaccaatctggcaataggatttcttgcgatagcgctgaaatattcttcctctgtttcgccttttttagtcagtaaccacactgcttcaatgacccactcgggaaaccctcgttgcgtaagactttgtctggtttccccacaatcctcaattgcatcgtgaagtaacgccacaaccttacaagggctttctgaacacttttccgcaacggccataggatgcaaaatgtagtcatgaccacctttgtctttttgacctcgatgacactctttcgcagtttccaacgcaagagtgattaatgcatttacttctttctctgatatttgcacagattttttctcctagttaattcttcacagataagcgagcaggaagc

SEQ ID NO: 133 - DNA, 15424 bp, synthetic construct
  source 1..15424: mol_type = other DNA
  misc_feature 1..15424: note = Synthetic
cgataaccggggctaccacatccacttacacattaagtgacgacgatgtgggagcaattataagtgtcattgccagctatacggatactcatggcacaaatgaaagtatcaccagctattcaacgcctatcattgccaacatcaacgacaccccaactggatctgtcactatttccggtgatgtcattgaggatcaacagcttacagtatcgaattcccttgccgatcaggatggattaggcgacatcagttaccaatggcaacgtgacggaaacgcaataaacagagcaactacatccacctacacattaagcgacaatgatgtgggtacaccgataagtgtcgtcgcgagttacgtagatggtcacggcgaaaatgaaagtgtcaccagtagcccaaccaatgctgtcgcaaatttgaatgatgcacctggaggctttgtgacaatctcaggtacagccaccgagaatgaattattaacagtaatcaccaccatttttgatgccgatggccttggagacttaaactatcagtggctacggaatggcttcaatattccgggcgcaaccaccccaagttacacgcttagcgaagatgatgtgggagcctttctaaatgttgtcgtcacttatacggatggccatggaacaaatgaaactgtcactagcgattcaacccctttcattgcacagctagatagtgatagcgacggtgttgtaaacagcctagatgcctttccaaataacagcgcggcctccattgacgatgattacgatggcttccccgactattggaataacagctgtgatacagcgtgccaggaattatcggggttaaccttagatgccttcctcgcagataccgataatgatggtatcgagaaccaacaggaacaaattgatggcaccaatataaaccaccctgatagtgatggagatgggataagtgacggcctagaaaaaacatacggtacaaacccattagcaagcgattccgataacgatggaatgacagatggtgaagagcatgcccttggcagcgacccacttaatgcagacagtgatgacgataaactttctgatggtgttgaacttagtgcaggtactaacccgaatgatgctgatacggatggtgatgatatcagcgacctaattgaaggtgccgggttcaaccctccactcgatactgacggggacaacacaataaatgccctagaccttgatagtgataatgatggaattcaggacaacttagaaggtgctaacgaaagcccgatccgtgacagtgatggtgataccattcctgatgttgttgatgctctaactggctcgggcaatcctcttgatgtagatggtgatggaatcggtgatacagttgaatgcggctctttccccaattgctctgatagcgataatgatggtcaaccagattacaccgaagctgacgctgatgatgatggaatcccagacgccattgagtcaggcccatatgtttatgtacttctagatacagacggagacagcactccgaactttcaagataaggacagtgataacgataatattgcagacgttctagaggcactaattacagacataaatgacagtggcataccaaattatgccgatagcgataacgataaaatacccgactatctagacaagagtgatacacaccaatatgcatacgatagcgacggcgatggcattagagatgatatagaatgcccactctaccctgtttgtaccgacagcaatgggaatggtcagccggattatacggaaatggattctgatagtgatggcattacagatagtattgaagttggaccaacccctgagaacccgattgataccgatggcgatgggttgcctaattatcaagataaagacagcgacaatgacggcattgaagatattattgaattaggtattaatccactgtcaccgcaagatagtgattacgatggtatccccgactatgttgacgccatgcgagttgacataaatgatagtgatgatgacggcattgaagacaccattgagtgccaggcttaccccgattgcataactgaagatgccgatggagacggtcaaccaaattacgctgactcacaagatgatgatggcccaatgggggaccgtgatggcgacggtattcaaaacagcctggacctagatgccgataacgatggtattgaaaatgactttgaaggtgatagtgaccttgatggtgatggctacccaaattacctagacactgattctgacggtgacgctattagtgacctggatgaatgccctaactatccagagtgcaaggacatcgacggcaacggtattttagactacctagattcaaatattacttctggacaagagacaccacctatcgatactcctaactctacgggaaatgaaacagaccaaaaccaaggcgaacctgtcgatgcggtagaagggcctgatgctaacatagaggacatcaaagaaggtttaggtagtgtgaatccaataatgaccttagtgctattgctactttttgttagccgtttacggagagtactacctaaatcagctcataaataaaaatgcttacgtctaaattacatctccgcccaagtccatagctatatgaaattcaacgccactattcgaagtcttatctacttaacgccacattatcgtacgcatgttctaagctgtattttatcaactaaaaaataatcgtatccacatggaagctgaatatgaaacagtggctgttactgactacactccttatctcaacattcgctacatcggccgacactaaagagttcgttcgtgactacacctatgttgctggtgaggaggacagtaaaatttcttcaagacaaatggccatgcaggaagttaagcgtgagctactcactgaaattggcacccacatttattcaacgatagatatatcagaaaatacaaagggtgaaacaaatatcaaacaagaaatccgggcaatgactgctgggtttgtgaaagtggacgttttggaagaaaagtgggacggctacaaattttacattaaggccaagatggctgctgaccctgaagatattttaaagcgtataaaaaagttagcctctaaagacgaagagaaggtcaaacttaaagaacaactgaatcaaagtgcaaaggcgttcgaaaatttgaggttggaaatgctggcgcttaaaaaggcacttgcagacagtaaacctggccatgagaagcacaaagtcgctttggcatatgagcagaaatcaaaggttatatctgccagtgaaatgtttgaaaaaggacaggattactattgggaaagaaagggaaaaatcaaagattatcgcgaggctattaaatggtatcaaaagtcggctgatcaaggcaatacagatgctcagtacaatctggctaatatgtatgaacacggtcggggtgttcaacaggactataggcaagcggtttactggtatcaaaaggcgtctgatcaaggctatgtaatggctcagttcaatctggctcttatgtatgctgatggtcggggtgttcaacaggactataggcaagcagtctactggtatcaaaaatcgactgatcaaggctatgcaaatgctcagttcaatctggctcttatgtatttttttggtctgggtgttcaacaggactataggcaagcggtctactggtatcaaaaagcgtctgatcaaggctatgcaagtgctcagtacaatctggcttatatgtatgaaaatgaacagggtgttcaacagaactacaggcaagcggttcactggtatcaaaaagcggctgatcaaggccatgcaaaagctcagtttagtctggctaatatgtattatcgcggtcggggtgttcaacaggactataggcaaacggtttactggtatcaaaaagcggctgatcaaggccatgcaactgctcagttcaatctggctcttatgtatgctgatggtcagggtgctcaacaggactataggcaagtggtttactggtatcaaaaggcggctgttcaaggccttgctcctgctcagttcaatctggctcttatgtatgctaatggtcagggtgctcaacaggactataggcaagcggtttactggtatcaaaaggcggctgatcaaggttataaaccggctatagataatttgagaaacatgtaacttaaccccagttgaagttaattcgccatacttaacatatacccaatagcgaaaagatctccgtcgtatcagttcgcgccttgatagtactgaataatctcgctgtttattcagtaccgatgacatattctgagccactaaaatagaatcactaaaagttatttaatactcatagtaagcagagtcgatgtcagcctgcgtcagaccaatggagactgtaagccattcggtgtaactgccctagtgatatcacaatatccctataccactatcaattgccccagcgttggtgatggcgatggaggtgactgtctaaataccctgtatttgatcagtcagcatgcaaggtctaagtcttatctacttcacgctacattatcgtacgtatgttctaagctgtattttatcaactaaaaaataatcgtatccgcatggaagctgaatatgaaacagtggctgttactgactaccatccttatctcaacattcgctacatgggccgacactaaagagttcgttcgtgactacacctatgttgctggtgaggcggacagtaaaatttcttcaagacaaatggccatgcaggaaattaagcgtgagctactcaatgagattggcacccatatctattcaacaataaacatatcagaaagttctaaggttgagacagacgccaagcaagaaattagggccatgactgctgggtttgtgaaagtggacgttttggaagaaaagtgggacggctacaaaatttatattaaggccaagatgattgctgaccctgaagatattttaaatcgtataaaagagttagcgtctaatgacgaagaaaagatcaggctgaaagaacaattatatcaaaatgcaaaggcgtttgaagccttgcgattggaaatgctgttgcttaaaaaagcgttagttgaaagcaagtcgccaaaagaaaaggagaagctagctttagcatttgcggaaaaatcaaaggaccttaccgttcatgaaatgtatgaaaaaggactggatttctattggggaggtaagggtgagcagcagaactatgaacaagcggcttactggttaaaaaaagctgccgagcagggtaatgcgcatgcacagactagcctagctaatttatatattcgaggcataggtgttcagaaaagtggcacgaaagcagagtactggtatctaaaagctgccgaacaaggtaatgcaaatgctcaggcctatctagcagggatgtattatgtgggtaatagtgttccgcaagactatgaaaaggcactttactgggttgagaaggcgactgcacaaggctatgcaggtgctcagagtctcctaggattaatgtattcagatggtcaggctgttcaaaaaaatgatgaattagccgtgcactggtatcaaaaagcagccgatcaagattatgacttagcccagtttggtctagggcacagatataatattggccaaggtgtacagatgaaccatgttaaggctgcttactggtatcaaaaggcagcgtatcagggtcttgcagatgctcagcactttctcgggataatgtatcaaggcggccgaggtgtgcagaagagtcatgttaacgcagtttactggattcaaaaggcagcatctcagggtcttgcagaggctcagacatcgctagcgtatgcgtatcatcaaggttggggtgtagaacatagctctgagaaagcggcttactggtatcaaaaagctgcatcgcaaggcgacgctgatgctcagtttgttttcgccaatatgttgtttaatggagatggggttcaacagaacgacagtcaatcggtatactggaacaaaaaggcagcgcatcaggggcatgctgtagctcaatatttggaagggcttaggtatgaacatggccagggtgttctgcgtgacgttaatatagccctgtattggtatgaaaaggcggcaaagcaaggcaatgaagaggctataattgcctatggtaggttgctgtagcgtaacgggcgtactataaagttgaattaaattagtttgggcttgatgtcctgactaggcactgcccttcgccatgctgagggtcggttgcttttgaaatcagtgcaaggccgaaattttacggtactgaatcaactcgctgtttattcagtacctatgacacactctcagccactaaaatagaatcattaaaacgtaatctcatactcatcgtaagccgagtcgatgtcagcctgcgtcaggccgatgtagcgcatggtcacgcccgagtccttgtggtttaaaactttactgatgcgctcaattcgctctcctgctgagtacatagtccagcccagggttttgcgcatgctgtgggtgccgattcttagccctagaattttacccacctctttgaatgcctgtgatgccgattgcctggagatgggtttgtgtttggcgcgattgcagtccacctggaacaggtaagcgtgctcagggtgctgctcatgacgacgttgcaccaccgacatggcagtttgattaagggggatggttcgcagcttattggtcttgccctctcgcagcgatatagtcccgctcagagcatgttccatggtaacggacagcaggtcactgatgcgcagtgcggcgttcactccaaagacccacatgtgactgtagatgctcccatggtgtttctccaacagcgaggccatgagcttgatctcttctttggttttaaccgcgtccacaatctgcatatcactccctcacttctaactgacagtttggtgtttcaggcaattgtgtaaactatagacgcactttgtccatcccgccaccggctcacggggctggctaatttacacaatacctttgtgtcagttagctaagccaagtacttagaggcaactaatttaaaggtaagctgataaaggcagtaagaaattaaaaatggagaaatagcacagactgattaaacatgtactcttcagaggttacttcaggtgactaggtaggctgattcagtcaaggccagcctagctatttactctgcttttttcatgattgacaaaattaatagttggaagcattactgggtcaaaaccggaacttagtgtgaagttagcaatgtaagccctcaaaaaaggatatgctatagcaggtgcattaatggaaaagaattttgattcctggtcatcaaaaccaatgtcctggtctgcctcaaattcagaaaaataactaacagttaaaattgattcatcattaattctaagttttaagttaaatataattaaaaagctgtttttttgcttctcagaaaatgcagtgctaaatgagaactcaatgctctccattttaccttcattttttaacagtgatagctcgtcaacatgcgtgcggattaattttatattcatttatgcaaccgcacacagtgcatatgattcatcattcgcctgatatagagactcatccgcatttaacttaagttcaacaagcgccatatgacgaacgttgattgccgagttagcattcagatgaatgctctgcctgttcgttgcactcgaatatgatactaattctcgaccaagaaactcctcaatcgaagggccatgaaatttttcagccaacttataaccagctaaaaaatcctcatcactcacagactctaaatacttagtcattaactctaatgatttctcatacttattagtcataatttactctcttatacaaaatcactgggatgaactatattcttacttttaaggaggtgaataaaattttcaaacaaacataattgtagtctctgaatgcctaaaggcatcatttctctccctccattaaaggaaatttctggtcgccttaacttatcctgtgccttaattgcggcgaaaggaaaggttcccgggtaatccttggttaattcgcgcatatgcgaaataacggcacttactgttgcagattcactttggccagcggatttgagcctatccttgtaaattcttaacattttatcaaaatacaattgatcagccgtcgagccaacgaggtcaagcagtaatttttcgtcaacctcgatcatacattcaagtattgcgtagctattattatagctattttgaccccatttgtgggcaaagtgatcactgtcagtccagaaatagtagccttgcgtcaaccattgtttgggtccagagcgacttaaaaatggtgcatttttaaccacttcagccttgccgccactctttttacatgtatggtatccagttatatgtactgcagccattattaacggagcccaatgtagttggggactaggatgttactgcgcttcaagtataaccccaaataaagcatcaatggaaaaagctaacatacaccaataacatattgataaatattatattaacatctattggctacaccccaccctaaaactcatactaaagcatggtaaaccctctaatccagaatttgaaattatttagagaacgataaaagtagaagaggctcaacctgttaatccacaggccaatagattcgaatcaacggcaccaaggcacgcccttccaactcaaaactttcataatggccgacgatcaagtcggctaaatcatcctggtctaccagggtaagaggagtagtggtacggcctattaatcgctcttagttattctttaatttcatgtattaatgccttcatgccaccagccatcatttcaatgtcatagacggccttgatacctttatctctcaaatcagtaaccctagttcccattgcctctttacaaccaagcacgccatccttcctagcctgatataaaaatacgaatttgaacagacaatctaagtcaccaaggctatcaatatctttgtctacagttgacgctgggcaatcagcaccttcaatttcaaatgctgcaactatgcttctagtatctggatcacaccaaacccaatctacataccgaaaacctgattctgtgattttgcttggaacttgatgctctgatataggtataaatcctaactctaatgctgcccttcttattagttcccctgcctcatgtagcgttaacatccccggcttcaaaagttcatttttagcatgagcaaacgacagccctagatcttccgtataaatcattaccagttccttttacaatcataaaaacaccccctaaaactatagaggcaattaacactactttattaatgcagcccactttatattaaaggccccgaggcgccaagccagtatcattcagttattggcacgcccacccctttcccgcactagcgatcttctcaaataccaacttagcaagcccagctgctttagctgggcctgataacaactgcatcatccatggctttatcgaactcacataacattgtttgttctgcgctggtctctagaatttcccgcatcaccaatttgcttccactacattgcctttaaccgtatgggcattaatcaccatgtctttggcttatttgtaggcatccagaatgagcttctaccttcgtgtccaacaccctgctgcaccccaggtaaagcccccgtagaacggagcatatttacgcagtcaatattagaagctatccctgatagcctactctattagccgtttaatctattactgcgcagccctcaggaggcataccagttattccagttgcatgtaattagaaatctggcacattaatacctaataaagtggaactagaaatgccttgcttgcttatggacccaccaaactctgttcgttttttgaacgacacaagcaagctcaatttgaatttatgtagattatggaaagggaatgtccagtgaatcgagttatatctccagttgcaatcgacttaggcgcaaaaaatacagggttactgctaactcaatatgctgaggggggagcccttacccgtgaacacagcaaggccgtgacactggtaatgcctgaagagggcggcaaaatgacgtggagccaacaggctcgaaccgcaacgcggcatcgcttacgaagtaacaagcgacgcaaaatggccaagaggctgcttaagttatcggtgcagcaactactcaccagacatgacgttacgctcaccgatgaacaatggactcaatgctgggaagcgctgtgtggcttgctcaatagacgtggctataaccgattagaaactgaactcgatgaagacagtttaactgcatgtgaacccgactggtttgcggacgccctacctgaattttttgttgccaataccaacttgttagatcaatggtttagcttgagtcaggacccatcaaaattaaggttactgagcgaacacaaactaatggagcttggcagcaaggagctaaagcgccaacacctttctgattttgacagcagcgaaaaaaataaaattgccactgcctttattattattcgcgatggcgctcatagcttacttcaagagcttgattatgggcataagcatcgccgtgaatatctcgctgctattgaatccgacatagaacgtgatagccgcctgacagctatccgccaacatataggaagcaccgccctgtggtgcctgatcggaaatattagcaacctgcaattacgctgcagtcgctggtattttaacgacatcaacatgaaagaaagggacatctggcagccggaaaaactaaaaatcgtgctaaataggtggctgcaatactggcgaccagcaacagaagaagaaaaacaacgtcaacaagaatccctttccacattagaaaagcactcagatgtactggaggccttatgtcatctggacccaacgtttacaattccaccctatgaagaccaagacaatcgtcgtccaccaaaagatcaaaccctttggttaaacccgctcgctcttgaacagcgctacgggaatagctggcagatatgggcgcaaaaactacttcgctcaaaccccaattgggatgacggcctagatttgatactcgacctatatgaccggaaatcacggctacctaaagaagtatccggaaagcgaattgaacctaaggtgacatcagaccagcttcgttatagttatctattgcagcgcttactagacagaagtcgtaagttagacccatatgcattgcgtaaactagcaagaaatataaaaacgagaagcagtgaagcatcatttgatgtattagctaaggaccttggcacgcaacacacaggcgagttcatagatttttgtcatagatatttcagtgaagtggatatggcaaagcaggggttgtggcgcgccaacttaagtaatttattggagcggtcagatctaaatcctccgcataagaagaaaatactctatagattggtcggcgctattttgggtgaagagtttaccaaggagcagctagctggatttcgaagcaaggtttgggcagcaaaggtactacctagaggtgcaactttaaaaggggcttgcactgcaatagaagaatgccgaaaagaatacggtaatttatttaaggagcgcttacgtcgattgcgctatcgcattgaaaggttagaggagcctgttaagtcattgaaaggtgacgataaagtgatttggaatgtgtgggaaaaaacccagcatgcagtagacgcgatagcaaatcacttggggcactccgatgacaagaaaaagacctatgcaaacccattttcaatgagccagctttataatttgatggaacgtgataggaatggcttttccaatacaacgttagcggctcacttagaaaatgcatggcgaatgactgaagaggtatctcagggagaaaaatcggctaggtgcagtcggctatctgctgatagtgttaggccctttgacggcttgctagggcgcttactggagcgccaagcttgggagattgccaaacttaaagccgaccaactggttaatagtggcattaaaaacagcgccattgatttacctattttaattgaagagaatcgctttgcatttagcgaaggattgatagatgtaaagaaggctggctctgcaaagcgtaagaagtttacagagaagcttaatcagcaacgtagtcgctgggaggacaaagagactcgaatcagaaaagcgagtaaaggtttgtgcccgtatacgggtaagcccctttctgaccatggtgaacttgaccacatattacctcgtgcagcgagcatggcccgaaatggaaccgtttataatagcgaagccaatctaatatggtgcactcgcactggtaaccaaactaagggtgtcagacgctatcacttagaggacttacatccaaactacttaaaagttcagtttggtacaggcaatgttctagaggtatcccagttcatcgaaactacagtgctggcgttacccgatgattttatatttgatgcactagaatctgacgagaaaaaattagcagttagacatgcattattcttacccagtgaaagcgcagcctacaagaaggctgagtggagattagccagtcaaatgggtgcgcgggtgaatggcacacaggcttggttggtgcgggccattttagagcagctggactctcttttacaaccctgggccaaggcgcaaggcaacgaaataagctacagtgccgcacgaattaatgctgaagaagtaagcagtattcgcgctcgcctcggtgagtttgattccaagttttcgaagttagaatttcagccggcagcatcacatgctatcgatgcattgtgcgtattagcggcggcggcctcgacacctaaaactatgcctgttctggctcagggagaaggattgactgagcacatggattggttagtgcaagccatgccaataaatgtggccattcaaagggttgagagaaaaccccgataccataaagcggatgtaagcgggcaaactttatttaaagatggcatttatggggagaatttcttaccggtatgggttggaaaacatggcattcgaattggttttgacccgataaggtcacttgtttgcaaaggtgctaaatcagaagataatttatacagtagctctattttggttaaaggctcaaagccagagctatttattgaatacattgcgccctttcttaagcatcagaatatattgaccaaggcactggagtcggagaagccacagaggtttgtcattgacggtaatttagcttttttacattttcaaaaggtggccaagcagccttgtatcgatcatgagctattacaggcggatgcactagaggcattgtattttaatacgagtaaaaagaatgtttggaagcgcatatataatgagccgggtaaaaaattcaaggctaaagaagacatacttagagcgaaagattttaccttgaagcctagtttttcaattggcaaagggaaagatgcgttggtttcacttgatgggcaactgtatcttccagccatgttggattggcagcgttttatatcacagccagaaatagccagccagttaggttgtaagtcaagcatgcctgaaaatactcgggaaatttgtgagtctttctttaaggtgagacgcggcaaggtacagcataagcgagtgcgcagggagtattcattacccgtagtagaggcgccttccggtggctttaggattcgacgtaagggccctaatggtcagaatgtatggcaaatgcaacctcttgaaggaactccgtcgtgtggctttacagtagatgtagagacagtgaattggaaccggcttgcccagataccccacctaagaaaaagtgaaaatattgtgggtaaaggagaacgttatttgccccctcctaaagaagtggtgttattcgataaatggctaactattcaaaacgatcaaatacccgctggcgtagagatgagcatggcaccaggaacgaaaggtcgacgctacatacgaattagccagccttacaaccaattttctgaatggcttaatgaagcgtacgagaatatacctgagacagccttgttattacctggtgaactgaagctcaacccgggtaagtattttaataatcacctctgtgacttactgggtaaaccaaggtcaaacttatttatcgagcatgttggagagaaagtcacgtattggtacatagtggagagcagtaaccaggctatgaaagcggcctatcagaaggcctactctttatctatcaattcaaaaataggggcttaatatgcgtcacctgaccgtaacggaatacggccagtttctaggttgttcaggaaataggctggttattaagtcgaatacagaagtgatactggaaaccccgctatcacgcctacgtacaatttcaattgccaaggaaggcgtaagtttttcaagcaatctagtgatggcttgtgctaaccggggaatacgcctttttatcttagattggcgtggtatagccgttgctgcccttagtggctgccatcaacatgctattgcagatttacgccgcaatcagtttgagttccttaaacaaagccgtagtcgtactacagctgccggtatgatttatggaaaactacgaaaccagagagctgtcttgctttattttaataagtatcagcgcgcacagaaaatggatggggcgtatgcacttggggatgcagcagaagtaatagctaaacaggcgggtgaaataaaaaatattaattgtttaaaaatcgaattgctcattgataaaaaagaagaatttataaatgaattaaaaaaaattatatgaaaatctttaaatattttatacaatttacaatagttttatcactatttgcaactttcagaattattggacttcaaaatgcatcttttatgggaagctgccttgccaaagtatttggtccattatttagatcaaaaaatattatcaaacaaaatattaaaactggcttgggagaagtagacgaaaaaagagaatctgaaattattaatgatatagttaagcctaattgtctgtatcggattcatggtgatcttcactttcaaaatatgctgatagataaagaaaatgatgattttattttggctgaccctagaggtgagatggagggttctgatattttttatgacatgggtaaattatggcattcagtgaatggtctctatgacttaatacatacggacatagctcagagtaaattaaaaatcacgagtagggtggatattgaaatacgctatggtggtgaagagttattaaaactctattctaatttaaaaacggttttacttgatgaattgaat

SEQ ID NO: 134 - DNA, 8029 bp, synthetic construct
  source 1..8029: mol_type = other DNA
  misc_feature 1..8029: note = Synthetic
ttcagttcctaaatgatttgataacgctctggctaatgcgtgacgaattgcaccaatttgaccgttatatccaccaccatgaacattcagcataatatcgtatttgcctgtggcaccgattaaagttaatggtttaatagcttcattgactcggttatctaacccacccataaaatctttaatagttttatggtttacagttatcttacctgttccatcggttagcttagctcttgcaatagaagttttccttcttcctacactccaaatttctttagttttaggtgccataaatactccttagaattccaacttaaccggtttttgagattttaaatcgtgatcttcgcctgcaaatactctacaatgtgtgagcattttatcgcccaatttagacttcggcagcattcctttgacagcagataaaattactttctcaggacttttttctatcattacattaaacggagtagctttcaatccgcccgggtaaagagaatgttggtaatacattttttgttcttctttgtttccggtgacttgaattttagaagcattgattactataatattatctccacaatcttggtttggagtaaaggtgggcttgtgctttcctctgattctggaagctacgaaagaagtcaatcgaccaagagttttccctgatgcgtcaactacgaaccaatttttctgtacttcttctttttttaaagaaggagttctatgttgttttgaaagaagtggcatgattacaaattttccttataaaaatccaatatttctcctatacttctttagtcaagaaaaattaaggaataattgtattttttcaatatttcagaaagatttttttcataaacgacgcacttttaaaaagtctttctttgaaatcaaaatacgtaaaaatttcgagtactattactatttgctactgatacaaaacctaatttaaccgtttttgtagagaaatgtccatgatttttaacttttcttcaggaaattttataattttttcattttagatttatttttgtcctattgacaagatagaatagtttttacaaatttgaaaatttgcagaaggagaaaacaatatgaaaaactatatctcacctatttctttggacttaggagctttaaacacaggtgcagtattcactcactttatagaaggcgaagagcctgattctcacaatggagttacttttgtgctggctccaaacgattttcaggtatcgcaaagtaacagacttgtaaatcgtcatcggatgagaggagagcaaagaagaaaattagcaaaaagacttttttttctgattttagaagaagaatatgggttaactcaaaaagaaaataagttatgggaattcatccgtggattattgaacagaagaggattcacctatatacaagaggaaggagaaaatgatacagtcgaaaccattgaaatcccgattgaatttgcaaaatttatttttccagaacagtttaagaaaatcaagtcaaatcaaaacgatactatcgtgcaatacattcatgataaggcaaatggtgaagaaaaagatgcgatttccttttggaagacattaagagatgaaaaagtagaatcaagactaaaagaatttcaagaagatttttctgaatcctacactacaaatgagtgcaaaaaatttctttctcgaattcgagaaatttcagaccgcttaattaaagaatttgaattagggaataagcacagaaaaaagtattttgaagagatctatttagatctaaaagagtttcaattagacgaagatgatcctgatttttctccaaagaaaaaacccatagaggaattactatcttcggcaaagaaaaaaatttccttagaggaattttacaaactaatcggacatatatctaacctacaattaagggttcttagaaaatattttaatgataaaaaaatgtcagaaaaagattactgggataaagacagattaaaaaaatattttatattatggttaaaaagctggcatatcaaaaaagactcaactgaaaaagaaaatcagtatagacttatttatcaagctgaaaaagaaaacaaagatatttttcttctcttttttgaaaatagtccagaaactacaattccaccttacgaagaccaaaataaccgcagacctccaaagtgtcaaaatttgctcctttcagaaaaaatattaaaccaaaattattctggttggaaagaagttacaaacataattttaagagaaaagaaagatgattatgggttaatcaatattccggaactgatagaaagatataagtctggaaattctaatctatctatttgtacagaatcgatttcactgcaaagaattttagaaaaatcgatcagtcttgataatttcaaaattcgacaaaatgtgagaatgaagtctttaaccaatgaagagttaaacaataagtattcaaaaaatgagttaaaattagccgaagatggtttgaatagattaaaatcaatcctttctgaatcccaaattgaacttctgtttaacatagcaaatagtttctatagagaaattcaagaagcaagggccggctattggaatgaaaattcatccatgctgcaaaaatgtgaatcaaaaccaagacacaaatctaaatctaaaaaagaattagtctcacaaatactaggaataaaactcaatgaagaggaaatgcaaaaattcattgagaaagtatggatgacaagcgtaaaaggaaagtcaaccgtaaaatccttgtgcaaaggaattgaggattacaggaaaaaatacggaaatctttttagtgaatactattctggattcgagaaaagactctacgcaatttctaaatccaataatgtagagcttaacgaatcttttaaaattcttaaatctgacatagaagaaaaaatacgttcagaaaaaagtgagagatatatagaaaacctacatagaaacttagatgattataaagagtttgtttctatccacgaaaaggtaactctcatttccgaaataataggaaaacatttttcttttaatcagacacaagtttcaaggtttgaaaatccattttctcttgcacagctttctaatattatagacggagaacagcacgggttttccaatatttgctttgcctgccaaaaagaaaattcatggagaggagaaatcatcatggattcggcaaatgcaacacaactaacgtccgacacggggagaccctttgacggacaactcgaccgaatcttaaaaagactgtccatcgaaattacaaaagaaaaattcagtcaattagaaagtcactttcaaaatggagacaatttggaaataccaattttaatggaaaataaccaattttcatttactgaagaattaaataatttaaaaggagcttctaaaaaggcaaaagaaaaagttaaaagaggaatagaaaaatttcatgatagactaatttcaaaagaagaaaggattaaaaaggattctggcggcttgtgcccttatacaggtgagaagatcggaaaaaatggagaaatcgaccatatctaccctcgctcaaaaacaatcgggactgtattcaattcagagttaaatctaatctatacaagtcagatgggaaatcaaaaaaaaggaaacaaattatactccttaaaaaatatacatgaaaacttcttgaataaacattttaagacaagtgaagttcccaaggtaaaagaaaaaattaaaaattgtatagataaagtagtagagaaaaataaaataatttctcaaaaatttatcattcctgacaggttagaaaactttgagagactttgttttaagttggcgatgtttgacgatgatctaagaaatagagtgagtggaaatctacaaacccattccagagctttggtaaatggaacacaggtttggttgtttaaactattaaaaagggaattacaaaaacaaattcaaaaaaagtatccaaaatcagaagttaagattttaccttattattttggaactagggaagacgactttgcattaagtggttatcgaaaaaaactttcaacattgaatccaaactatgaaaaacaggaaaatcaacctgagccaagccatatagtggacgctacaatggtatttgctcatgctctaaccctaagctcacttggaagactatctctaaaaagtccattgattaaagataatactatcgaagacgggaaatggttagagagtcttttaccggaagaaataaaaatcaaaaatattaaaagaaaattaaagtacagaaaagaaaacccagaaagttcctccttatttaaagcagggatgttttcagaaagatttttaagtatattagtaaatgaaaaaggaattcggtttggatttacaggcaaaaagtccggtaaatttatagataaaaaatttaaccaaatagtgtttgaaaagttaaaacctttcctgctgtataaatccaaccctgtaacagaaaatcttgaacactacttaaaactagaaaaaaatccaaagtattctattttaaaaatacaccgagataaagcaaaagagtatcttcaaagatgtcctaaagaagatgaaataggaaattatttagaatctttgaggtatatgacccaaaataaaaacatatttgacgacaaaggaaattttactcccccggaagtaaattcaaaagaaaaatttattgtaaaaatcggtaaagaaaaaatttcggaatttgaaattcagatgccttacttagacgaatggaagaaacttagcctacttcttaaaacagagaaagacccggaaaagaaaattgaaattgccaaaaagtattttcatgaggaaaaaataaaaaatccaaatagacatggtaaaacatccagaaagctttctctgcctattaaaaaagagccttcgggagggtttagaattcgtcgtaaagacccattcaataattttgtctatcaaatacatgaaggagaaacacaaaatttaggattctcgaaagagtcagaaaatattaattttaaaaatagtgtgcttcatcccatttacaattctaaaaatgtaactccgtacaaattagaagaaaaaggaagttaccaagaaattgtatattttgacgaatggagaaaattacaaatttcagatgaccaacaaaaagcaggtattgtatcgattgatatggcacccggtactaagtccagatgttatttgcaagtaatcattcaaagaaaaaactttgatgagatagtctttgcctctaattcttcaaaacttgaattttacaaactaaaaacttccggtaaaaaggactctgatgattttcaaaatttaagtgattttttaaaaaaggaaattgctgaccaaagagattttattaaaattttgcatataaatcaaaccgaagtgaaattagaatacacggtaaatggtttcccttcttccttaaaaaatttgtatgacaaaggagaaaaaattaatttatgagacacctcactgttcttactaatggttgctttattggcttggagagtaaaaggttaatcataaaagaaaaaaacacaataattggtgattacccgatttcaaaacttaaatcagtacaagttgccggatcgggaacatcgttttcttctaacttattacaggaactatcactgaggggagtttcattttttattttagattttcggtcaattcctatattatcactttcaggaataagacaacacgctgtagttgaactaagaaaaaaacaatttcaatttgctgagactgagagagttgcagagctttgcttaaaaattgttcaaggaaaattgcatagtcaaagagcagttttgttgtactttttaaaatctaaaaatttagaaatggaaaaaaaagaatctttgaataaatcaatccaaggaatagaaaaatctataactgagttaaaaaatacagaatggctaaaattttctaattggaaagagaaacttatgggttttgaaggaagcgctgcccatttttattttcaatctttaagaatatccgagttattgccagaaagttttcaatcaagaacggggagaggggcattggatgttacgaatcaatctttaaattttggatattcgattttaatgtcgtatatctggaatgcagtaattaagtctggtttagagccttatttggggttttaccatgtagaaagacccgggagaccttccctcattttagatattatggaagaatacagagcatgggtcgtcgatagaagtgtaattaagttaaggcatatttttaacaaagagaaaatactaacagtagaaattaaaaaaagattaatagaagaaatccatgaaactttttcaaagaaatatcagttttctggaaaaaaattaaaattagaaacaatacttcaaagacaagtgtataggctttgtagttttatttacggcaagaaaaaatataaatctattcgcttcaaatggtgacttatgtatattgaaataatcgtttgttatgacataagctcaaataaaagtagaaggaagttagtgaaagagttgaaagatatgggactttctaatattcaagaatcggtattttggggaagagtcttgaatgcagagataagctcgattaaaagaattttcacagaaatattagataaagaattcgatagagcttttttggttaagacaaatttttctaaacaggcaatcgaatatagttttggatataaagacgtaaaaaattttcaagaaagagactatgagatagtataatgtttgaagacaatattactatatcagaaattaggcaatattttttttgtccaagaattccttggtacagtgcaaatcaaattcagcctataagagaaaatatctggatggagcaaggagaagcctatcataataaaagagaatctcttctgaaaaaaaaattattaaaaaaattttcgagcgattatcaaattcaatataaagtaaaagttcactccaatgatcttcagatttatggaattgcagatgcaattattttttcaggaaactgtgtcttccctgttgagtttaaaatgaattttaaatctatttcaaaaggaatattttttcagctaattggatatggggtttctgcgaaagaaatgtattctttagaaatgaactcagggtttattatttccggtaaaaatgccaaaatgattgaaataaaattcaacgataacgatatagctgtttttaaagatacaattcttacaataagagacattaaaaattcaggtcttttgccagatagctctgcaagcgcagaaaaatgtttacagtgtgaatatattaatttttgtaatgacagaaattattaactctccatgcttaacgcagagggagagccaactttgatttggttgttttcagtgctaggtcgtaattttacttttaaaaaatcttcgaaaaatagcaagtattttttcaatttttcaaaattcgaagttttagaaaatttgtcctctctgaaacccttaaaaaataagggtttcagagaggactatattccaatcacttccacgacctgcaactgaaatataaattcccctgttcttttctacatctaaagactatattccaatcacttccacgacctgcaactgaaatacgtgtagggcgggacgaaatacgattagagcaacctatattccaatcacttccacgacctgcaactgaaattgattataaaaataaaatacatcgcaaacggatactatattccaatcacttccacgacctgcaactgaaataagttctgtttttttggtccttcccaaattctcggctatattccaatcacttccacgacctgcaactgaaattgagaggcaagaattccagatgtttcagaattcgctatattccaatcacttccacgacctgcaactgaaatgaatttattttcagatttcggatacgacaaaccttctatattccaatcacttccacgacctgcaactgaaatcagattccagattggtaatg

SEQ ID NO: 135 - DNA, 24209 bp, synthetic construct
  source 1..24209: mol_type = other DNA
  misc_feature 1..24209: note = Synthetic
taatacggccccttggtcatcaggcagatgaaattagtatcgactgccttcttgtctttcggaccgacgagaatgacatcaccgcggcgcgtcgccgtgatcagtttgcacattttttcgtctttgcggtagcggcgcgcccagtcgagcattctcaccggattaccgaaatcgcgtgaatagttatcaggtgcgccagccggataaaagcttttgcaaaggttcttggccgcagtcaggccaccgcttttaccaacgaaaggctctttgccttcgagacaatacttcaaaagcgggtaataaacaggcagaagctgcagtccgatcagttctctttcttcatcggtgagacccagagccgcgctggcgtttatctgctgataatctgaaatgctgttgccggcaacccctactttgacatgcccaacatcgaacggactcgcggtctgagcctgcacagacaacgataccaccagaagcaaagcacaacataagactgagatttttataaagctcttatccataattcacactccgactgatacgactaatacgattactcaacagtataccaccctcagccagcaaaagtttttatcattcggtctgtagtcataagacctgctataaaaaacctgtcattgcgaggagcgtagcgacgaagcaatcttatggtcagaaaaatcagctcagaggtggattacaccttcggcacacagtactagcacttcgcaatgacttttcttgaccgggaattgctttcagagattcaacatattgaacccccaagctgtactcgcaggtcgtgcaaacgccattctgtcaatattgcaggatctcttggaaataaagaacctgtctttacttgttaaagacaggttcttgtgaaatcagttggaattacttgtttttgcctttttgtttctgctggcgctgctgcttctgctcgcgattctgctttttttcctgcttttgttcgcggttctgtttctgttctttaagctgcttcttttcctgtctctgttgttttgcgctggctttttcggcatcactgaggctgccgtccttgtcggtgtcgaatttctcaagacgcttcgtcttgttcttttcacgcgtggttttcatggtttcgcgctctgtttcactgagtttgccatcgccgtcagaatcgaacttttcgatcaacttgccctttttttccttgttcaactttcgttcggccttcatggcttcgcgttcggcatcgttcagcttgccgtctttgtcagtatcgaacttttcaagatgcttcgccttatcctttttacgttcagccttcatagtttcgcgctcagtatcgctgagtttgccatcgccatcgctgtcaaatcttttgatcgcctcttctttagcggcttttctggcatctttggcgacgcgtttttcttcttcgctgattttaccgtcaccatcggcatcgaactttgccaggcgttcggcgcgcattgtgcttttcatggtttcgcgctctgtattgctgatcttgccatctttatcggcatcaaaacgttcgagcatttcgggcgttaccttgccgacaccgcgatcccagccttcatcgagcacagggtcgatattttcatcaatctcggcgtctgccgctgccggcgccggcgcaacattttcttcggccagacaaagcccactgccgaacaataccatcgctgcaatcagaaaaagcttacttctcatgaacatgtccctcccgttaattttcgccgcaaaacagatctatacaaaaattcaaccagaatgcctgacaagtataccgcaaaatcacattcttttgaatcgctgtcgttaatgaaaaccttgtgcgggatttgtggtattaatatttgtacatacagcacagctacaacaaattctgcagcagatcaaacaccagaatcacgataaatgcgttctctgaaaagaatcttaagccgtcagcagttatgctgctggctcttaaaggtaacaggaacgaaatggttggtaaaatggcatgggcataaataaatctgccggaggattgcgcagaatggcgaacaagtatctgtttcttactgtgacctttattttagccctgagtgcggttctttgcgcctcagaaacagtcgatctcgacaaaatcgattttccggcaccaagactgggaacgacttccgtcaaagagcagcttaagctggcctacagcctgcatgaccagatggcagcagccgacaactgggatatcgagctgttcaaagagtgccattaccgggtgataaatgagtgccccgacacgccatgggcaatcgaatcgtgctggcggctgagtaatctgctgatgaccgcgcccggccagcagaataacgaagaggttgtcaggctgatgacgcatgcgctcgataaataccccggcaacccatggcaggatcgctttaagaaccgtcttatcagaacgctgcaggatatgaaagaccatcagcgcctgctttcgtggtgtcagaaactgcttgagacgaccgaccctgaatcagaaaaatatctttcgctgacgctggtggcgggcaaatcggcagaggcccttggcgaccaggatagcgccagctggtattttaatgaaattctcaaccgtgacccgaaaaaagagagtatctttgcccgcatcgcggccagccatttgaaacaataagctgacaaggctcaacaacagcctgaaggagtttttatgatcaaaaacaaacgtctgctcagatctgtaagtcttgtcctcagtttgattctgttgctgcaggcctttttcatctcagccggtcctcaaggcagactctttgcagaagaagaggaaagcgaattttcggcctccgaagctctcgctcccggcgagtatcttgaacaggtcaccggtttgatgggcggcaatactgaagagattgagagccactcgtatgcgcaatggactctgctgctgatgaatacgctgatcatgctcgatcctaagggaacggacgtcatgacttttcagcacagtatcaccaaaacgctcagcaccgttaacaaggtgcgtggtttcgcggccgacctgcccaaatatgtcggctgggtcgaaaaaattgcagctttcggctttaaatactttccaggaagtggagcgaacaaattccaccagattctgcttaaagtacaaaacgccatgggcatgctcggcaaaaccgatcggctgcgaactttgcaacagacagctacttatatgaagtcgccgtacagcaagggcgtcggcgcctgcaaacagtggtataaaaagggaacgccgctggtcgatggctcacagcagctttccgggctgcaaacaggtgccatgaaagttggcagtgttctccagataatttccggcatcatggaactgtcgagagtgccgggtgctctggccaacgatgccggtacgcccagcttcgaaacggtacagattgcaatcaacggcgctattttaattgcaaccgctctgatggcctggccgccgccaggtgcctggacagtagcggcattcataatcatcggagcctgggagctgatcaagggcactctgaacaagatcggcgacaccattgaaaagtggcacaagtcttatgccgactccttgaattttctcagagaaacagatgacaaatttgccgccttttatgacgaaaatatcgacgccaacagttgccccatgccgggtgacgattcgccgcttattgacccgctcgaaagatcagctgctctggtttttgcagatgagttaaaggctgcactcgaagaaaatcccggcgaaggcgatattgccgagcgccaacaggagctggtcaaaaacatcagagcacagggcattctttcgacctggtattaccagcaggatgaagcaacaagattgttgccgccgaacattgaagacctctatctgatctggaaccatcgcgcagattacatggcgttcaagccgaaaaaaccaagctggagctggaacccgatcaacctgatcggcgacggtctcggctggctggccggcactgctctcgaaagctttctcggcactcacgaccagtttgttgacgacaaaggcaagttcaaagaactggcccttttctgcccggatttcgcgctgacagtattgttcaggcgctacgtgaccagtcaggcacattctgagaatattggcgagatccctgaacatctgagccttaccggtgtgcgcatcgagcaggcacctttcaattacatgcctctaatcgagatttacaacaacaatttcagcaactggagcaccgagatcattggccaggcattcgcagccgacgcctttatgacagcggcaaaagagatgccctatctgaccgagcagctgaattacgcaagaaaaaacaatgaacagacgacaatgcatactctcgccaaggccgtaggcgccgtcatcatagatgacgaccccaaagagatcgttcttggcatactggctgattgtatgctgaaacagcttgagggaagcgcccgcatgcgggctcagttcgacgcgttactggctgcttataacgaagataaaaatgccagaataaaagacaaagaggttgactactctttcaacggtgattcagacgattttaagctcggcaaagagattttcaaaggcaagaaaatgcatgacgaactcggaccatttgttatgaatatgggagtcgctgttcctgagttctggtcaggcattcttaaaggcgaagacgaaaaggaagagcccgaacagatattcagagaatacagcgggcagcttcagaccagcctgcagctaaacctcaactcgctcggcatctcaggcatcgacatggtcaagtttggcatacagctgaaaaacgagatagatgtgcttgaactggcaaaagacaacctcaaggacaaaaagcaggcgctcgattccattaatgaaatctttactaacgaagccatcagaaaactggttaccaaaggtgagtttctcgatgtttcgcgagactggctgtcgaattttctcagctcttacgacccgcccgaagatattttcgaacacaatatcggcaagctggaagatgccatagaaaagcttgaagagtcgatcaacaagcgcaaggaaatattcgataccctgcatccgctgataaaatcagaatacgccggctggctggaaacctacaaaaattacgaagaagctgctgatgagcttggcataagcctcacgatcagatcttccgacagcggttacgcaaagcgcaatcttgaactgctcgctcccatcagcgcgctcgatccttcggcagcaccggctgagacaacgagataagcttgcaatcagttataaataaaccggcgattgaatcacataaacgcagatactatctgctatatctgtgtctcactgcattgttgctgacagttcttttctgtgcagctgttgatggccaggaagcgacttcagaccgcatgctcaacccgtttgaggatatagataaagtaactattatcaacgatccggttcaggccgacgccatagccagcgacagcgacgttcagccagaaccacaaccacaacctcccgctgataatccgatgccgaccgaaccccacaatctgcttggcggtctgcttactgaaatgaatgctgacgaacagcagatgttcctgagctaccagcacgagctgtattcagcccaggttgagagtcttcgccagcagatcagcacactgcaaagcagtttggtcgggctggcaaaagatcgcgaggagcttgccgcagccggaataaatgatactgcagcaatgcagatgctcatgactgacgcttactttctcgaaacccgggccggcaatcttctggcagcgatgttgggcggaaacatggatccgccgggtgcgctggcagtaatcagatgcttgagcccgcgcgcacacccacagcatccttatttcgaagtagcacgcatcacactccggctggtatcactgaaccagaggctcagcgactcgctcgtcagcctcgggcagattggtcagaccccctgattatgcttttaaatacgagttcatacgacaacaggcagctaaggaccacagctaaaggcggcttcataactgtggtcgtggttggcgttcttgctgtcatgctgctgctctctttcaatctttacaaacgttattcgcaacaggcaaagcttgcaatggtcggcgaccagagcgcggtagcccgttattttctcgaatcatacgccgccgatattctctggcagataagaaaaaaaagaaatattccgggaaccaccctgtttgaatctttcagaagcggaacttcagtatcgctctgtccgctgttttacctgcccagctcgccgatcagagaactggcagatgagctgggaataaacatcgggccgatggtagtcaatttcgctacgctcgaacctctgagttacagtccggcggcttttcgcatcgacgccgccaacgaagaaaaaaaggggcaacttgtcattctctgcgaaataaactacggcggccgcgattatagtcttgaggtgcggcaacctttcaaggtcgtcatgacagcaacaccgattctgcgcaaattcattctctttttcgatcagcttcatctcgaacagacagagccctgtggcgtgcgtgacaagatcaacaccataccgatcagaaacaaccgagcacccgctcaatatgcgccactaaccctctatggctgggatttagtgaacagagatatcaacggccaggtttttctgggcgctgacaaccacgagatccgcctgaatctggttggcggagcttttcagaacagcccttccgaaagtcgcgccgatctcgaagatctctggcagatttcaccatcagcttttgacatcacctctgccattaccgaatttgaccaggaagagctgctcaaggacagtcacggcaatccgttgatcgtaagaggagccagcattccgatgacttatcgtggtcactattcgcgaattggcctgcttggcttttctgatgaaattctcgattcagattttctcggcaatttcaagatcgagaactttctggcagctgacccgtcgttcaacagcctgcgttatccggattttggcatgaagcaggcttcgaccctgcgcctgttcggaaaccgggttcttgaagagttcaaaggctttccgcgcgatgtttttggcaaggtttactcgcgcttttttctgctcgcgttctttgacgccccctcgatcggcgtgcccattgcctttaacccgaacccggcgcacagcatcacggtgccgcaatacggtggcgcccagaacctgccgtttcgaccagtctcgggtacctataccgattacatgtctcgggtggtttctggtggtgcgccttcgtccatttatggtgaaaaggccaatgtgccgactaatcgtgatgccgaattccgccaccagcttctcgaaagccctgactttgcaggctccgacgggctcaagccctgtcgtggtttcagcgacatcactccggcatggtttcctgctgtcgagcgcaacccggactcacgcccgccaataacggccggcagtgtacttgagcgagtttcaaagttttaccggactggcgaagactttaaaaaggcagcgggccttaaagatgctgaaaaccagcgcttctgggttgacggagtcgtttatgtcaacggcccgctcgatttgagcgaaggcataactaccgacaatatcagaggcggtctggtgctggtcaacggcgaaatcaagctgggcgatgtcacccgcagcatcggcagcaatctcaatgccgcgactttcgctgccatcaaaaaaatacaactcgatcggatgctgactttcgtcagtctcagcggccagaaaatagcgcttaccggcaaaaggtattacggagttcaattactgtcattcagacccggtctgtctggcccggttgatcagatatcttttgatgacggcaacgagctggtatttatcggtggtctcggcatgaatacaccaaatcttgcggcaatttcgcggcatctcaagaatcgcggcatttttccatttttcaattatctgccggcgctggccgcagatgtctgttcatacacggtcaatattgatgaaaggatcgagcaatatgagtttacggttcgttgatgcaagccggcaaaggccaagacgggcgttgaccatgatcgaaatcacgctcgccgtcgggctgctcgctgcggccatactgcccgtgcttacgctcaccatgcgctcgactcagcagacatacgcaatggagcagcatattatggcaagtcagtttgcggcgggaattctcgaccgttacctggcgatgccgtttaaagtttgtgctgatgcgatacgccgcgaaagttacccccaaaaagtatatgaaacagaaacgttcaaagacgcaattgagaccggtgaatctttttctgaagctctacagcacactttcagagatttcgaatatgaggtgaccgtatcagaaccttcctcagccggcgagcgcggcgaaatgttcaagatcacggtaaccgtcagctggccgggaaaccccggcgcaccaccagccagacaattttcgctcaacgccgtgaagttcaatgaaaacccgtaggattagttagaatgctgatttataaaagtaaaagagctctctctctggtcgaaatcatcgttatttcggccatagcaagctttgtgctcgtcagcatattcatggtctggacacgtaccggcagaactgcgagcagaggcggcgagatgctcgatctgcagattgcgatcagatcaatcaacgaccgtattcgtaacgacgtcagaactctgtcagaggtaatttcggcaagcgaagacagtgtgagttttctggcctgtcacaaaggcagaaaggtcgaaattaagtatcgttatgacgcggccagcagaagcctgctgcgcgaaacagccggcagccccggtgtttttcgagcagacggtctggtaaccagcgcccgcttttcgtgcaaaccgtcgcgcgaaaaattcgaatacctgcaactggctgtagaactgacttctgaaggccagggcaacgctcctgtcagtaaactggcgcaggtcatggtgttttcttcaagaagcctcgatccggcatttgttgaggtaaagtaaccggcagactaaatatcgctgtgcaaatgccttataggtgctatactttcccagacagtaaatgtatcagggggaaaaatatgtcagcaagtcgtggtgggctgtttaaggccgcattggcactgagctttatgttgttcgtattagcattcgtcgttgtcaaaagcggcgctatagagacgcgcgtcgaaaagaaaaccgtcgatggcgtagaaaccgagatcagaagccaccatttcaacgccggcaagatcccgatttatctaaaatcagtcaccgcacccctcaccggcaaaaaagccctggagcaggactgaaagaaaactgcatttacggccgtcaagctgaataaaacccgaatgattattcgtgctcttggcgctattcctttatcacaaacgagtttaagaattcaatttagcatataccgctttcgtcgggctctcggcgtgatctcattcgctacactctcgccagaagagagtagccatttatagctatggctctgcgtcaaaattgcctggctcgaaatttcgctcatgagaagcacgcctgcgcccttccggtatttgtaatctgataagtcatcatttaacggcaaaacacacttttatcgggtgaacctttgaaatttcagttacgcaaaactcttatctttcagacaagagcggcgttcgctcaaattgttgtctagtattatgagactttcaactgtaaatttgtaacaattagagttaggataatcaaatataacaaactttgtggaggatataatgtcacacacctgcctttcgtctgttgcaatagaccttggcgcaataaacacaggaatatacctttttcagatggtagacggagagctatccagtgccgacaaaaagggagtcctgatcaggcttgatccagataaaatcaagctttcacaggtcacgcggcgagctcgaaggcatcagagaagatgttatgccagaagaaagcttgcaaagcgcctgctcaagataatactggaacacaaatttaatgcgccatacgacaagctgccaaacaatactgttgaattcatcaatggactgatgaaccgcagaggctatacctttcttggctttgatgaactggatgttgatgaaataaacattctcgataacaatatgcttggcgaatggctgcctgatttttttgccggctcaacggttgcagcaacagagcagttacagatgataacaagcgacctgcagcaatgcgagaagcttggtaaaagccttgagcagcttctcaaaaccgcgaaagacaagactggcattctgggaagcctggacaaagagatcaaaaaaccagtcttatcagcattgaacaaaatgcatgaagccataagcagcactctcaaaagcgaaagagacgggcattaccatcgaagagagtattttgaaaacattcacaacgacatacatgacttcagtgatgttctaaagcccttttatcagctgtcaaaactgaacagcgaagctctgttcagactggtcggtcatatcagcaatctccagctgcgcgtattgagaaaatatttcaatgacgaaaagatgaagaactgcagcgactactggtgcgacacgcgcttcaaaaaatattttcagcgctacgtcagagcatggcatgcgcgcaaagatgctaaaatagcagaaaacaggcgcaatataatagcttcgctggcagaaaacgatgtgatagacttttggctgggccatcaccctgaactgactattccacctttcgaagaccagaacaatcgccgaccacccgtatgccacagcctgatttttgatcaaggcaagcttgaccaatattacagacattggcgacaggtcactgctgagctgattaagcttgtagacaaagactatgcagtaacagatgcaaatgcccatattgctttgcagaggattctcgaccagagttccgcccttgactactactcaataagaggccttgtcgaaaatcgcaatgaaagccgcctcaaaagcgaggtctatgacgcacgccggcaggagttacaacaaaaagttggcaacaatgccgccgaagagtttcttggcctggcaaaacaatacttctatgaatccagtctggccgcttctggcgactggcatgaagaaattgatacaggtctacttaaaaagtgtggtaaacatccgccaagaaaagaaaagcaactggacaagatactgtcttcaatacttcgcatagacatggattcagctatgctggacagtttcaggagctttttttcaaatcataaatacaaaggcaattctacttgccgaagtgttgcagaaaaggccgccaaagcacaaaaggaatacggtgcttcactcaaggcaatcttagaacagggcaacaacagtgaattgaacaaactcatggaacaaataacacttgctgcgtctgcccttgagagcttcctggaaaacaacatgtcagcaaatgggaaaaaacatgaataccagggcaagcttgcagacctgttcatattcgcccagatgtataatctgctttaccaggacattcagggcttttccagtaattgccgcaactgtactcttgaaaacgcctggcggtcactgcgatcagaagcagataacagtatcgctaacggccgcagacttcctgccgattctgtaaggcctttcgatggtgttcttgccagatcggttgaactcattgcgtctgccgctgcacgcgcaaaagcttctcagctgctgcaactgccggaatatatctcagaggtagatatcaccacaggcatagaaacaaacagtttcgaattcagcagcgagctgagcgaagttaaaaagaaacaactcggaaaaagagccgactcgaagctcgaagccctggcaattcagcaaattgaattcaaccaggcaaagtttgatcgcatcaaaagcgacagctgcggaatatgcccttataccggcgagaaactaacgggatttgggcatatcgaccatattatcccacgctcttatactcgcgatcgattcagagctgttttcaattcagaagcaaacttgatctactgctcggtcgcaggcaataatcgcaaaggtgaccgtgagtacacgcttgatgatctgaatgacaactacctcaaggcagtgttcaacagtgctgaccgcgaatggataaccgggcatataagtgaagaggtcagtcggctgctgaacgccaacacccgcatcacctcattgaattcactgaccttcgatcaaagaaagtgcatcagacacgccatgtttatacctgcgctgcgcaacgaactgctatctgaactcaaccagcaaaacagggttcgggtaaacggaactcagaagtattttctcagcgtacttcgcagaaaaatcgagtctgcaataaaagcgaaaaggccacagctcgcactcaatttcagatccgaacgcgtcgcgtcatcagttattgccgcctatcgtaacgctctctcgcaatttgcgccggaaaatgccaaaaagatgccgcaaccagctttcagtcacataatagacgcagcgatgctgtttgcagcgcaatcagccgttggtttcaaaaacccgaccaataacctggcgccggctgaagaccctgcctatcttaagcagctgctgcctgaagagttcgaaattaccagtcttaacaaaagaccggtatatcgtgcaaacgcatggcatcaacctctgttcaaggacactatttatggggcgcactttctgccattcatcattaccggcgaagggcgcagtggctttggttatgaccagcaaaactgcgtctatataaacaaagatgaagataaagtttttgctgccatacgaccatttttacgaaaaccgtcaccggaacttaacgagatcaagaaacaggcaataaattcgaaagacagtatagttcttactttcaacaaatcccgaatcttcgaactgcttcacaaagttgccaaatatgaagcttcagaaagcatgaattatcaggcagacctgttcgaggccattttatatcagagccagaaaacatcgctgcaaagcgccatgttcgaccagagtggaaaaaaaatgctgacgcgtgaagaaatcctcaaagataaccgattcgtcacaaaaatcgaattgccggcccgtctcggcagtaacaaagattttgtcctgcccttcaaatttgcctggttgaagcttcttgagcaggacttcatcaaaacttgcttcggcaggaaactcgataacgaagatctggcgaagctggatcagaaaatacgaacgtattttctcgaaaaaacgaaacataacaagacttctcagagaatggcccagcgaaaacatgcaagagcccgccgcgtattctcgctgccggtaaagccaggtgctgccggcgctgtttttgcaatcaaacgaaaaactccagccggtcagatatggcagctgatggcttctgaacaggcatacgagggatttagaaccgacagaagcagctttggggctgaggccaaaatgttgctggcgcaactgagtgcttcaaaaaatgccttcgctcttggagcgcgttatagtgccagaacagcaaatgtaagcgttgactacatggacagctggaagaaaatacctttaaatggagaactcgccacaaaactcatatctcttgaattgtgccccggccaagcgacaaggcgctatgccagaatcacggtgcacgataatctgttcatgcaggcaatatacccttgcctcgccatagacaatgattcagaacgccattctctgctattgctccctgaatacaaatttgccaaagacaaaaaagaaaacttcaaaaaagaactccctggcctcggctgtccaagaacttttgttcgcattgagaaagccggcaaagaagtaaccttcacctacgaagctgatggcgtaagttcggcaattgccggcagatacttttcggtttgaaccgatgaagcatctatgcataactgaaacaggttctttcatgggaatgagcggtgccagactggtagtttacaatgatggagaggtcgttgccgaatatccactaaatcgactgcgcacagtaacaattgcaaaaactggaataagtctttcctcgaatctgattctggcctgtgccggccggggcataaagctgttctttaacgattatcgcggcaggccgctggcctgtctggccgggcttcactcacatgctgttgcagaagcgcgaaaaaaccagatcagattttgcgaaagtaatagagcatgccttcttgctgcttctgtaatccgcggaaaacttcgcaatcaaagagcagttctcaattattttgcaaagtataatgccaaagaatctgaagaaaccgccgacatattgaaaaaagccgccgatatgcttgaacggcaggccaatgaagcagacaagatagacgaaagcgcagactggcgaaacaggctgatggggattgaaggcagtggagcagcagcatattttgacgctctttcgcaaaccgggctcatgccgcagcctttttcacaaagaatagccaggggtgcggaagacataataaattctgccctcaactatggttacgccgtgatggcttcatatatctggaatgcagtaataaatgccggcctcgaaccatacattggatttttgcacacagaaagaccaggcaaaccctcgctggttctcgatattcaggaagaataccgagcatggacggtcgatcgtgttgtgataaagaacagaagcagtctcacaaaatcggccagcctcgatactgctatgaaaaaaagaatcatcggtggtgttcagaaaacctttgcgactaaatacccctacaaaggaagaaaactgacacttgaatctattcttcagaggcaggtttacaacatttcggctcaatttgcagaccgtaaaacctaccgaccttacccgttcaaatggtgatgatacatggaaagatctctaactgaatttatcgtctgctatgatgttaagtgtgacaaacgccgcaaaaagctctttgatgcgctcaaagacacaggcctgatacatgttcaggaatctgttttctggggctggctcaacccttctgaagccaaatgcctgccaagactttttgaagacctcctggacgacgaatcagatcgtgcctttgcggtaaaagccagaatgaccgggtgtgatcgcgatctgacctacggctatcaagatggctttttttcggagttcaagccttacgaaacgatatgaatggtcagaccagtttccctgtaaatctgctgcgacaacacgtattctgtccaagaataccgttttttcatgaaataatggggtttcagccggaaaagcctttctgggtaagctacggtaatgcctttcatataaaacagaaaaagcttacagcttttcgtggcatgcaaaggttttctctgacgtctggtcagaaacactttgactgcatacttgccgttccggagatttgctatcacggtattgccgacctgataatagagactgagaataatgtttacccggtagactttaaaagtgagcacagatcaatgtataaagggcagattcttcaggtgatggcttatggtgtgcttgccgcagccgtcttcaaaaaatgtttcgacaaagcctttattctatcgggcaagtcaggcaagactatctgctacgaatatgattctgaatggaaagagaacctcgccagaatatcggctgaagtgagcaacaatctcaggactggaataatgcctgactcgtcggcctcaagaaaaaagtgtattcagtgtgaatatctgaatttctgcaacgatagactctgactaaaattagaaaccctccatgctaagcagaagggagggtcaggaacaacctgattttcgatgatttcagtacattgttcttactttcagtctatgaaaaaagttcgcaaaattcaaggctttttctggaatcaggcctttgcgaaaaaaaatgaacccggagggctttgacgtactgtttcaaagcccttttccgggtgagtaacagaggctctgtcaaagaacaagtaactgaaaccactgatcgaggccgttgaaaagatcgactttgaagtaacagaggctctgtcaaagaacaagtaactgaaacataaccaaaatcaccacaaatgataatatctttgtaacagaggctctgtcaaagaacaagtaactgaaaccaagacttcatcgcagcttgagacaccctgccagtgtaacagaggctctgtcaaagaacaagtaactgaaacaattgtccagcctgcgcagccgtcggcgttatgctgtaacagaggctctgtcaaagaacaagtaactgaaacactatagtcacgggaacgctagatgcttccgcgattgtaacagaggctctgtcaaagaacaagtaactgaaacattcttatataaggcttccaaccttcaaatcctagtaacagaggctctgtcaaagaacaagtaactgaaaccgattaagcctgtcacaagacaggcaaaacaggaagtaacagaggctctgtcaaagaacaagtaactgaaaccgccctctggcaaatcgtttattctttcttttatagtaacagaggctctgtcaaagaacaagtaactgaaacaatataatcaccaccgagaatgagctgaaattattgtaacagaggctctgtcaaagaacaagtaactgaaactttgtaatagaaaaaccaaaagcgttttgatagggtaacagaggctctgtcaaagaacaagtaactgaaacaattaagagcatttgagtgctgctcatgccgaggaaggtaacagaggctctgtcaaagaacaagtaactgaaacaagccaagattaaaggcatgacagggggcgatacagtaacagaggctctgtcaaagaacaagtaactgaaaccggtaagttttgccattggccggcagcttaaattctgtaacagaggctctgtcaaagaacaagtaactgaaacatacgtttagcgcgtctcgcatctgcgcgatcagcgtaacagaggctctgtcaaagaacaagtaactgaaacgaatagaagtaaaattttgcgctctggttttgaggtaacagaggctctgtcaaagaacaagtaactgaaaccgtttggaaaaccagaagtcagcatgtcaacggtgtaacagaggctctgtcaaagaacaagtaactgaaactattgtgcgaagtgcgaggcgcgcagaatagaggtaacagaggctctgtcaaagaacaagtaactgaaacccgctttgccgtcgcagcgcagcattgcatataatgtaacagaggctctgtcaaagaacaagtaactgaaacatactttaataataacagataataacagataaagcagtaacagaggctctgtcaaagaacaagtaactgaaacgtttcccacgtcaatgcactgagcttataagatgcagtaacagaggctctgtcaaagaacaagtaactgaaacgaaagtttagagatgcccgtcgagtcgccgccgaagtaacagaggctctgtcaaagaacaagtaactgaaaccggttgcacagatcctgggccacggtaagcgtatgtaacagaggctctgtcaaagaacaagtaactgaaacccagtcaccagcacgggacagccggggtataaagtaacagaggctctgtcaaagaacaagtaactgaaacgccgtaaaccttggcgaactcagaccagacaacagtgtaacagaggctctgtcaaagaacaagtaactgaaacctttatgctttcggcgtccagttgccgctttgcagtaacagaggctctgtcaaagaacaagtaactgaaacgacttcccggcgacgccagtcggcatattaaacgtaacagaggctctgtcaaagaacaagtaactgaaacaaaatggcaggacgcgatacaggaggcgtgccgtggtaacagaggctctgtcaaagaacaagtaactgaaacgcaactgggcctggctacgcttgcgcgacgtgatgtaacagaggctctgtcaaagaacaagtaactgaaacaagaacgaccgcgacgaattcatcttcaactggaagtaacagaggctctgtcaaagaacaagtaactgaaaccgagtatgctggtatgcaaccttcagcgcctttggagtaacagaggctctgtcaaagaacaagtaactgaaacctgccagttcggctacacccgctcatagcatacaagtaacagaggctctgtcaaagaacaagtaactgaaactgaccggtcgcaccgatagggcaccagggcagaagtaacagaggctctgtcaaagaacaagtaactgaaacttatcgctgccgtgaagggtgggccaacattatgagtaacagaggctctgtcaaagaacaagtaactgaaactcatcatggatgctatcgcgctctttgaagaagtaacagaggctctgtcaaagaacaagtaactgaaactctcgattctcgacgccacaatgcaagatgcagaagtaacagaggctctgtcaaagaacaagtaactgaaacgccatcgctgacgggcacacccatagaggattccagtaacagaggcacaactgacattgtcaaagtactattttgttttcaaagatctttaatctgcgaaagtcagtgcaatctgcggataactacggctgttcgatgacgaagcagtgaaagtcgatggcgttgagtttttcggcgacgtcttcggcggcggcttcgtcgggatagggtccgacaaatattcgatagatctcaaactgggcgtcgggctcagcgagagttggcgcgaagccttcggcttcgagctggttgaaaatttcgcgggccgaggcttcatcaggaaacgcgccaagctgcacgaaaaagcgcgaagcaggagcaacagcaaccggtgccgttgtctcgatcctgaccgacaccgaagcaggaacagtttcggtcgaactggcggcagttcgcagtggcgctggtgctgacccggcgtcatactggcggccattgatgtcgagcagagcccagacaccacccgaaagcagaacgagaatgatcaggtaaaccagccagtctttaaaggtgtcaccggccgggctggcgggcggaccccagtcgaactggcgttttgcggcattacggctgtcgcttccggatgtttctgacacttcaaacgttcctttctttggcggccgggttgttttcgtcgatgaacggcagcttttcgccacactgacaggtggttccgcgataattgcacagcacttcgtaagcatgacgcctgatcagaacacttttgcaggccgggcaaagcgtattttgatcagctgcgacgttgcctggataaacaaatttgagcttttttgcggcggtctcgacgaaatggccgatcacagcaggatcagttggcggagctgattcgtgatagcgcgggaaatagcgcgaaatgtgcaatggcacccggtcagacagatcggccagccagtcgaccagccgggcaaactcactgatgacatcgttgagaccggttaccaccagatgggtcacttcgacatgaactccagctctgacagcggcaacgatgttgtttttaaccgtttcaaggcggccgccacagatattcttataaaaatcatcgttgaacgatttgagatcgatgttcatggcatcggcgtgctgacagagttcggcccagggctcagattcgagataaccgttgctgaccagcaccgtctgcagaccggcctggcgcagcaatggcgcacaatcgcagatatattcgaaccagattcccggctcgttgtaggtaaaggccacaccgatgttgtctttaatgcttttcgcttccaatgccagctgttgcggggtcagttcactgccaacatgctttcgttgcgagatatcagcattctgacagaaacggcagtgcaggttgcagccatacgaaccaatcgagtaaatcggccggccggggaaaaaatgatatagcggctttttctcgattggatcgacattggccgcaactatacgcgcataactgtctagcagcatgcgcccatcgtcagaggcgtggcgcgacagacagcgcccgctctgccctggctgtacccgacaatgattcggacacaacagacagagcagaccatcagcggtctgctcgtaatatctggctttgttcataaggctaacatatcagttccagctcaaaaaggtcaacctgcctcatttgaacaggcgttcgtcttcgctggcgtttactatgtaatcgacgacgatgcgatcggcggcgatagagttgattttgaacagggcatagtgctttgtagtcggaaaatatgcagcaaaagcatcgccgacttcgagctggttcttgaatatgccggtaagagcagatgctgtgttgaaatagtagttaccgccactcagccattcaggagcagcagaaagtttgttgatatcgggttgtccatcgatggcgatgactatgcgtgaattatcgctactgccaagaccctgagcggcactaatgaaactcaatttgccagctgtttcgtctgaatcagcaagaaagtcggtagcaaaaacagcgccggcggcgagattggcgcctgccagcatcagagttttctgccccttgctgattgccgatgtcgtagtgttaacataggcgtattcgacaagaacgccggcaaaatcaccatcggtaatgtcgacgcgatgaatgaacatcttcagatactggtcgccagacgctgatttcttgaaatagagcccgagtattgtctgcggcgaaccggcggcaaaagtgcggtcctgactgagtttggcctgatcggcaaagtcggcgagcagagcattgtcggcataagcatcgaggctggctgcgccttcgagcatggttgtactggctgtcagtggcgtataaaagctgacacgctggccactggcgttgggttttacataaaggtcgattttgccatcgccgtcaagatcgttttcgagttgcagataggcaaacttggctgtggtagtgagatcggcgattgattcgagaaaacctttctgggtgttcataacagtctgaacgccggcgtcatttacaatactgccggctgccagatcggtggctgttttctgcgccgatgcggccagagcatttttgagcgagttaacaaaagccagataggtggtctgcagctggtatggttcgaacgtggtaacatctgccagcatagcggcagcggtggtttcgagattgattctgaactgtgatttttcgctgtcgcgcacttttgcacgcagagtgatatgaccaaccacaaccgcgacttcgtaagttccgacagaagattcgggcacgttctcgatggtaaaaggccagtcggcattggaagccatgtcgagtatttcaaaagtgctgatctgagtgccgtttacagatacgacagcttttttaaagctgctgcgaacttcactgtcgacgttgttcagagtatttccaagcaatgtttcttcgatcttgtcgggtgcggtcagagtgccgctgagggtaacgtacgaagccggcagtgtcgtccctttatcatcagaatcaccgccaaaacatccggtgaaaaatacggcaccagtcagtgcaagaatcagaacaacaatttttcgaaactgcatgtgtatatctcccgcttatcaagaatgtcagaagcctggcaactgcatagcgacatctaacgctatacccgtgaacgatgagactgcttcgaagaccagggtcttctcgcagtgacaactggccgataacctgacaggtcgataaaccgtaccataaatacgttataaaaaaaagaggcccgcagtaatttgcgggcctctttgtgtgtaactctttatcagagcttgcggtaagcgactactttttcgtaggtctgcaggcggaaagccttggttacgttgtagagggtctctttaccggcaatcagcaacacgccgccgggcacgagaatgttgtagatgttctcggccatgcgttcctttgccttctgtgagaagtcagagaacaggtttcggcagatgaccacatcgaattcaccgagctgttccatggcttcggggttcacggtgttggtgaacttgaattcgacaaggttcttcacttcatctttgacgcgcaggtcgccgcggtcatcttcgaagtaaaggtcgatgtatttctgatcgacctggcggaacatttcgcgcttgtaaatgccgcgtttggcggtattgagacagatgtgcgaaatgtcgataccggttacggtgacacgcgccttgtctgaatgcacgtcttcgagcacgctcatcgcggttgaataggcttcgggaccgaacgaagtgccacagcagagaacgcgaatggtatcggcgccatctttgacccgggtttcgataagatcgggtatgatcgtcgcaaccagtaccttgctctgggctgcttcgccgaagaattcggtagtcgggttggtgatcgaatcgtagaggctgacgagcaggtcgctgccttcttcggcaccatagcgcaggctgtggtagtattcgatccaggaagtgaagaagaaacgaccaaggttgcggccaagtttctgttcgagctgttttttgtcgttgatttcgacaccgcacttttcagcgatgatgtcgcgaagaatgagagcttcttcggtattgatgcccttttcatcgacgggaacagtcttgagacggtcgatcagtctgacctggcgaggtgctacaactgatttgagcactttttcgatgaggtctgaactgttctgggcagcagtctgaatgaagtaattgcgaatccagctgtcacgcagaaagatgtctctgagcttgtcttcaaggccattaacgccttcagcgccgttgtccttgaagtattttatcgcagcgataaccaggttctgatctgagctgtcgagagctttggcaactgtggccgctgctgacttgtcgccgatcttggcgagagccagaatggcgcgtacgcgcacggcattgctctcgtctttttcgaccatctgaacgagagagctgacgctgctctggctcttgatggcgccaagagctttgacgatctggtagcggacttcccagcgctgatgcttgatatgcttctgcagatcgagatcgagagatttgtcggcgagttcgctgagagcgacaaccgccagtttggcaacctgcggattttcatcagccagcagcggaacgaagaactgcttgagttctttgctcttgaatgcgcgcagggctgagagggcagcgattctgatctgccagtcaccgttcttgagcagttctttgagcggaaagatcgacttgagatctttcatgttctcgagtgaaaaacatgagttaacggcaacacgccattctttatcgttgagcttctgaatgagcgaatcgactgcgagagtcgaaccgcactgccagatggtgcgtgagatggtttcgcgaatgcgcgaattatcgctttcgagcatttcgagcagtcttttggtaatggcggggtctttgcggcgggccagaaccgaagcggcagcttcgcgcacatcgccgtagggctcggtcatcacgacattgaacaatggctcgacgagctgactcgaagtcgaattggccatggccagacaagcttcgcgcctgacgtgaccgttgatgtccttgaatttattgatcagcgcggtgagagcgccatcgtaatcgagcattttggcaataccggcaacgacgttgcggcgcacgatttcgtcggcatcgtcaagcatggtcttgagcgtgctgaacgactggtcggaaggattggcgcccagagtcagcgcaaaagcctgtctgaccgagtcatcgtggtgctgtgc

SEQ ID NO: 136 - DNA, 24269 bp, synthetic construct
  misc_feature 1..24269: note = Synthetic
  source 1..24269: mol_type = other DNA
aagtccggaccttcagtagagattgatattcttgatcgggaggcgctcgagaaaattgtcgaaacacatcaaattgacgctatatacaatctcgcagccgtgctttcagcaacagcagaaaaggatcctgcaaacgcttggcacgtcggcattgatggtttgcttaatgttcttgaagttgctcgaaaatacaactgtgcggtatttacgccaagttctatcggtgctttcgggccgagttctccaaaggtaaacacgcctcaagactgcgttatgaggccgacgacgatttatggtgttagcaaagtaaccggagagctactttcggactattacttcaaaagattcgatgtagatactagaagcgttagatttccaggtctcatttcttacaccactcctccgggaggaggtactaccgactatgcggtagatattttctattcagctgtcaaaggggaaaagtttgtttgtccgattggaccgaacacaaaaatggacttcatgtatatgccggatgccatacgggcagcaatagagattatggaggcggattctgccaggctagttcatcgaaacagcttcaatgtcacggccatgagtttttctccgaaagaaattgccggggcaataagaagacatataccggacttccaaattgaataccaaattgatcctctccgtcaaagaattgcagagagctggccggactccatggatcagagctgtgcggagacagagtgggggtggaaaccgagatatctgctccaggccatggtggaagacatgctgaaaaatgtcgttccataaaaatacaattgagaacacatcttttttcttttagttcaacttgtagtttgaaaaatggtatctcttcaaaaaatagataaaattattgcggttagagtattgatgctctaaacaaaatttatttcaagtatggagattttccgatgaaaaaattagtacttttgttagctagcgttggtcttatgactgctgctcaggcagcatacaaagatggcactttcgaaggcgaaggtgaaggcaaccacggcaaaattactgttgctgttacggttaaaggcggtaaagttgctgacgttaaagtcttgaagcacacagaaacagacatgattattcaggccccgattgataacctgatccctgaaatcgttaagaatgacggtacaaagggcctcgaaacaatcgctggcgctacaaactcttccaagggtattattgctgccgttaacgctgctttagcaaaagctcaataatttctcggtcatctgagacaaagatcctccagctaactactgggggatttctttttaataagaagaggttgcttgcatacttagacttttcaataggcggatcggaaagcaatctattttttgattttcgtatcgccactttctctgctgtttcctgagagatgaatgtgctgtgtcccttttaagtcgttgctgcagaggagattacaaattttaatgcttcctaataccttcgaaagattttctgattagatagaatacttgcaatgataaaaaggaagaatcaaaatgcttaagttcatagtggctttttctttatgtagccttttgatgacagcggcaaatgcagaactgcctgaaacgattgatattctctatgttaaagcgccgtttaacctgcagaatatcgtgatgagaaaacataatcttttagaaaaagagctctccaaagataatgtcaaaattaactggattctcctcacacagggcgggaaacagggtcaggcattagccagcaattcggcccaggtagcttcagtgatgaatttctcttcgctggttttggcaaatgctaatgacaaccaaataaaagtgattgcaggcgttggaagaccttcagagttgttcggcttagtcagtctgtctggaaagaagccgggggaaggaactgaggttactgtagccggtcctaaaggtactgccttgcaccaacttttggcggactacctcaataaagaaaaggttcctgaacgcagtgtgcatttcgttggaatgagtcagcaggcggcattaaccgctttactcacgagcagagttgactgtgctctcttgggaggagctttgctggaaaaagccaagaaagcaggcgctaaagaaattgctaacgctaaagactttaccggcgtcaatctcgtgatggccgtaagcaaagattttgctgacaaatatcccgaagcgctggaaaaaatcgctaatgctcaggataaagcggttcaatggattaatgagaataaacaggaagccgttaaaatcggagtttctgagttgggtataccggaagagttgggaagcaaattagcttctgcataccattattattctcgtttaaatccggatgatattgcacagctggaaaaaactcagaagtttttaaaagactacggttttatcaagaaaaccgtcccggtagaagaaatcgtgctgccggttgcgaaggagaagtaaatgtattttcaaatgaaaaattttgtcgaggtcagagagccggaaggaaccttggtttttcagcttgaagatttaatgagatattcaggtccgcgcggtttgattgcgagcggcgtaaccatgaagttattagacagagcgttcaaagatctctctccccgtgaaccgccgatgagacatgagatttatatactttcttctttcccaggttccgatgttgtggacggttttgagttagtgactagggctgttacgagaggaagatacattcttgaccttgataaagctccgaaagatgctcctccttcccctgcaggcggttcaatgtatttcgaaatcggatatagagacagatgttttgcctacacactctctccggaaatttttgataaagaatggtttgaggcagtggcagccaaacaagaaggatgtaaaaccgaaaaagaacacgctaactatctggcctataagttttctgtactcggcaaactcattgcttcttccgatccgttcttgcgtattgaaccatgtaaattggatgaaagattttcatacaaatactagttattttccctaacaaataaccgtcaataactttgttgttttgacggtttcttattgtttataaaagaaattttttgtattgtttttatcttctaatccctaacatttgtgattgtcttggcaaatctcttttatttttgttccatttgttacaattagaacatctcaggagataaagttcttagccgctccctagagagaacttcaataaataaaaagggaggtgaacatgttgcaaaatgatctgtccgctatgaccttagaaaaaggcactatcttgatcgttgacgacaatgaactcaactgcgagattttgtctattattttttctgttcacccgattatcattgcctcaaacggtaaagaagctcttgatgtcattcgtaaaaaaaagggtgagcttgatgctgttttgctggattatttaatgcctcaaatggatggcttaaccttccttgagcaagtaaaagaagaaaaactcttatctcgaacgcctattttcttgattacatcagaagaagatgacactcttgccgcaaaagcattcaaacttggcgttgtcgattttattaaaagaccgttatccgcttttattgtccagaaacgcgtcgaatcaattattgagctatatcaaacacgagccatactagaaaagctcttagaaaaagaaactaaaaaagttagagattttggacgagggctgattaaaacaatcggagcggcgattgaagatcgcgtaaaagacagcagagtgcatagccataatgtcagagctctttctcgaattcttttaactaagagcgaagttggcaaaaatcttactcatcaagaaatcagcgaggtattagaagcgatttctctgcaggatataggtaagctatcgcaagattctatccttcacaacgactcggatcacccgaataaagagcaacaggaggaaatttccgaaagaagcaagaaagccataatgttattgacggatcttcaaaaggtcagtcactttaagccttttcaatttgcaagggatctagcagaattccaaaaagataatatggaaggacactatttttctgagaaaatcggacatcaggaaatccccttgtgggtacaaggggtggcattttcgtctatgattgactcgataattgctaattctggaaagagcggaaaagaaggtttttcagaagctttgaaaagagtagaagagggagagttcggagaattcaattctcacttactcaaagcagtaaaagaaaatttagatgaactgcaggcggtctatggctaaggtttcaggagaaaattgagccgggccgggaaggtttaaaatggaagagtccaaaaaacaaatcctcgctgaggctggaattaatgttactaaggcgttaaacagtttcatgcagatggaaccgatgtatgagaaatttcttaataagttctgtctggatccgtcatttgaaaatttggaacaggcagtagaagtcaaagacgaggatcttgctcatctctcttctcatactttaaaaggcatcagcgcaacgctggggatggaaaagctctatcagcttttgttagaacaggacaaccattttaaaaagcatgaatttgaagccggctatgatatgcttcctcaaatcaaaggggagtatttaaaaatgattgaagccatcaaaaaataaggcctgccgaagcaggccgagaaagctaagcgcattacttgcctttagctttgacttgttcaatcttggcatttttaactaagctgaccaaatagttttgtgcagcttgttgtttccagaggttaacgagctgaggtttaagttcagcttcagtcgggaatggaacctctctcttatcgtcgagtctgacgatatggtaaccagcagtacttttgaaaggaatcgtcaacagctgacctttagttagggaagcggcagcttcgcctaaaccaggaatttgaaagtgtctgatgttgaccatcggtaatgcaccgcctgcttccttggttcctgcgtcaaggctgttttctttggctaatgcggcaaaatctgctcctccttggatttgtttgatgaggtctctagctttggactcttcttttacgagaatgtggctgattttgacttcatgcggatcgtatgcatcctgagctttcttataaagttcagtgatttgcgcagcggtcggttctttatctccaagattcttcttaattagctggttaacatatacgcgctgcttaagagcttcgatttcttccttaacttgcggaagctgatcaattttttgcttttttgcttcttgggcgataaccagctgctcaataataagattctttgccaaagcttcttgctgtttgacgtcagttactccgcgggcggcaatctgtcccatgagatctttctgagtctttgcagatacagtctgcccgttaacggaaaatgctgtttgagctaaggtaactgagccgagtgatgccaacgcgatggcaagaagtgtttttttcattttaattagtcctgttaagaaactggtttagtgtctagactcgcttggcgctaatagcgtcatagttatgttgtgaatgccatgtccgataaatggtttgaggtattcaaagacaaggcggtgacgttcaatttttgggaggccttcaaaccgtctggaaatcacaaataagtgataaagacccgaagcgggctgcgggttgcctggaataaactgattggaaaaacgaagctcaatcggaaacaaaggttcaagagcgtttgaaattcgttctaatgatggagtgtggctcactgttcttttcctttagttttattttcagagataaaaggagcgatataaaaaccaataccgagcgtgaacagaagggtcagacccataagcccgaagagcttaaagttgacccagaaatctgtggagcaggtataggccacgatgagatttaaaacgccaaccactgaaaaaaagccgatccaagacagaaggagctttctccaagcaggggcaggaagttcgagctgttttccgagcaatgacttgataaagttgcgcccagtcagcattccgaagaccaggataagcgcaaaaacccaataaaggattgtcggcttccacttaatgaacatctcgtcatgaagccatatagtcaaagatccgaataccaaaatgatggcaacagaaatccacagcatgggttccacttttttgccgctaaccaaattaaatacgatttgcagaagagagacgaggattgccgccgccgtggcgcagatgataggggcctgcgaagcatcaaatccgttgccaagccaagaattgcaaaggctagcagcatagtctgggttgccttgtgcaactttgaaagtgacaaagaataagatgaccggaaggaggtcataaaaaaacttcacgtgtttagctcctacagacgttgatttagctagattttacaaaaaaagcaattatttgttaaattgtcgtaaatacctctcttaaaatcttaagaaaatattagacaacaccataaaaaacaatcaaaatctctttatatcctttggagctcaatgggtttgatgagagtaaccaaataatacaaaaaagatttaaatgaattgaaaatcttagggtttgttaaggataaagggatatccttatcgtatctttaattagagtattatcgcgcgatgaaaacaataaaaaaattagctgtggccgcttgtgtcggtgcctcgctgatttcgatgaataacgaaacaaaaatgattccggaagttagagcagaagtcgttaaaccttccatagtccttcctgccggagtgactcagggcccgaccgttgaaggtatcacagagtatcgtttggccaatggcttacgagtagttttattttccgatccttccaagcctactgccacagtcaatatgacttacttggttggttcccgtcaagaaaattatggcgaaacgggaatggctcacctgcttgagcatctcatcttcaaaggtagtaaaaattttccggctccaacaaaagaattcactcgccgcggattccgtatgaacggttccacttggtttgaccgtactaattactacgtttctttctcttcaactgaagacaatttgaaatgggctttggcttggagtgccgatgccatgtgcaactctttcattgctaagaaagatttagacagtgaaatgagcgttgtccgcaatgaatacgaaatgggagaaaactctccgaccagcgtcatgatgaagcgtatgcagtccatgatttttgactggcataactacggaaagagcaccatcggcaacaagagcgatattgagaacgtcagaatcgaaaaccttcaagacttctatcaccgctattatcgtcccgataatgccgtactcacggtaagcggaaagttcgatatccaaaaaactctcaactggattgcggaagacttcggaaagattgagaatccggctgagactctgcctccggagtggacagttgagccgacagccgacggcgaacgctcctttgaaatcagaagaaaaggggaatctcagttagttgcggttgcctaccgcattccaagcgctttgcacgctgattctccggcagtcgaaactgcagtagacattctgagcgacgatcctaatggacgtctttaccaaaacttggttaaaaccggtttggcaactaaagtttttggttccgtcatggggactaaacagcctggttatgtaatttttatggctgtcgtcaaaaagggcgaaccaatcgagccggttagaaaagctttaatcgagacaattgaaacttctttagaaaaaactccgatctcctctaaggagctggatagaacaaagattgaagctgaaaacttgtatgaagttctcttctctgatcctgaagcttttggcgttggattatctgagtttattgccttaggtgattggagactcttcttctacggacgcgaccaaattcagaaggtgactgctaaggaagctgaaaatgcagcttctaaatactttgtcagagacaaccgagttgtcggcgttttcctgcctgaagataatcctaagagagccacgatcccggcttctccaacggccgagcagcttttagtgaattacacacctaagcaagactcagcagaagcagaaacattcgattcttcttttgctaatttagacaagagaactatcaaatttaatgtgggtgacctcaaggttgctctgcttcctaagaagaaccgcggagaaaccgtcacggtaatgctgaagttcgactacggtaatctcgagaatctctccggaaaagaaacagccatgacattagctaatgccatgctgacttatggtaccgacaagctttccagaggggaaatcgaagatgagatgtctaaattaaagatgacgggctcgatttctaattacgtcactacaagatctaatctcgacgcttctttgaacttcgttgccgatctttggaagcattccgtttatccggaaaacgaatttaaagatctgaagaagaaactgaccgtcatgtttgaaagcatgaaggacaaaccggatgctttaagtgacgatgcgatggctcagcacttcaacacctatccgaaaggagatcctcgccattttccttctttggcagaaaagattgcagcattaaatgctttgtccgatgctgatgtcaaggcctttgccaaggagtacttcggaacagctcgcggagagattgcaattgtcggcgattttgatgcaaagaaagccgaagaaacaattaagaaagcttttgctgacaacaagagtcaagtagcgttcggcaagatttataaagagttcaagcctgttgcagccactcgaatcaccatcgatactcctgaaaaagaaaatgcagttttagcgggaagagctgtatttccaattaaagataccgatgctgatgctccagccctgatgattgctaactggatcttaggtgggggtaccggtttgtctaacagactcattgaccgtctgcgtcaaaaagagggcttatcttacggggctggctctggggtgaagattccggctgaaggtaatgaaggcgcatttgttttcagagctatcgtagctcctcaaaatcttttgaaggctgaagccagcgcaaaagatgtgattgagacagccgtaagagacggctttactgatcaggaagttgcagaggctaagaagggatttttacagagccaagccgttgctcgtgctcaggatcgtgtcatttctgccagctggatcaaaaagcttgagctcaatagagactggaaatttaacaaggaaatggaagacaagatcaatgcattaactactgctcaggtcaatgcagtcctgaagaagtatattaagcctgatcaaattacttacgttcttgcaggtgatttgaaaaaaactaaaacggaagggcaaaaataaattagtgcgggggagttgaaaaattcttaactttcccgtactatgtacataacaaacttacatctttcagaagccgctttttgcgggctgaaatcaacgaaattaagttgtgactccggcctctgggttaaccatccggagtttttcattttccgattatcatttcgcatgtcctgtgcttgcacttctgtgatttcaactcttgctcctgttagctgccgtaaatttgcttagctttctcgactctttgttttctttttcttagaaaatccctgaaaaacagttagttgcgttttgctcacctttgactgaggtctcccttagaaaattagtgtcaatctgttaaaaataggggataatcggtaaagcaaaagaagaatttatttgtagtgatttgatcctggggggagcttttcttttttctctccgacagatgtcgctatataaaactcataacaaggagaaaaaatggaatcttctaagtatattttccctgtgggaatcgatatgggcgcaaagtataccggcgtcttcatgctttctcatctcgacggcgttctccctactgctgccgatgcaacagcaatgacgattgtgaactccgataagattcactactctatgaaacatagaactgcggtgcggcacagagtccgatcaaaaaagagatttgttctggctcgtagactgcttaatcttattgttgaccatcagctaatgaaagcaggttttgtccttagcgctcaggaaaagtctcagctgacagaagctttgtcaggatatttaaagagaagaggctattcacgaatcgagacagaaatcgaccttgatagcttgaatgatgtagatccgattgtttttgccatgtgccccgggtttgaagatttctttagttcagatattgaacttttaactcagtggaactctctcacagctgatttgtccgaagtaaataaaataaattcaaataaaaaaattccggatgtaaaaacctttaaaaaatacgtcaaggataattttcctgactacagttcaaaagaaagtctagaaagatatcttgaagcgagaaaaacaattattgaggcagctcgacaaatttctgagttaacttctctaggccatctgcacagagaaaagtatttagataatattcttcacgatatgggccgcgattctcggctgaaaaaaattggagaagctttcgggggcatatgccggttttggaacttgatagggaatttatcaaatctccagctgagagcgcttcgctggtattttaacgatccttggatcgagaaagttaagcctgtggagactgaaaactctcagcccttgaatgagcaaaaactcaaggatatctgggttagagcttataagtactttcatccggatcctgaaaacaaggcaagaatttcagacgtgattagagctctttccaaggccgatgacataattgactgcttgtgtgaattagattgcaagagcacaattccgccgtatgaggaccaaaataatcgcagacctcctcttgactacactctttaccttaacccagctaagctcactgaggtctacggcgactcatggaggagttgggcttctcgtttggttaacgcagattctgatttgcaagacaatttagatgttattttgcagaatcgtgatagaaaatccaggagaacaactcaagactctttggattttcgactttcttacattcttcaaagagctttagaccgctccaaggtaaatgatattttcgaaataagaaagatactttcgagccctacactttattctgaagctgctacaagaaatttgctgttgtttaagacattggaagagcaaaattttggaccatttttggacttcgccagaagatatttctacgaagtagcaaaggcacagaaagggttgtggaatgagaaagaatctattctggaaagatctgatttgcatccaaaacagaagaaaaaagttttagatcgtcttgtagctaatgtcctaagagttgacgaagagacagcaaaaagatttattgctgacgtttggaacggaaaggtcaaaggcaacagtacggtaaaaagtatttgtactcgcatagagcaattaagaaaagatcgaggttctgcttttaacttagagtaccaaagtgccttgaccaaagccgcccttggtaatgaaaaattagattcagaagaaaaagaatatgtgaagctgaagcaggatgtttcgttgactgcggcttttattggggagcagttgggactgtcagacgaacaaagaacaaaatttgcgaatcccttctctttagcacaactttatacaattatcgagacagaaagatcgggctttaccaaaatcactactgctgctttattggaaaacgcgtggagattaacgtttaaaaatggtgccgcccaatgcggaccactacccgctgactcagtaagaccgtttgacgggtatatgagaagagttttagagagaaatgctcgcgaagtaggtaaacgtctgatagaaaaaatcaagagggacactcaagatcaaggcgccgagatagtagtaccgattttagttgaagagaataaattcaattttacggcctccttgctggaacttaaacggttagagttatcggattcaagacttaaaaagaaacaagaaaagatcgaaaaagccggagaggctcagaaaaagaaatggctctctaaagaagaaagaatcaaagatgatgctaagggaatctgtgcgtacacaggtgcgcctctaaatagcgaaggggaagtagaccatattattcccagaagcaaaactatcaaaaattattcttcaatttttaattctgaagttaatctcattttcgtatccagacagggaaatgcggctaaaaaggaaaatctctacttccttaaacaactcaattccgcttatttaactgcagttttcggaacatctgatttttccactattgagagcaagatagaatcaactgttcaacagctaatcgaaaacaaacgactcggatatctagatttgttaagccaagaggaaaggaattgtgtacgccacgctctatttctaaatcctggaagcgatgccagaaaagaggtgctctcagttttgggagctcgcagaaaaacagtagttaatggttcccaagcttggtttatacgaactcttagaagctacttagaaaatggcttgcagaattggctaacagagaccggcaacaagttatcttttgatgcattttcgattcccgctgtcactgtgagctcgttgcgttcacagctgggagagcttgaaaactccatgtttaaagaagacattcaatccgtctcctctcacagcgttgatgcgatgtgcgtttatgcagccgcatgtggagatgcgagtgcagaatgtgtcctccatggggacgctctgctagccgattcacatagtatgagagccgcccaacttcttaaaaagttatatcctgaaacgtgtcaagtggttcagatatctccaaaatctttttctcaaaaagatcgaattaataattcggctatctttaaagacactatatatgcagaaagatttttgaatatttataaaaagaaggaggaggtttttgttggatttgataacgataaaaaaagctctaatgaaaaagagagtctgactcaggtcaagggtaagaatcctcatctcttgttacagattcttgaaccgttctttgaaaaaaggaacgagagtaaagacgaaggcacttaccgcattgacaaaactaaagctttccagttgatgggcaaagccggttgtgctttattatctaacgatgaatcaaggcagcttagtcttctgaatcagcttcattacactactttgaagcaagaggtattgacagaattggtagatacggcctctaaaaaaattaaattgaagtcgaaatatcaatctaacttcaagagagaatttttgcttaaattggagctgagagacagagaaagacaattttcagcaaaaggaaatattgtctatccctcttataagagatggcaagaactatcagaggaattgagtaatttcctgactgcttgcccagaaggaggattggaagaagtaaatgccaggttatcttctttatggacaacatcggaaaagagcagtgtaagacataaaaaagttaaaagatctatgagcttacccatgctagcaagtcaatcgggtgcagtgcgtataagaagaaaagactttcgagatgggtacgtttaccaatcaattgatgcaaatcagctttattatggtttttctaagaaggacggcaagattttatttaattctccgctaccacatcctcgattaacaaccaaaaatctaaaaatttatgaataccagtatcagcctgttaacgagtgtgtaaaaatggacgagtggaagaccgtttatgaaaaagaaggagtaatagtcgagcacgcacccggcacgaaagcccgccgatacattagagccacgctaccgtttgatctttatctattgtgggataaagaactgcaaaaagccaaagataaaagttccttaactcttccaagtaaagtcatacgtgagacaaaagatttttttgaggagggcatttataagaacgaagaactggcacagttcttcccaaaacctagggagaataataagaaatttacgatgaatattgagctagttggaagtacggttaagttctcttacgtgactgcataagctatgagacatcttacaatttcctccgtaggaagctttgtaggcctgaagggaaatttgcttgtagttaaagaagacaaccgagtcatttatgaagctccactctcgcgattaagaactgtgaggttggagcgacacattgcgttgtcttctgatcttgttttagcctgtgcggctcggggaattaaacttgtgtttcttgattggagaggtgtaggggtcagcgaactatctggaacgtaccaacatgctgttgtcaaagtacgaaagagtcaattcgattttattaattcagaaaacagttgctccctagcacaagaagttataaagacaaaaatcaagaatcaacgtgcggtattactctatttcagcaagtatttatgcaaaaaaggactacctgctggtaaattgctgaaggataaagctgatgacattaatcctcttctaaacgctatcagttctatcaacacaaaagagacagaatggagagacaggcttctaggtattgagggccgagtttctgtccactactggcaagctcttcgggatactcatcttcttccttcaacatttactaatcgagagggcagaggagcacaagagataacaaatgcagctctcaactacgcctacgcaattctacaaagctatgtgcattctgctctggccaacgccgggttggagctgtatgccggatttttgcatgtcgatcgacctggcaaaccgtcgctagctctcgatctgatggaagaatatagggcttgggttgtggatcggacgattataaaaatgaaatcctgtttagaaaaaggtgaagatgagaatcgacagcttttggataaaaatttaaagaagcaaatttcagacaatattgacgcggtaatgtctggattggtgctatacaaagggaaaaaatgccgcttagaaaatgtcctacagcgacaggtttaccggctttgcgcaacgtttgtgggtcagaaaagatataaagggttaactttcaagtggtgaggaagaaatgtatgtaaattatttggtctgctatgacgtttctgacagcacgagaaggaagaagttttcggattctctaaaagagttgggtttggtaccactgcaaaaatcagtcttctatggaggtcttaacccgccagaggctcgaagtttagaggttctcgcaagaaaagttttattggacgaagaggacaggtgcttgtggttcccttgccacttagatataaataaagtacgggcctgtttgggatatagagattttcaatatgttgaagccgacggatatcttttcctttgaagacagtattcccatttctttaattcggcaatattgtttttgtccaagaataccttttttctatctcgtttatggcatcagccccgaactaaaaccatgggttgaggaaggactgagctttcatgagaggatgtcggttttgcagagacgtcgaaatctttcttcagttcgctttgatgagggaaggtttgtaccccatgtagacgttaaaagtgaacttcttaagtttcacggcagagtggacggggtctttttcttcaactcgggagatatttgcccgatcgagtttaaattggctgaaaaagaagaaataaggagagctcatgtgctccagctctcagcttatgcgcttgcactggaagaaaaatattgtaaatctatacaacaaggcttcttggttttagggaaaaagggcaaagtatttggcataaggattgatgagcagaaaagagaagatgtaaagaagtgcttagagtacatcaaagcctcccttgttgcaggtctattacctgagagcagtgcaagtgagaggcaatgttgccaatgcgaatatttaaacttctgtgcagatagattttaggggtttccctggttccaatatttagaggacaataggagactttgtaaaatcgaaataaacccccttttcccatttatttagccctcttaaattctctcgggaaagtattatgacaacctatggataggcgacaagtctgcgcattcaggctatccaagtttcagttgaaggatgtaagtttgtacaattgaaacccacaagaggtgcgctgtctgggccgggatgggcttgtttcagttgaaggatgtaagtttgtacaattgaaactgtgactacagaatttactgggtgccgttcaatcgtttcagttgaaggatgtaagtttgtacaattgaaacatgtcagcggtctaaatatccacattgatgaatggtttcagttgaaggatgtaagtttgtacaattgaaacttatcgtggcgtgatagatggactaacatcgtttatgtttcagttgaaggatgtaagtttgtacaattgaaacggtaaattggcaacgaatagaactgagagatactgtttcagttgaaggatgtaagtttgtacaattgaaaccaaacagtattcagcggttaggaatggaccaaaagtttcagttgaaggatgtaagtttgtacaattgaaacaaacgaggagtcgaatacgagcgctgttatgacttgtttcagttgaaggatgtaagtttgtacaattgaaactttattatttgttgttgtaatcaactaactctatagtttcagttgaaggatgtaagtttgtacaattgaaactcccacaggcgttaatttgaattcttctatttctcgtttcagttgaaggatgtaagtttgtacaattgaaaccctcagctaatgctatgaaatctaacaattttattttgtgttagctgaggattttttcgaaacacttcaaactgcacaaaaagtgccgaatttttcgaaaattttgatttttggatgaatttacccacccatttttcaatcaaaaaatctaatttattttggttcggttgattcttcgtttctagaaatgtcaactccttgtgcagtctttcgtcttttaactacctagatttccgttttacctaatgctggtagaccagttcttaaatttttcgaaacaaaaatctcgtcaactcaatcaaaacagagtttgttcataacggctttactgttgttgataatcgttcttatttgcaatataatcagcgaattgaataacggagattccgatgcctcacgcaaatttaactcaagttttattgtgcgatgtacctgtgaatcaggtgtgcactttggtcaaatggggagccttggacgaaccaacggttcaacgtttgaatcaaacaggtatccttctcggtgtcactatccgagttgcagaacaaaccatctcaggtcctgtcgtagtcgtattaaatgattcaagacttgccattggcacggaaatcgctaaagagcttaaagttgtcttgggagaaagaaatgcttcttaaaaatatgcatcccggagaaaaaggtcagatcgtttcttttaaaagaggtttgcctgaatacagaaaaagattgcttgccttgggcgctttgcccggcacagatttcgaagtcactagagtggctcctcttggcgaccctgttgaaatcaaactgagaggttcatacatcagtgtccgaaagggcgaaatcgaaattttggacgttaaacccatttaagtactaaatgcctataaaaaatactatttgcgtggtcggtaacccaaactgtggtaagaccacgctctttaatggtctgacaggttcgaatcaaatcgtcggaaactggcccggagtcaccgtagagaaaaaaagcggtgactttgtttataagaaccgtcacatcacaattgtcgacctgcctggcatctattctttacagccgagctccgccgcaagcatcgatgaaaaagtcgcgcgtgattacatcctccaaaacgaagcggaattggttgttaatatcgttgacgccagtaatctggaaagaaatctttatctaacggcacagcttattgaaatgcgtgttccaatgattgtagttgtgaacatgctcgacgtcgctgccgctcataagattgaaattaatattgagaaccttcaaagagatttgaactgtaaggttgtcggtatcgttgcttcgaaagaagaaggtcttaaagagttgtgtgaagctatcgatgaacagctcgatgaccttaaaactcctcctaatccaattgcgttccatcctgatatcacggaagccattaagcaaattggcgctttactggcgaagcagaatgttgagaaacctcagtgggttgcagagcagcttcttgaaggggacgaagaacttctcactcgtcttcatggcgttgacttaacagaagctaaaaagattatcgatgctcttaacgagaaataccaaggtgacttagatatcgcgatggccgatgctcgttacagctttgtatctgaagtcgcggccgactgcatcatcagaaaaggcgaagttaatcagagcactactgaaaaaatcgataagttcgttcttaaccgttggctcggtattccgttcttcctgtttgtgatgtatctgatgtttgttttctcaatcaacatcggctctgcatttattgatttctttgacatccttttcggcgcaatctttgtagaaggttttggaaatcttcttacttcctggggaacgccggattggttaaagacaattttggctgacggtattggcggtggtattcaaactgtttctacttttattccggtaattgcttgtttgttcttgagtttgtccttcttggaagactccggctatatggcccgagctgcttttgtgatggaccgcttgatgagaacgttgggcttgccggggaaatcctttgttccattgattgttggctttggctgcagcgttcctgcgatcatgggcgctagaacgatggaaaagagatccgacagaattactacagtcctcatggctccgtttatgagctgcggtgcgagactgccggtttatgttctctttgcaacagctttttggccgttgggaggacaaaacttagttttctctctttacctgattggtattgttgttgccatcatcaccggctttgtactcaaacgtaccgctttgaaaggtgcacctacagccttcgtcatggagattcctccttaccatttacctacaatcaagacattggcctaccgtacatgggatagattaaagagctttattctcaaggcgggtcagctgattgttattattgttgcggttttggctttcttgaactctttaggcactgacggttcgtttggcaacgaggatacagacaagtctgtactttccaatatcggtaagacaatcgttccggcatttgaaccaatgggtatgcagcaagataactggcctgctgccgtaggtatctttaccggcattcttgcaaaagaagctgtagtcggcacactggattctttatattccggcatgggaactcgttctgctcgaggtgacgacagtgaagttaacactgttaaagaaccttcgcctgcagtagaggaagaggaaaaagaattcagtatctgggaatccacaaaagaagcttttgccacaattccggaaaatctttcaaagcttggagatttcttagttgatcctctgggtgtcaatgtagaaaaagatctgactgacgttgatgagcaggctgcagagcaagaagttggcgttggtaccatccacaatatgaagaagctttttgacggagatttaggcgctttcgcttatctcgttatggttcttctttatatcccatgctgtgcttccattggtgcaatgtatcgtgaaatcggcgctaaatggaccatctttgcagcattctggacttcagctctgggctatggctctgccacattgatctatcagattggacgttttggcaatcacccggtctattcttccgtgtgtattgctgccgtctgcttagtgttcatttttacctttgcctatctgagaaaagaaggtaaaggtccggtgatggagtaaaagctaatgacattaagcgaacttaaaatcttggtgcaggagcggggacagatttctctgaaagaactctccctccacttcgggtctgatgagtctgctattgaagccatgatggatcgttggatccaaaaaggacttgttaagaaggttgagccaacaaaagctcaatgttcaggatgcgccttttgcggagatgacgcacgttttcattacgaatggattggacctagagtagtgaaatttgtgaataaataaccgagtttcaaattaatcctccaaaaaaatcggttgctcaaatgacataaggttgagcagccgatttgtattaaaacagcaaagaagttctagatcttgctttcaggcaaggtaactgtgtatgggaaatcaatgaccttgacggattctcctttaacggtgaagtcagaatcaagataatcagccctgataacaaagaggaaagtattgccaacgcattggataacacgtcccatcggttcgttaatcatgaaaacttctgtcccttcatctacgttttcgatgttggcctgaccaagaagcatgcggcgttttacacggccgagatgctgagtcttggcaacgacttcttgtcctgtgtagcagcctttattaaaggaaatagcaccaatcaaatccaagttcaggaactgtggaagccactctaagctttcagccttgtcaatcaaggcgacaccttcttccatgagtgctttaggaagcatattttcttcggtcttgtctgattccatcatgtcaggcagtttgccaaaagccacgaacttggcggaaaagccgtcggctgctttgctgggaagacgtactacggttactgactttccgcggtaagccttcatcggttctgctggaatagcggggcagacggtaattttttcagagtctttttcttttgttgcgaagaaagtgatgggaacagactcgatggcgatggtgactttacttctaagaataaacttagagagtctttgaacttctgtctcagcaatagagacaggcatcatcaaaccgaatccgttgggaattctgaaaattaaagaggaagaagcaacacggccttgatgattgcagctggccgtccattttgcttcgtcttctttaaagtgatgaacatcttgggttaattggccctgaagaaacgattcagcatcgtccccggtgacagagactaaacggtagttaggttcattgctgaatgtccataaatcagaactagacatagtcataattttctccatttctagattttgctaggttacctgccaggcaatgtattgaatggcattgctaaacaaattaggcaacgaaggttttaaagattgtatctaatgttatgagaagctcaagaccttaacggaattcaatctcataagtaaaattattagctccaaaaactaaagtcggaaagagtttgtataggtaaacttgaacttttgaacaaaaagactgtaggagatgacattgctcaagataattaagtattttgcacttgccgccgcagctgcggcagccctcgctgtctgctatggttactggtatgttcaggatcggattgtgccttttccggagggacaacaagaattagtattaaaagttcataagggagataccacaagaatcattgtgagagaaatgcagtcggaagggcttgatgtgcatcctgacatatctgctttagcttttaagctgttagatgcagataaaaatattcatgtcggccggtacctgattcctaaaggttggactcttaatgaaatcattgctcatcttaaaagcggcaaggtgattatgagcaagatcaccttcattgaaggaacggaaactaagaaaattgtagataaggtcaattctgatactaacttagaacagaattctgagccgattactatggagaatgtaatgaaggtggtcggggcacctgaaaatacacatcccgaaggtcagtttgcgccagatacatttgtatttgccgccggctcttctgctaattctattcttaaacaatcttataacgaacagcaaaagagactcaaaaaagtttggaactctcgcgatccttccattgcggtaaagaatccttatgaattattgattcttgcaagtattatcgaaaaagagacggggcatccggaggacagaaatctggtcgccagcgtgtttaataatcgtctgaagaaaaatatgctgttgcagacagacccgacggttatttatggaacgaaagactatcaaggaaagatccttcgctcccatttagcagccgatcatccttacaacacttatattcacccgggacttcctccaactcctattgctaatccgagcttggcttctttagaggccgctgcacaccctgcggacaccaaatatttatactttgtggccaaaggtgaaggaaaatcttatttttctcaaactttacgggagcataatgcggccgtacagaaatatttaagaagcaaaggaaagtaatcgtgagtgcaaaaccaagaggacgttttatcacagtagaaggcgtggacggtgcaggtaaaagcagtcaaatcgatgtgatagcacaagcgattcgggacagaggaattgacttggttatcacgagagagccgggaggaactccgacagcagaaaaaataagagaaattctcctgcacgatgaaatgtctccgaagtgcgaaatgcttcttatgtttgcttctcgtcaagagaatttagacaaggtcgttaagccggcaattgctgaagggaagtgggtactatgcgatcgctttaccgacgcttcttatgcttaccaggcctatgggcgtaatcagcccaaagaatgggtagatttgttagctgactttgtccattcagatatttctcccgacagaacggttttgttcgatattgacaccgaaattgctgcagcaagacttcaaagaaaacttgatcgtttcgaagctgaagagaaagactttcatagaagggtccgtgaaggctacctgactctggcaagaaacgaaccggaaagatttttagttattgattcttcacagccaaaggacgaaataagcgctttcttaaaagaggagttttctaaatggggttagctccttatccctggctccagaagcctgcagagttattggagtccttcacaaagaagctcccgagttcgattcttattcacggtcccagaggcagcggaacgtatgagcttggagaagcatttgctaaattaatcttatgtagttctccagtagacgggcatgcctgtgggcaatgcgcagaatgtaagttaattgaagcgggtaaccaccctgatttcaaactgcttctctcagaagcggaggaagcgatccatccgttgccatggcaaaaagaagctaagccggtcacgggcaagaaaactatatccagaacgatttccatcgaacagatccgtgctttaagcgactttatcggaatcagttctcatcgaggaggccgaagagttgttttggtttatccggctgataccatgatggctgatcaaagttcagctcttcttaaaactctggaagagccgcctccaagcatggtttttattctagtgtcagacaacttggataggatgctgccgacgattcgatcaagatgtcagcttgtgcgagttgcacctccgacacaggagcaaggagttcaatttttaaaagaaaagggtgtcgaaaatcccgtcgaggaactagctaagcttggcggaatgcctttactttattttgagcaagatcagaaactgcgcctagatccggaaaaagaagaaaaacttctagacctattggcaaaaggacctgctctggatgcccgaagcataattgatctttcttcggcggaatattctctggtgcctttaactacgcttctgcaaagatggtgtaatgatctggttttagtctctcaaggacttcaaccgcgttatttcttaagaagagcaaatcaaacaaaatctatagcgtcttcagttaatctcaaaaaactgtatgcattttgggat

SEQ ID NO: 137 - DNA, 10317 bp, synthetic construct
  source 1..10317: mol_type = other DNA
  misc_feature 1..10317: note = Synthetic
ggatcgtatgcatcctgagctttcttataaagttcagtgatttgcgcagcggtcggttctttatctccaagattcttcttaattagctggttaacatatacgcgctgcttaagagcttcgatttcttccttaacttgcggaagctgatcaattttttgcttttttgcttcttgggcgataaccagctgctcaataataagattctttgccaaagcttcttgctgtttgacgtcagttactccgcggcggcaatctgtcccatgagatctttctgagtctttgcagatacagtctgcccgttaacggaaaatgctgtttgagctaaggtaactgagccgagtgatgccaacgcgatggcaagaagtgtttttttcattttaattagtcctgttaagaaactggtttagtgtctagactcgcttggcgctaatagcgtcatagttatgttgtgaatgccatgtccgataaatggtttgaggtattcaaagacaaggcggtgacgttcaatttttgggaggccttcaaaccgtctggaaatcacaaataagtgataaagacccgaagcgggctgcgggttgcctggaataaactgattggaaaaacgaagctcaatcggaaacaaaggttcaagagcgtttgaaattcgttctaatgatggagtgtggctcactgttcttttcctttagttttattttcagagataaaaggagcgatataaaaaccaataccgagcgtgaacagaagggtcagacccataagcccgaagagcttaaagttgacccagaaatctgtggagcaggtataggccacgatgagatttaaaacgccaaccactgaaaaaaagccgatccaagacagaaggagctttctccaagcaggggcaggaagttcgagctgtttttccgagcaatgacttgataaagttgcgcccagtcagcattccgaagaccaggataagcgcaaaaacccaataaaggattgtcggcttccacttaatgaacatctcgtcatgaagccatatagtcaaagatccgaataccaaaatgatggcaacagaaatccacagcatgggttccacttttttgccgctaaccaaattaaatacgatttgcagaagagagacgaggattgccgccgccgtggcgcagatgataggggcctgcgaagcatcaaatccgttgccaagccaagaattgcaaaggctagcagcatagtctgggttgccttgtgcaactttgaaagtgacaaagaataagatgaccggaaggaggtcataaaaaaacttcacgtgtttagctcctacagacgttgatttagctagattttacaaaaaaagcaattatttgttaaattgtcgtaaatacctctcttaaaatcttaagaaaatattagacaacaccataaaaaacaatcaaaatctctttatatcctttggagctcaatgggtttgatgagagtaaccaaataatacaaaaaagatttaaatgaattgaaaatcttagggtttgttaaggataaagggatatccttatcgtatctttaattagagtattatagcgcgatgaaaacaataaaaaaattagctgtggccgcttgtgtcggtgcctcgctgatttcgatgaataacgaaacaaaaatgattccggaagttagagcagaagtcgttaaaccttccatagtccttcctgccggagtgactcagggcccgaccgttgaaggtatcacagagtatcgtttggccaatggcttacgagtagttttattttccgatccttccaagcctactgccacagtcaatatgacttacttggttggttcccgtcaagaaaattatggcgaaacgggaatggctcacttgcttgagcatctcatcttcaaaggtagtaaaaattttccggctccaacaaaagaattcactcgccgcggattccgtatgaacggttccacttggtttgaccgtactaattattacgtttctttctcttcaactgaagacaatttgaaatgggctttggcttggagtgccgatgccatgcgcaactctttcattgctaagaaagatttagacagtgaaatgagcgttgttcgcaatgaatacgaaatgggagaaaactctccgaccagcgtcatgatgaagcgtatgcagtccatgatttttgactggcataactacggaaagagcaccatcggcaacaagagcgatattgagaacgtcagaatcgaaaaccttcaagacttctatcaccgctattatcgtcccgataatgccgtactcacggtaagcggaaagttcgatatccaaaaaactctcaactggattgcggaagacttcggaaagattgagaatccggctgagactctgcctccggagtggacagttgagccgacagccgacggcgaacgctcctttgaaatcagaagaaaaggggaatctcagttagttgcggttgcctaccgcattccaagcgctttgcacgctgattctccggcagtcgaaactgcagtagacattctgagcgacgatcctaatggacgtctttaccaaaacttggttaaaaccggtttggcaactaaagtttttggttccgttatggggactaaacagcctggttatgtaatttttatggctgtcgtcaaaaagggcgaaccaatcgagccggttagaaaagctttaatcgagacaattgaaacttctttagaaaaaactccgatctcctctaaggagctggatagaacaaagattgaagctgaaaacttgtatgaagttctcttctctgatcctgaagcttttggcgttggattatctgagtttattgccttaggtgattggagactcttcttctacggacgcgaccaaattcagaaggtgactgctaaggaagctgaaaatgcagcttctaaatactttgtcagagacaaccgagttgtcggcgttttcctgcctgaagataatcctaagagagccacgattccggcttctccaacggctgagcagcttttagtgaattacacacctaagcaagactcagcagaagcagaaacattcgattcttcttttgctaatttagacaagagaactatcaaatttaatgtgggtgacctgaaggttgctctgcttcctaagaagaaccgaggagaaaccgtcacggtaatgctgaagtttgactacggtaatctcgagaatctctctggaaaagaaactgccatgacattagctaatgccatgctgacttatggtaccgacaagctttccagaggagaaatcgaagacgagatgtctaaattaaagatgactggctcgatttctaattacgtcactacaagatctaatctggatgcttctttgaactttgttgccgatctctggaagcattccgtttatccggaaaacgaatttaaagatctgaagaagaaactgaccgtcatgttcgaaagcatgaaggacaaaccggatgctttaagtgacgatgcgatggctcagcacttcaacacctatccgaaaggagatcctcgccattctccttctttggcagaaaagattgcagcattaaatgctttgtccgatgctgatgtcaaggcctttgccaaggagtacttcggaacagctcgcggagagattgcaattgtcggcgattttgatgcaaagaaagccgaagaaacaattaagaaagcttttgctgacaacaagagtcaagtagcgttcggcaagatttataaagagttcaagcctgttgcagccactcgaatcaccatcgatactcctgaaaaagaaaatgcagttttagcgggaagagctgtatttccaattaaagacaccgatgctgatgctccagccctgatgattgctaactggatcttaggtgggggtaccggtttgtctaacagactcattgaccgtctgcgtcaaaaagagggcttatcttacggggctggctctggggtgaagattccggctgaaggtaatgaaggcgcatttgttttcagagctatcgtagctcctcaaaatcttttgaaggctgaagccagcgcaaaagatgtgattgagacagccgtaagagacggctttactgatcaggaagttgcagaggctaagaagggatttttacagagccaagccgttgctcgtgctcaggatcgtgtcatttctgccagctggatcaaaaagcttgagctcaatagagactggaaatttaacaaggaaatggaagacaagatcaatgcattaactactgctcaggtcaatgcagtcctgaagaagtatattaagcctgatcaaattacttacgttcttgcaggtgatttgaaaaaaactaaaacggaagggcaaaaataaattagtgcgggggagttgaaaaattcttaactttcccgtactatgtacataacaaacttacatctttcagaagccgctttttgcgggctgaaatcaacgaaattaagttgtggctccggcctctgggttaaccatccggagtttttcattttccgattatcatttcgcatgtcctgtgcttgcacttctgtgatttcaactcttgctcctgttagctgccgtaaatttgcttagctttctcgactctttgttttctttttcttagaaaatccctgaaaaacagttagttgcgttttgctcacctttgactgaggtctcccttagaaaattagtgtcaatctgttaaaaataggggataatcggtaaagcaaaagaagaatttatttgtagtgatttgatcctgggggagcttttcttttttctctccgacagatgtcgctatataaaactcataacaaggagaaaaaatggaatcttctaagtatattttccctgtgggaatcgatatgggcgcaaagtataccggcgtcttcatgctttctcatctcgacggcgttctccctactgctgccgatgcaacagcaatgacgattgtgaactccgataagattcactactctatgaaacatagaactgcggtgcggcacagagtccgatcaaaaaagagatttgttctggctcgtagactgcttaatcttattgttgaccatcagctaatgaaagcaggttttgtccttagcgctcaggaaaagtctcagctgacagaagctttgtcaggatatttaaagagaagaggctattcacgaatcgagacagaaatcgaccttgatagcttgaatgatgtagatccgattgtttttgccatgtgccccgggtttgaagatttctttagttcagatattgaacttttaactcagtggaactctctcacagctgatttgtccgaagtaaataaaataaattcaaataaaaaaattccggatgtaaaaacctttaaaaaatacgtcaaggataattttcctgactacagttcaaaagaaagtctagaaagatatcttgaagcgagaaaaacaattattgaggcagctcgacaaatttctgagttaacttctctaggccatctgcacagagaaaagtatttagataatattcttcacgatatgggccgcgattctcggctgaaaaaaattggagaagctttcgggggcatatgccggttttggaacttgatagggaatttatcaaatctccagctgagagcgcttcgctggtattttaacgatccttggatcgagaaagttaagcctgtggagactgaaaactctcagcccttgaatgagcaaaaactcaaggatatctgggttagagcttataagtactttcatccggatcctgaaaacaaggcaagaatttcagacgtgattagagctctttccaaggccgatgacataattgactgcttgtgtgaattagattgcaagagcacaattccgccgtatgaggaccaaaataatcgcagacctcctcttgactacactctttaccttaacccagctaagctcactgaggtctacggcgactcatggaggagttgggcttctcgtttggttaacgcagattctgatttgcaagacaatttagatgttattttgcagaatcgtgatagaaaatccaggagaacaactcaagactctttggattttcgactttcttacattcttcaaagagctttagaccgctccaaggtaaatgatattttcgaaataagaaagatactttcgagccctacactttattctgaagctgctacaagaaatttgctgttgtttaagacattggaagagcaaaattttggaccatttttggacttcgccagaagatatttctacgaagtagcaaaggcacagaaagggttgtggaatgagaaagaatctattctggaaagatctgatttgcatccaaaacagaagaaaaaagttttagatcgtcttgtagctaatgtcctaagagttgacgaagagacagcaaaaagatttattgctgacgtttggaacggaaaggtcaaaggcaacagtacggtaaaaagtatttgtactcgcatagagcaattaagaaaagatcgaggttctgcttttaacttagagtaccaaagtgccttgaccaaagccgcccttggtaatgaaaaattagattcagaagaaaaagaatatgtgaagctgaagcaggatgtttcgttgactgcggcttttattggggagcagttgggactgtcagacgaacaaagaacaaaatttgcgaatcccttctctttagcacaactttatacaattatcgagacagaaagatcgggctttaccaaaatcactactgctgctttattggaaaacgcgtggagattaacgtttaaaaatggtgccgcccaatgcggaccactacccgctgactcagtaagaccgtttgacgggtatatgagaagagttttagagagaaatgctcgcgaagtaggtaaacgtctgatagaaaaaatcaagagggacactcaagatcaaggcgccgagatagtagtaccgattttagttgaagagaataaattcaattttacggcctccttgctggaacttaaacggttagagttatcggattcaagacttaaaaagaaacaagaaaagatcgaaaaagccggagaggctcagaaaaagaaatggctctctaaagaagaaagaatcaaagatgatgctaagggaatctgtgcgtacacaggtgcgcctctaaatagcgaaggggaagtagaccatattattcccagaagcaaaactatcaaaaattattcttcaatttttaattctgaagttaatctcattttcgtatccagacagggaaatgcggctaaaaaggaaaatctctacttccttaaacaactcaattccgcttatttaactgcagttttcggaacatctgatttttccactattgagagcaagatagaatcaactgttcaacagctaatcgaaaacaaacgactcggatatctagatttgttaagccaagaggaaaggaattgtgtacgccacgctctatttctaaatcctggaagcgatgccagaaaagaggtgctctcagttttgggagctcgcagaaaaacagtagttaatggttcccaagcttggtttatacgaactcttagaagctacttagaaaatggcttgcagaattggctaacagagaccggcaacaagttatcttttgatgcattttcgattcccgctgtcactgtgagctcgttgcgttcacagctgggagagcttgaaaactccatgtttaaagaagacattcaatccgtctcctctcacagcgttgatgcgatgtgcgtttatgcagccgcatgtggagatgcgagtgcagaatgtgtcctccatggggacgctctgctagccgattcacatagtatgagagccgcccaacttcttaaaaagttatatcctgaaacgtgtcaagtggttcagatatctccaaaatctttttctcaaaaagatcgaattaataattcggctatctttaaagacactatatatgcagaaagatttttgaatatttataaaaagaaggaggaggtttttgttggatttgataacgataaaaaaggctctaatgaaaaagagagtctgactcaggtcaagggtaagaatcctcatctcttgttacagattcttgaaccgttctttgaaaaaaggaacgagagtaaagacgaaggcacttaccgcattgacaaaactaaagctttccagttgatgggcaaagccggttgtgctttattatctaacgatgaatcaaggcagcttagtcttctgaatcagcttcattacactactttgaagcaagaggtattgacagaattggtagatacggcctctaaaaaaaattaaattgaagtcgaaatatcaatctaacttcaagagagaatttttgcttaaattggagctgagagacagagaaagacaattttcagcaaaaggaaatattgtctatccctcttataagagatggcaagaactatcagaggaattgagtaatttcctgactgcttgcccagaaggaggattggaagaagtaaatgccaggttatcttctttatggacaacatcggaaaagagcagtgtaagacataaaaaagttaaaagatctatgagcttacccatgctagcaagtcaatcgggtgcagtgcgtataagaagaaaagactttcgagatgggtacgtttaccaatcaattgatgcaaatcagctttattatggtttttctaagaaggacggcaagattttatttaattctccgctaccacatcctcgattaacaaccaaaaatctaaaaatttatgaataccagtatcagcctgttaacgagtgtgtaaaaatggacgagtggaagaccgtttatgaaaaagaaggagtaatagtcgagcacgcacccggcacgaaagcccgccgatacattagagccacgctaccgtttgatctttatctattgtgggataaagaactgcaaaaagccaaagataaaagttccttaactcttccaagtaaagtcatacgtgagacaaaagatttttttgaggagggcatttataagaacgaagaactggcacagttcttcccaaaacctagggagaataataagaaatttacgatgaatattgagctagttggaagtacggttaagttctcttacgtgactgcataagctatgagacatcttacaatttcctccgtaggaagctttgtaggcctgaagggaaatttgcttgtagttaaagaagacaaccgagtcatttatgaagctccactctcgcgattaagaactgtgaggttggagcgacacattgcgttgtcttctgatcttgttttagcctgtgcggctcggggaattaaacttgtgtttcttgattggagaggtgtaggggtcagcgaactatctggaacgtaccaacatgctgttgtcaaagtacgaaagagtcaattcgattttattaattcagaaaacagttgctccctagcacaagaagttataaagacaaaaatcaagaatcaacgtgcggtattactctatttcagcaagtatttatgcaaaaaaggactacctgctggtaaattgctgaaggataaagctgatgacattaatcctcttctaaacgctatcagttctatcaacacaaaagagacagaatggagagacaggcttctaggtattgagggccgagtttctgtccactactggcaagctcttcgggatactcatcttcttccttcaacatttactaatcgagagggcagaggagcacaagagataacaaatgcagctctcaactacgcctacgcaattctacaaagctatgtgcattctgctctggccaacgccgggttggagctgtatgccggatttttgcatgtcgatcgacctggcaaaccgtcgctagctctcgatctgatggaagaatatagggcttgggttgtggatcggacgattataaaaatgaaatcctgtttagaaaaaggtgaagatgagaatcgacagcttttggataaaaatttaaagaagcaaatttcagacaatattgacgcggtaatgtctggattggtgctatacaaagggaaaaaatgccgcttagaaaatgtcctacagcgacaggtttaccggctttgcgcaacgtttgtgggtcagaaaagatataaagggttaactttcaagtggtgaggaagaaatgtatgtaaattatttggtctgctatgacgtttctgacagcacgagaaggaagaagttttcggattctctaaaaagagttgggtttggtaccactgcaaaaatcagtcttctatggaggtcttaacccgccagaggctcgaagtttagaggttctcgcaagaaaagttttattggacgaagaggacaggtgcttgtggttcccttgccacttagatataaataaagta

SEQ ID NO: 138 - DNA, 20597 bp, synthetic construct
  source 1..20597: mol_type = other DNA
  misc_feature 1..20597: note = Synthetic
gccgcgctctggggcaccgtcggaacggctcagaccttcatcgtcggagggctggcccccgcctgggtgggagcgttgcgtctcattttcgcttcggtctttttcgggcttctgcttctctctgcgggccgcacgcgagacgaccgcgtgccggccgagcgctttcctttcggtctcgcgctctttgcagggcttgccatggggttttacaacctcgccttctttgcgggcgtcaaagccgcgggtattgccgtcggcaccgcggccgtgatcgggagcgcccccgtttgggcgggactgctggagaccgtcgtattcaaaaagcggccgcccctcttgtggtgtgcggggacggtcgtagccgtcgcctcggggacgcttctcgcgctctcggggacgagcggcacggagctcgatctcggggcgctcggcctttgccttctcgcgggcttcatgtacgcctcctacacgcttctttcgaagtcgctcgtgcgacgcacgacgccgttgcgcgcaacaagcgcgacgtttctctttgcgatgcttgtggcgcttcccgccgcatttctcatctcgggcctgcccgacatgcttcccgccgacctgcgtgtggtcgcctacctcggtctcgtgacgacgggcggcgcctacctcctctttacgacgggtctcaaaggcatccgcgcgtcaacgggcgtcgcgctctcgctcgtcgaacccgtgaccgcttttcttcttgccgttacggtggcgggcgaagccgtgagtctcacgggcgtcctcgcgctggcgggcattctggcgggacttgcgatcgtactcaaggcggacgcctgagagacgtcggacgcaagcccgacggagatcggacggacgcccgagcacggacccgactgggttttctcgtcctcccgccgggtcaccttttgagggcggaaagatcgaacggggccgccctcaatacgatttccgcccgcgcgatccggcgcacgagccgcagccgcttcacggcgggccaccaggaaaagagcagtcggtcgtacggattccaaagcgccacccaaccgagcacgagcatcccttcggaaatcgtcgaagtgaccgtcgggtagtcgggaaagtcggcaagccaccggacgatctggcacccgagcatgaagacgaacccccagaagcacgccgaccccacgcttcggagcgcctcgcgggcttctcgagcccgccgcgcgatgcgctccctgaagtaccgacccgccaacgcctgaaggagtgcttcgtcccccgggttcacggcttcgggcggcaggagcaaaacgatccgcacgggttccgtctcgggcaaccccgacacctcgtcttcgacatactcgacgatgtcttcgttcagatcgacgtacggaagcggcacgggcacggtcgtcgagaacgcgtccgccacgtccgcgagaaaaagccgcacctcccgcacgccgtcgggcatgcgctcgcccgcaccgtgttcgagcatgtattcgagcttctcgcgcgtgaggccgagtcgctcgtagacctcgcaatgctcgggaagttcggggagttcggggagttcggaaaaggcaggcgggatcgggcgcatcgggctacctcgaaggcttgaaaagcggatgagaaacgggcgtttttcctcatcatagcgcccggcgcgcctccgatttttcgccctttttccagcaactcgggtgttttccttagcttgacgggacccgagacgcccggatcgcaggcacaatggcgggatcccgtcggagattttcatgctgttcgaactgcgccaatcgcttcttctccttctcaccgccaccatttgggggctctctttcgtcgcccagtcggtcgggatggaccacgtcggtcctttcaccttcaccgcgtcccgcatggcgctcggtacgctcgttctccttccctgggtgtttctcgcccgccgtcgtctctcccgcaaccgccccgacacgtacgccgagcgcacgagtcccgcgtaccgcaaccgactcctgctcgggggctttctctgcggcctgtgcctttttgcgggcgaatctctccagcagttcggactcgttcacgacaccgaagtcggcaaagcgggtttcatcacggcgctctacatcgtgatcgtgcccattctcgggttctttctcggaaagcgcgtctccaagctcgtcctcgtcgcggtcgcgctttcgctcgtcggtctgtggtacctgtgcgtcccgcccgagggcttttcgatcgagctcggggactttttcatcttcctctgcgcctttgttttttcgctgcacatccttgtcatctcgcacttcgtgacgcgcgtcgacggggtggagcttgccgtcacgcagtttgctttcgggtcggtcatcgccggtctgatgatgttccttttcgaaacgccgaccgtcgaaggtctccggggagcccttgttccgattctctgggcgggcatcatgagcaacggccttgcgtataccctccagattgtcgggcaacgcggcatgaacgacaccgtcgcctcccttatcatgagtcttgaaagcgtcgtgtccgtgctcgccgggtgggcgattctcggcgaagtactttcgggacgcgaactcctcggttgcgctctgatggcgggcgccgtcgtactcgcgcagctcccgcaaccgaaaagcgccgggaaaccgcaatccgagtcgcgtctcggctcggatgcgacgaagggcgcctgacccgagagtcgccgacgctccttcgcaccttttccccctgcctctccggaggatacgatcatcatgtccgtaccgtccttactctttccgttcccgccgaaacgctcgagcgtgcgcgtgccgcctgcgagcgcgacggcaccgatcttgaaaccgaactccttcgtcgcatcgagctcatcgcctcgcgcgaccgcgaagtccactcgctcctcgttacgcccgacgccgccgaccgtttggccgaactcatgaaggatccggcctcgggcgggatcgaaccctcggccgcgcggatgttgcggcacctgaagtaagtcgatgcgctttcgttcgtacatcgcactcgcactgaccgcgacggcgatcgttccttttttagcctggagcgtgcttcagcgcggggacgtcgaccgtcgcattcttgaaagcgatgccgagcagtcccgcgcggcgcacgaggcggcgcgtctcgtcgaagagcgactcgaaacgctcgcgcagcttgcgcgctacgcggcccgctcggtcggcgaagcgacacgcaccgaaccgatgcccgcatcgtccgaaaagctcgaacgtttgcttcgcgacgtcgtcgaaggtttcccgacgctcgacaatctgcacgtcgaccgcatcgaagccgacgacgctcgcgttgcggccttttacccgccgcacgacccggacggccgagcgcttgtcggaaccgaccattcgacgcgatggcacgtcgccgcaaagcgccggggactggagggagtcgcattttcacccgttctcaaaagttctcaaaaccgcgaagccccgcccatcctcacctttgcggcggacgttccgggatcacccgagttgctgttgtcgggagccgtcgaactcgatgcgcttttgcgcgaaatcgaaagcacgctttcctcgcgcgggctgctgctcacggtacttacgcccgagcgccaaattgtttggcccgcttcgtccgcaccgcacgttcggacctggcccgaaatgcccgccgatcgcagtctgatcggtttgggctcggcacaacgcttcgtcaccgtagcccgtctccccgacgccgtctccggatggtcgatcgtcgtatcgaagcccgagagcctgcgctctgcggaacggcgccgcatcgagcgacggaccgctcttttggcaagcgccgtactgcttctcacgctctttgcgggctgggccgccggccgaccgctgcgtcgggcattccgccaactggaagaggatctcgacgcgcaaggcttcgggacggaacgcacgaccattcgacgcggccccgacgagttgcgccgcgtgcaacgcgtctatcgcgaggtgcgccgcgctcttgacgcgcgaaacgcggaactttccgcaaccgccgagcaacgcgcgcgcgaactcgaggccgaagagctgcttttccgatcggtcttcgacggcatcgccctgcctttcctgcttctcgatgccgactggagcccgcacctgcgaaaccgtgcggcaacgtctctgaccgaccgtgtggtcgaactcctcgttgccaaagcacgcgctcactggacttcgcccgagacggccgacacgacgacggtcgacgtgcgcgtcgaagacggccggctcgaaacctttgcgcttcacgtcttccccttctccgcgcgacgctcgacgctcgctgcgggctacgctctgctcgtcgaatcggtcaccgatcgcgaagctttgaagcgcatgaaggacgacctcctcgggatcgtggcgcacgaactcaaaacccccgtcaccgcgtgccggctgcaagtcgagcggctcgaaagcatgctcggcccccacgaagggttgcgcgcgctcgatcgagacctcgaccatttgcgccacatcgtccacgactggctctccgtcgcacgcatcgacggaggcacctttaccgtatacccgagcgtcgttcagctcggtcccattctgcgcaaagcccgacggctcgtacgcgcgagatacgacttcgacttttcggtttccgtcgacgaggaggcggagtgcatctttgcggacgcgagtgccctgaccgatgtgtttgtcaatctctttacgaatgcgtgccgttacgcgcgccccgacgaaaaacccgtcgttgaggtgacggctcgacgcgaggcgaattgcatcgtcatcgatgtttgcgaccggggtatcggcatcgcacccgaagaccttgagcgcattttcgaccgcttctatcaggtctctcaaggtacgcgacgacgcacgggcggtaccggcctgggccttgtgatttgtcgcgccgtttgcacagcacacggcggcacgctcgaagcctcttgcgccgggggcgtcacgcgctttacgcttcgactgccgcaacccgaagcttgacaaccgatcggtccgggtgaggcaccgctttcttacaacgacggattacgggcaggcgcggcttcgtcccgcacctcattcctcccccgtccgaagacgggggtttcccgagatgtttctatgaacaaacccctcatcctcgtggccgacgacgaaccgcgcattcgcgagttggttgccgagcatctcagggccgcaggctttgccgtgcgcgaagcctgcgacggcaaggccgccctcgagcttttccgagtcctccccgtgaaacccgacctcgtgctcctcgacctgatgatgcccgagatggacggacacgaagcgctcgcgcgtctgcgcgaaacaaccgacgtaccggtgatcatcctgacggcgcgcgatcttttcgacgacaaaaggcgcaccttcacgaccggggccgacgactacctcgtcaaacccttttcgcttccggaactggaactgcgcattcgggcgcttttgcgccgcagcggacacggtgccgatcgaagcgaggacagccgcatttccacgggcgacttccttctcgacgccgaacggtgtcgcatcgagtggcgcggcaactcggccgctctgaccggacgcgagttgcgacttctcacgccgctcgcgtcgcgcccgggaagcgtcgtacggtacgaggaactcctgcgagcaggatggcccgacgatccgtacgcggacacttcgcaccttcgcgtggcgatcgcacgacttcgaaaaaaaattgcgggtctcggcctgtcgcctcgcgtgctttcgtcgtactcgtcggtcgggtacctgctcggcgacctctccaactacgacgacgattacggcgacgacgactgaggctcccgaaatgcgcgttgcaatctttttgcaacaaaccgggattaccgtagggtttttccattcggagaaatcccatgcaaacctcccgtcgatccttcctcggccgggccgccgcgggcctcggccttgccggctccggctctcttctcgttccggccgctcaggctgccgaaagcgcgactcctgcatttgacgccgtttacgacatcatcgtcgtcggttcgggcatcagcggcacgatggccgcgcttgtggccgcccgttcgggcgccaagacgcttctcatcgaaaagctgaatcgcctcggcggcacgtcgcgctacagcgcgctcgacttctcctgcgtcggcagcgaccgtcagaaagccgaaggtatcgaagacacgcccgaagccatggtcgccgatatggcgaaagtggcgggaggtctcgccgaccgcgaacgcgccctcaacgtggcgcgcaataccgctcgcgctcagaaaatcatggccgagcatggcgtgaagtggaagaatcttcttaagctcggcggccactcggccaagcgctgcctcatcgccgaagggggcggtgccggcattttgcgcagcctctgggcgtcgttcgaacgctacccgaacctcaccgtcatgccttcgacgaagctcgacgagctgattatggacgacaccggcgtgacgggcgttgccgtgcgcacccactacctcttcgacgcgtcgcttgcgaacgacgaccgagacaacaagtcgggcgccgccaagcgtttcggcgcccgtcagggcgtcatcatggcgacgggcggctacgcgcgcgacaaggaattcatgaaggacgaagtgccctacctcgagcacacgtcgaactcctgctccgaaggtgccacggcgggcgctctgaagagcatgatccgtgcgggcgcccgccccgtgcagctcggtctctaccgcttcagctttgctttgccgaccgaagacttcatctggggcgtcgcgatcgacgcgaaaaccgggaagcgctactgcgccgagtcgctcggccgcaacccgattgcgctcgcgagcatgcgcgttcgtcagtcctcgggcaagatgcccttcatcgtctacgacgacgccgcgctcgagctcttccacaatctcggtcgcgccgcaaagagcctcgcggggctcaacggccgcaacggcacgatgttcaaattcgacacgctcgaagcgctcgcccgtcacttcgatacggacccgaaggcgctccaagcaacgatcgacgcgtacaacgccgacatcgccgccggtcgcgactccgctttcggcaaggacctcgaacgctccggccgcaaagtccgaccgatcgggaagaccggtcccttctacggcattccgatgaccgcgcgttgggattattgcccgggcggcatcctcaccgacaccgaagcgcgcgctctcaaactctccgacggcacgccccttccgggactttgggtggtcggcgaagccgcgggcggcattcacggtgccgagcgactcacggcctgctcgatgcccgactgctcggtgacgggcatgcttgccgccgaaagcgccgtcaaatccgccaagaagagcctctgacaaggatgtcatccatgaaaaagcacctccttaccgcggccttcgccgctctccttctcaccccgacctttcaggcctcggccgtcgacctgaagcacaagggatttgagtgctccacctgtcacgcgaagggctttacggcgcccgaccgctcgacctgccttacgtgtcacaagtccgacgacatcgtcaaagcgacggaacacttcaatttcacgacgagctttacgaatccggtgacgggtgaaacgaagacgagcatcgcccccgtcaatccgcacgacaacttccacttcggccgcgacgaccagtgcgtcaactgccacaaggaacacaagccgagcacgaccacgtgccagacgtgccacgacatcgaaccctggggtctcaaagccccgcgctgatgcgctagcacccgaagtcttcgccccgaccgtcccccggtcggggttttcgtttgtttgcacgccgcggtcaacggtatgagattttttgcgtagggccttgagcttaggtacaatgtcgtgcctttttttcaacggttggcgtcttcaccctcccgaaccggagtcgtcggccgcctttcctgccttacaaaaacccgaatccccctactcatgtccgccgatacaacgccgcatacgtcccatgccgtggacgacacctccttcgaacgcacgatgaaggcccgacatctgatcatgctctccctgggcggcgtgatcggaacgggtctttttttcaacacgggctttgtgatcggcgaagtcggtgcgctcggcaccgttctcgcctacctcgtcggtgccacgctcgtttatttcgtcatgctttcgctcggcgaactgtgcgtggcgatgccccacaccggaagcttccacctttacacctcgaaatacatttccccgcgcgtgggctttaccgtcgcgtggctctactggctcacctgcacggtctgcgtcgggacgtcccttctcggcgcgggcctctccatgcagtattggttccccgacacgcctatctggttctggtgcctcgtcttttgcgtgctcgttctcggcatgaacgtctttacgagccggctttttgcggaaggcgaattcgtcttctcgcttatcaaggtggtgacgattcaagtcttcatcatcttgggcggcctcgccgtcttcggcgtcattccgcttgccgacggctcgcccgccccctacttcaagaacctcaccgaagcgggtcccttcccgaacggcatcctcccgatggtgacgaccatggtggccgttttcttcgccttctcgggaacggaactcatcggcgtcgcggcgggtgaaacggaaaacccgcaacgcgtcatcccgatggcgattcgcacgacggtggtgcgcctcgtcgtctttttcatcggtacgatcgtcattctcgcagcgcttcttccgcccgaagaagcgacgatcctgaagagtcccttcgtgacgattttcgagcgcctcggcatcccctacgccgcgagcatcttcaatttcgtgattctcacggccgtcgtttccgccgccaacgccaacctctttgcgagcggtcgcatgctctggtcgctctctaaggacggcatgcttcccaaagccctcgcgaagcaaagcaaaaacggtctgcccgtcacggcgctcgtcgtttcaatgttgggcggttgggccacactcgtcacttctgtcgtggcggccgatacggtcttcgtttttcttacggccctctgcggcttctcggtcgtggtcgtctggatgtcgatcagcctcgcgcacatcaacttccgcaagcgctggctcgaagaaggccggtcgctcgacgagcttccctaccgcgcaccctggttcccgttcgtgccgatcgccgccatcgtactttgctgcatcgcttgcgtcggccttgccttcgaccccgaacaacgcctggcgctgatcgtcggccttcccttcttcatcgggtgcctgctcgtctatccgaagcttgccgcgcggcgtccgcagcacggagaaccctgcaacgccgacaactgctgatcgaacccgagagctcgattcccgcttagattttgcgaaaagcctccaagcatctttccgttgcctggaggcttttccatatgcgcttcaccgatcggcgaccggaaccgcaatccggccaccccggcgtgtgctctttcgagcctcgaattcaaaattttcttcggctctcacaaggctgtaatttacaaataaaaatattgttctctttgtcaaatcatcatggataacccctagcccgaccacgcgaccgacgttgaacaccccatagccttttcgtgctccgtggtagagtgaactgatccgattcgatcgtcaatttatgacagagcgtcccatgaaaccagagaaaaaaccttacaagctcaccctgagtattgatcttggcggtaaaaccaccggcgttatgttgatcggtcatccaggcgaccgcttcccggtcgcgcaagattgtacggccgcagccattgtgatgcccgaagagaatggcaacttctgttattcgtcggcaaatcgccgagcagcccgacatcgactgcgtggaaaaaaacgttttcaaatggctcgacgactgttgcttatgattgtcaacaatcagttgaaagccaaaagtattactctttcccacgaagaagcaaatcgcctcaaggaggcgctctgcgggctcttgaagcgccgcggctactccagagtatccggcgagatcgatctttcgttgctagaaaatctcgattccataccctttgccaatcatccggaaatgtcctcatttttctacgagggcactcctcttgccgatcagtgggaagagctcagcaaccgtccggatcgggtacacgaattccttgcaaaaaaccccaccaataaagatttcaaagaatatcttaagaaagaatacccggatttgcaggatcagagttccgattatgagaaagggctctgcatcatgcgtgacgatgcaaatgccatcgatcaacaaatcaacatgggacacaagcatcgcacgcaatatcttgaagatattctttcggatatgaagcatgattctcgcttgaagccagccatctcggcattcggcgaccttgataacttgtggcgtttggtcggaaatctgtcaaatttgcaacttcgagctgaacggtggtatttcaacgcaccgtacatgtgcaaagaggatgtttggcaacccgaaagactccggaaaacgctcattcgggccttcaagtattttcatccggaacccggcctcgccggtcgcgagatgacaaaattgattgccgagctcgaggcgtcaacggatattgtagatacgctctgccggatcgaccccgttcggacgattcccccttacgaagaccaaaacaatcgacgtcctcccttggatcaaacgctttggctctcgcccgccagtcttaatgcgctgtacggccatacgtggaccgcttggtccacctctttcgaacgcgtcgatccgacgctttccgacggtcttgacgagattctgacacataccgaccgacgctcgcgcaatgtggttttgagtaaggctccgctgccgattctcgactacaaattctcgtacatcctccagcgtgtactcgatcgcaacagcacgcgcgacccttatgctttgcgtgcattggcatcatcgatcagcagccagacgtctcttaaaggtcgtgaagccctcgaacgtaccatcggtgctcaacatgttgagacattcctgatgttcgcccgtaagtattacgcagagactgccgatgcacggtccggcctgtggttgccgagggccaacaacctgctcgaacgggccgatattcatcctcgtatgaagcgaaagcttctcaattgcctggtcggcaatgttttcggtcttgacgaagagttcggacgcaagttccgagcttctttctggaaccgttctattgatggtacttccaagacatgtttgaggaccatttgcaattccattgaaaaaaaccgtaagcgcttttctggagaattcaacttcctctacggccaggtaaaagtcaaactgctccgacatcagaagctgaccaaagaagaaaatgagattgcgcgagtgcacgagcgcgtcgagcgtgctgcggcttttcttttgaacgtagtcaagctcgaccccgattgtgttcgtcgagtcgccaacccctattcgcttgcgcagctttatacgctcatcgaaaccgaaatcaacggtttttcgtcgacaacctatgctgctcaacttgaaaaccagtggcgcatgtcgagtggcagcgatcgtcagaaaggcgcgcagtgctcacgccttcctgccgattccgttcgaccgtttgacggaattttgagaaaaaatctcgaccgtcaagcgtacgagatggtcaatcttgttatgaatcgcttacaagaaagcgatcttcggaacacgccgattgacttcactattctcgttgagcagaataagtttgccttttcggcatctcttgccgaaatcaaaaaaaaggcaaacaccaaaaacaaactgaataagcaaatcgaacgtcagcaggttcgttggttatccaaagaagaacgcattcgccaagcaagccagggaatttgtgcctataccggacaagctcttggatcggaggtagagatcgatcacatcatccctcgttccttgacaactgcacaaatgggaacgattttcaattctgaagccaacttgatttgcgtttcacgccttggtaatcagtccaaacaagatcaacgatattaccttgaagatcttaattctaaatatttaaataaggtcttcgggacttccgatacgaagaccattgaaaaagagattgaagatgttgtagcgtctcttctcaatgttggacgactcggttattttgaaatgctaagcgaaagggaacaaagttgcgttcgacatgcgctctttctgaaagatgcttcagaagcccgaaatgccgtcttgcgcacgttaagcgccctgaatcgaacaaaagtcaatggaacgcaatcctggctcatccggacctttattgaaaaactcgacaggtgtagcgaagagtggcgtcgtgaaaccggatgcgaattcgtattcaggagttggaatacctcggcagaagaagcctctctcttgcgtcgcgaactcggaaaggctgatccggatttggaaaaacctgaaatccaaccggttatttcgcactctattgatgcgctctgtgcttatgctgttgcctgcggaatgaatagcgcttgtggttttatgggcgggaaccccaaatttgcagacttcaacacctttaatttccccgatagtctgacttatttgcatcctagaacctgcaaagtaattcttgtcgcagccaaaggaattgcaaaaaaagacactatcaatgccaaaccgattttcaaagaaggaatctacgcagaagactttttgcctttgattcaatgccgcaatcgactttatgttggattttccttgccgaataaaaatggagaaaatggaaattcaattctgattaccggaaataatccccttggtgtactaaatattctttccaactatcttgatcaaataccgcttaacgatcaaaattccattaggacctaccgcgtcgtacctcagaaagcctatgagctcttctctcgtgctgcgctcgaccccgttagcctgtcgaataaggacaaaactgccgccttgctcctcagaagtatttcctttttcacaaagcgcatccctgttgaaactcgactcttggatgattccaggaagaaatttgtacataagaacgacttcataaaagataaagatttcatcatcactatcgatttttccaaagtaagtaaagaattctctttcaaaggaaagcttatttatccgtctaaaaaggattggatgcacttagctgatgataaaaaactcgataccttgtgggggaatcctgtcaaggaaagctttaatcttagtcagtggttggctgagaagatgaatatgaactccgctaatctgcgacacacggcagtcaaacgaactgcgagtttacctattttggatcgtcctgacggtggttttagaattcaaagaaaatctcttgatgatacatctgtctatcagatttacagcattaacaccaaaggggcaggatttgaggccgacggaaaaactgtcaattggaagaagccttcacttttgccgcagttagtccacaaaaaccttacacctctggatttcagtatagaaggatccagatccagagaaatggtctcaatggatgaatggcgaatcgtttacgacaatggcgaaaccaaagttttcattgcccccgggacgattctacgtcgttacattaaaatcgaagttcctttctccacattccaatcctggctctctgaagaagatcgtcaaaaaatcaactccccaatgaagatggctcataaattcaagatttctaaacctctttgcgtagccccttcgattgtaaaaatcattgggaaaccaagagacggagccattactgttcgagaggttggtgataaactcattatctcttattcggttcagagcaatgctgatatgaacctgtcgtacaacaacgcaggaaatcggagattttaattatgaggcaccttacgatttccgagttcggaagttttcttggaattaccggaaatcgtttggtggtttccgatcgtgagagcggagaacgttatgaaacgccgctttcacgactgcgcagtattcgtattacaaagcccggggtatctttatcttccgatttgattctggcttgttccgcgcgaggagtacgactttatttttgcaattggaaaggaattggcgtggcagccatttccggagaacatcagcatgcagttgtggaagttaggcgttctcaattcaagtgtattagctcagataaatccaaagaaatatcaagagaaattatttttacaaaaatccgcaatcaacgcgcagtactttgctatttttcaaaatatcttgcaaaaaccgacgaaaaccgctgtgatattcttttaaaagcctcttctagtcttgacgaaatttcacaaaaaataaaaatattgaacttgtcacgagaacggtggcgtgaatatctgatgacttttgaggggcaagctgcatcacaatactggaaagcactttcatcctcaggattactaccagaaagctttaccgaacgcgaaggtcgaggttcaactgagattgtaaattctgcattaaattatggttatagcatactaaccagttattgttggtcagccctagataacgcaggactggaactttatgccggagttttacacgttaatcgcccaggccgtgcatctcttgttttggacttcatggaagaatatcgcccctggattgtcgacaggaacataataaaattaagattccaactgaaaaatcatgacgcattagacaaaaaattaacaaccttaattatttcttccatcgactccacaatggccggccaggtgaactggaaaggaaagaaggtgaaacttgaaaatatcatgcagaggcaagcctaccgtcttgcctcatccatggttattgatcgaaaatatcgcggttatcgattcaagtggtaatcatgtcccagtatgtaaagtatttagtttgttatgatgttacagacaacaagtcaaggacaaaattttcaaatgccctaaaagatctgggactcattcctattcagaaatcggttttctacggtgatcttaaaccaccggaggcacgaagtatttcatcattagcaaaaaagtttcttaatgaagagaccgatagttgtttctggtttccatgtcatttggatctacagaaactacgctcctgcttcggactaaaagacttccaatacgaggaacccgatggatttaaagttctctagtatgcctgtttccatgctaagacaatatcacttttgtccgcgcattccgttttttacaatgcttaaaagcatagatccccccagaggaatttgggtcgaacagggaatcaataaacataaaaaacttgaagaccttttgcagcgaagaaaccttgcacgaattggcatctccgaacccttcaccatgtatcgcgagatgcacctaaactctcaatccattggtctacacggaatttgcgacatcgtaattactacggaagccggtgaactttttccgattgagattaaatcgggaaataatcaaccaaagagcggagatctctgccaattatgtgcctatggcattcttctagaacaacacttccacaaacaagtcgaccatggcctaattcttcttcaaaatggtagcaaacacatttccatcaaactcaccaacgaattacgccaagaaattttcataactctggacagtatcagatcaactttgagttccagcttaattcctccatcatcagcatcagactctcagtgttctcaatgtgaatttttgaatttttgcggagacagattataaaaaaactttgagtttggctttatacctcatctcttcgttttcatgaggttatcacgtattcgcgccttcaaacccaactagtattaatctctcattggcacgagaaggagattaccatggattcgttcccacagtgtttcagtcacctccggaactgatccatcattggaactggaactccgacaggaaacacccccgcttacggttttagttaccactggaattgatctatcattgacactacaccatcgccgccccaactgccgttgcgatcaagtttcagttaccaccggaattgatctatcattgacaccgcagcggtttgtcgacatgatccgcgcggccgagtttcagttaccaccggaattgatctatcattgacaccctatcgagccgccgcaagcggtgaggcagttgaggcgtttcagttaccaccggaactgatctatcattgacaccttgtgtcgtccttctgctgaccggtctacgaagaggtttcagttaccaccggaactgatctatcattgacactcggacgactttacgtcacgcaacgtgtaaccctgcgtttcagttaccaccggaactgatctatcattgacacttcacccacctagtcgtcgggatactgtcgtcgttacgtttcagttaccaccggaactgatctatcattgacaccgagacgcttctctacgtcgacgggatttaaccgagtttcagttaccaccggaactgatctatcattgacacgtgttcaagagcaaagacgagggcgaagcctgtttcagttaccaccggaactgatctgtcattgacacccgtcagggccttcttgaaggattcccactgcttgtttcagttaccaccggaactgatctatcattgacaccgacccgggcgaattcgagtacaagcttccgttttgtttcagttaccaccggaactgatctatcattgacactcaccgacccttgcggcatgacgaccttcgccttgtttcagttaccaccggaactgatctatcattgacaccagccgaacgacctacgccgatctcttcaaggcgatgtttcagttaccaccggaactgatctatcattgacactgatgtacgagatcaacgattttcgacggaaaagcagtttcagttaccaccggaactgatctatcattgacacaggacgccgtcttgaggcgtaccagtgcgcagcagtttcagttaccaccggaactgatctatcattgacaccggacgggcgcgtgctcatcgagacgaggcttcaagtttcagttaccaccggaactgatctatcattgacacgcgtaataacgaatcgtttaagtatctgaaaatagtttcagttaccaccggaactgatctatcattgacaccgatcaatcaatcccgcatttacagggcttcaagctcacccttggtcttcataacttcgaaaaccgttcggttgtatcgtttcttgctttttttgcgaagatttgctaagatccccgacgtcaatgatagatcaagttctgatggggaaatcgcctccgggcgagctgaaatctcttaaagttaggcttgactccggctactgtttgttcttttttgaatacacatccggggatggaaaggcaccgcaaggtgcctttcttttttctagcatctttttgtactcgaatccaatatatttgtactcaccgccctctgcagggcacgcggccatttgaaaaaacagttccgcttcagtacaatcagcggacgcagacgaggagatgtggcagagcggttgaatgcaccggtcttgaaaaccggcggtcctaacgggctcgtgagttcgaatctcaccatctccgccacgtcatgcgccttgccccgaccggatagccgatcggggtttgttgtatccgcagctctcgccgaacagtacaaccttccccaccctctctcttacgcgcgtaactccgcgggcgatacttccttccaaacagcttctcaagggaggaaatccatgatcacccgccgaaatctgctttgcacttcgggcgccctgctggcgacgtcgcttgcgggctgcgctacgacgcccgctctcgtcgagaacacgggcgcttccgacgacgtcgtcgcgctgcccgccgggaaaatccgtgggagcattcgaaacggcattcgcatcttccgaaatgttcccttcggagcgaacccctacacgcccgaacggcgcttccgccattcggttcctcccgaaccctgggagggtgtgcgcgactgcacgaagccgggggcgattcccctgcaacccgatcgcaacggccccgggatgatcggagggggcgacgcgctcgtactcaatctctgggctcccgcaggcggcaaggatcttcccgtcatggtgtggatccccgggggcggctccacgaactgcgacaacaacgatccccgctttgacggcacgcgttttgccgaagacggcgtcgtactcgtgacgctcaactatcgcgtcaacgtcgacggctttttgaagctcgaagacggggatgcgaactgcggtctctccgacatgattctcgggctcaagtgggtgcacgacaacatcgcgcttttcggtggcgaccccaaccgcgtcacggtcttcggtcagtccgcgggcggcacgcacacgacgagtctcatcgcctcgcccaaaacgaaagggcttttctctcaggcgatcattcagagtccgtcggccatcgcccagtggcgcaacgaagccgatgcacgcaaggctgcgaagcgcctcgccgacttcctcggcgtgccgcctactcgagcgggctttgcgtcgcttaccaacgacgagctcgtcgccttcaagaagttggtcagccaactctcgaaggaccccgactggtcgcttttcgcgcaaggcaacacggcgctcttcaagccttacgtcgagcacgacatcctgcaggatcgccccgtcgacgcgattcgtgcgggagcggctgcgggaattcgcgtgatctcgggttgtacgaaggaagagtggcgcaattacgttgttccgagcggtgcaatcgaccgcatcggctacgacgccgtgaagatgcttacggcaagcctcggactgccttcaagcgtcgccgaagactaccgcgccgcgggccacggccgaacgacgggcgaagtcttcacgcgcatgcagggcgacctcattttccgcatgccctgcaacaagctccttgagtcgctcgccgtagcaggcaaccccgtctgggcctattcgttcgaatgggaaagccccgtgacggggaagaccggacaaaagcgcggtgccgctcactcgagcgacgtctccttcgtcttcgataccattgccgccccgaccgccgtcaaaatcaacggcgccgacgcaccgcaagcgttggccgacgccatgcacggtgcttgggtgcgctttgcgaagacgggcgacccgggctgggaggcgttcgatcttgaacgtcgcgccacgcgtcgcttcgccgatgaagtgagcacggtgctcgatccgtgggcgttcgagcgcaagacgctcatcgttccttaagacgttgcgccccgggtgaagtacccggggcgcttctttttcatctctgtgcggcgtccgtcaggcgttgcaatgcgtcgcgacggcggacttcatcgtcccgatctttgcggtctttgcgcttttcttcgcggtagcgcttgcgccagtacgcttcccactccgattcgttgtagcggcgcccgcagtattcgtaagtcccgtcgcgatcgcgcttccagtcgttccgatactcgtcggcaaaacgctgcaactgatcgcgggaacctcctcgagaatggtcccgagcaccgtctcggcggcacgggctccgccggaagagaggagcgctgcaaccgccgctgcagtgagaagtcgtcgtcgattcgagatcatgcgccctcccttttccgagtgagtgctcacattcaatttagcggctccgccgacgaaatacaacaacgaaaagaggttcgatccgtacggcattgccgaccttacccgacgtgccgtaaagccccgccgttcacggtggggatataaggcacccgcgcgaagcgccggaataatgtactacaatattcgtatgaagatcacctgcgcctttaagtacgaactctacgtggacgagacccgacgtgcggctttgagccgaaacgccggttgccgcaggtttgtcttcaacaaggcgctggacatccaaaacgagcgaaaggaaaagggggaaaagcttctcacctacaacgaactcgcccatgagctggtgctctggaaaaagcaacccgagaccgctttccttcgagaggcgatgtcccaaccgctccaacaagccctgcgcgatctcgatcgtgccatcggcgacagctttcg

SEQ ID NO: 139 - DNA, 16264 bp, synthetic construct
  source 1..16264: mol_type = other DNA
  misc_feature 1..16264: note = Synthetic
  variation 16084: note = n is a, c, g, or t
  variation 13204: note = n is a, c, g, or t
gtatattgacattaattctaggctacaagataaacttgactgccttttgacaaattgagactgcgttcaccgaaataccaataacactgtataaaatcagcctatctagtctttttcattacacataagtaggattgacttagttggtaaattttgcatgataaaatgtatggcaaatcgacatgaacacattttgagtgagtaacaactctaagtggaacggggcagaaacgcgttagattccctaccctaaatgattgctgggcatcgagttagagtttaagcagtactatgtcaacgactaataacttgctgattccatcgttctatagtcattcttcaatatcgtccatgttcacttttcttctatttgttaatattaatgaaaagtgaacataagacctactgttaatactattcgaatcttgttcagcctgctgaacaccacaaaggcatacaacgtatgccagactcaattatgaataatgcagcactcttttttatcccgtcgtttatgttcacttttcttctatttgttaacattaatgaaaagtgaacataagacctactgttaatactattcgaatcttgttcagcctgctgaacaccacaaaggcatacaatgtatgtcaaattcaactattctgacactgggccatcttcaacagaaataacctatcgtttgagtataccgtaatgatgtaatgataaattagaccttaatcctatcaaatgagttgttctacagcttaaacgatagtattatcatttaaatataaaacctagcttaaatgatagagggtggcaaatgacagcatcagacattaaaagaactaagcaatcaggtaaacaagtaatcaatgtatacggctatcttagggcttcgactaaagagcagaatgcaaatcgagcaaaaacagtattagagacttttgcttgtcagcagggttttgctattaaagaatttgctatagagaaccagtcaggtacaaaactggaacgtcctgaactgatgcgcttgctgaaaacagcacaaaatggcgattgcatcctagtggaacaaatagaccgacttacccgtttgaatccttcagattggtgcttacttaaacgagaactagaagataaagggattcgaattgttagtattgactgccctacgtcattcgcattcttaacaccaagcaaagcgcttgatggcgtcatgaatgctattaacggaatgatgatagacattttagctacatttgcgcataaagataatgaagatagaagacgacgacaggctgaaggaattgtgattgctaaggctgatggaaaatataaagggcgcgttcaatcagctaagactgttgaaaaatgcaaacgagctattgaattaattaattcgacaaagatgactaaagaagaggcttctagagctgtggggttgggtgtcgctacgctgtaccgttacattaaagactcgaagctagttggctcgtagtaagttacctgcaagcctagaattatatcttgtgaacctgtttgcttggtgatcacatcgtgttaacaaaatctgtaacgcgttgctagacaaattcgagcaaaagttattagtctaacctagctggtttaggttagaaaaaagtaaggcgaattctccaataaacaaaacgcaagacctgacccctagattaaccaatgcttggttgtactgcttccagttagtgattttttccttttattttcccatggtgagatcgcttaccgtctcgtctatttgaaagatcagatcacgcataagcaacaaggtcgatatgaagtactagaagataagtggactacccgcatatgaaattaacagtcctgattaacatagatcacttgctgtattcttggttttctgcaggtgccttcaaaattagctcattcttttactcaattgtttattcgtgatgtagctcattaaaatgtatcctatctaattgtaatataaatattaaattgatatttaagttcactactcttaaatatagttaacattttatttttcaattaatgaagggattagtgttgaaaattatatctcctatcgcgatcgacatgggtgctaaatatactggtgtttatttaactcaatatgaacagggtgatgtgttagaaaatgctaatccagaaggattagttgttatgcacactgaaaacatgcaatacagccaagttgatagaactcaaagacgacatcaaacacgtaccgcgaagcgtcgtaaaatggcaaagcgccttttatggttagtacttgctgaacattataatctatcatttaagaattgtgatgttaaagaaagagaagcaatcaatagtcttcttaaccgccgtggttttacttacttatctgaagatgttgatgaagccttattgcaagagattgactcatctgcattccatttgtattttaattcagacatacctgcagctactaacttatttgaagtatatcaagtaataacaacgagtgtggaaactgcaaaatcatttcaaaatagtgatgaatatgcgataagtgtaaaagatttttctaagcgccttgaaggtgactataaagagcaaaagaaacaattggaatcgggattcaaagcatttcgacaaggagtagacagttttattaatgctgagcaggatggacataaaatccgtagtgcttatttagctaatatcaaaaaagatcttagtgaacatgaagattaccaatttttaagaacacgcttgacggtatcaatagacgctttttcaaatttcgtcggacacattagtaatttacaattaagagtgctacgtcgttattttaatgatgaaaatatggcatatggtgatatatgggactttgaaagattacataaagttttttatcgaaatgtttcagggatgcactataaagacaatacccaagacaaacaaaatcaagtcacattatttagtatgcgagcacaagatataatatcaacgtttgaggcattagaccccattgtttcaatcccaccatttgaagaccaaaataacagacgaccacctaagtgtcagagcttaaaattatctccaactacgatgattaagtatttaccaaagtggcatatcattgtccctcagttagctgatgatttagaagctagaagtatattggttaaagacgggttagaactaaacagtattaaaaatacaaatgattgggcgcaatgtttacaacgaatattggagttgagttacgatcatgacccgtatttattacggcgctggattggtcgaaaagatcaagttggtgaacataccaaacgtgcgatatctaattttgaaagagttattcaacaacagcaccatgctgattttatagtgttggctgagttattttatgcagaaacacaagccgcccgtaattctatttggtttaaagagaatagccaactacttgaagtttgtgcacaaaaaacacctcacaaagcaaatcagtttaaagaattattatcaggaactgtaaatgttaatttaactgaagatcaaaaagagcaatttgaaaaactgtggtttgataatcctagaattggcaagcgaggtattaaaggttggtgtggttttgctgctgagatgcaaaaagaatatggcaatgcgctaaaagaacaaatcaatcgcaatatttggcttaatgaaaatgataaaaaagttgaaaataaaaaactaattgaattgaataaggctgttgaatctgtcgctaaaatcattgctgattcgatgaatattgagtcaaagcgttttgctaatgtatttgatttagcaaaattacataatcttgttgagaaagatcagaaaggtttcagtaacaattgtcgctgttgtacaaaagataatgcatggcgaggcaacattgttgaaaacgatgagggtaaagatgctgcatttggtcttcgattgcccgcagatacaacaaggccatttgatggactactagcacgacttattgataagcaagcgtaccaaatagctcaagctaaagttgcacaactattatcggagccaacgaacgagatggtttcagtgccattgcttattgaagaaaataagtttcgttttacatcatcgttggctgaagtaaagaaaaataccaaaaaacgtaaagataatgaagacaaagctaagaagcgtgaaggtttatggttagaaaaaaatggccgtattaaagaagcatcaaaaaatatctgtccgtacacggataagccactttataacggtggagagattgatcatattatttcgcgagcagaatcgaaaggccgtaaacaaacggtatttaatcatgaagcaaatctgatttattgctcggttacaggtaatggtattaaagatcgtcagtcatattcgctcgcagatttaaagccaaaatacctcacgaagcaatttgaaacatccaatcgagagaaaataaaacaacgtttaattgctttatgtgaacccattatcgcgaagagagaattaggtagctttggtgatttaaatgaagatacgcgacaagcgatacggcatgggttatttgttgatgagttacgacctaagttaattcctttattacatcaatctaataaaacccgtgtcaatggtacacaggcctatctcgctaaattaatattacaaaaaattaaacttttgtataaagggcctattgagttttcagttcattatgttgaagctgaactagcaagtcgattacgagttcaacttggtaatcaatatcccgaatttgctaaacctgagcatcaacctgttgcaagccatgttattgatgctgctatggtcatggcggcaggattacaacaacctcatactcaagcatgtttacaaacagcaggtttggataataatggtgattggttaaaagcgattttaccaacagaaattgatgtaaaacgcattgaacctaagttaaagttcaataaaaaacaagttcatagccaaacattgtttaaagatggcatatacgcagaacatgttattccgttagttgttaacgatgaaaaattcggcgttggatttactgcagataatgtagcctggctaaaaaaccaagaagaagcacctgttatatggtggaatgctttacagctatatttaaacaagtcacctgaaacattagatgacgttcgtaaaaatattggtaatcaaacgaaagtatatagctttaacaacacggctgtatttgagctgttatataaagttgctaagcagccgtgttcggacgaagaattactgagtgccgatttactagaaacattgatttatacaagccaaaaggtgaagttacagtctgcattgtatgatgaaaacaataaaacgtataaaaaaattactgatattgtcaatatgaaaacgacagacaataaaggcgactttaccattaaattagatgttaaaagtcgttaccttaaaacgacgatgcgtgcgtttgagtcttcactcatcgtttatcctgcaattgcgagttggtctaatctacttgaacatgatttcgttaaggctaaagctgggaaaaaagaagcatttgactcggacagttataatcgagtaattaaaggcttattttcgacaattaaagagaatactcgccaacataaaaaagtgagaaaaaactggtcattacctaagttatcatcaccatcaggcggttatcgtgcacgccgtaaaaatgctgatggttccattatttggcaattgtttgctgttgaagggttatctgcatcaggtttttatatgattgatggaaaaattgatttttctgaagcgggtgttgcaggtatcaaagcgatagacgatagtaaaaatttaacgtcggttaaaagccgatataaaaatattcagttgcctgtagaaccctttgataactggagaagggtgactattcccgataaattgaaaggtaaaattaaggggattctgttatcacctaattcgaaatcgagattcagagttagaattgaatttagctatggtcaatttaaagaaaatgtattaccactgaccgatagcattgaattagtacaagcgtggagtcaaattcctgctgaactgaagatggctaagggtaaagagtggaaagcctcttttggtgatttaatcggaactccacgatctaatctatttacgttagtcattggaacctctattacgctggaatatattgtaggtagttcaaatacagtgatgaaacaagcatatcaaaatggttctttaatagattaaagctgatgaaacatataaccattaatgaatatggtcagtttataggtattaccagcgaacggcttactatcaaggaagatggtaagttaattgcggaatatccccttaatcggatcaaaacgatcaccattgcgcgtaaaggtgtaagcctgtcgagtaatatcattcttcaatgtgcaatgcggggcatcaagttgtttgtacttgatcccattactcacacaatggcatgtatcagtggtggtcaattacatgcggtaagtaaagttaggcagagacaatttgaatttttacagtctcaacaaacacctctcctagcaagacaatttatcgtgggtaaacttaaaaatcaacgtgttattttaaattactttacaaaatatttacgcaaaaaaaataactacaaagcggatatttgtaaacttgcagcagaacaaattaaggattcagtttataaattagagcgattaaatattgctaattacagtgattggcgacaggttattcttggctatgaaggtagttcagcagcgcgatattggagaactttgtatgaggttaatttgttaccagagtgctttcaaggtcgggtgggccgaggtgcgagagatcccattaacgccgcactgaattatggttatagtattttaagcagctatatatggcactgtttaattaactctggacttgaaatatatcaaggtgttttacatactcaaagatcaggtaagccctcacttgttttagatgtaatggaagtatatagagcatgggtggttgatcgcgatgtgattaaactagctaatagacttggaaaggctggtgagttaacaccaaaattgaaaaaagagcttgttgttagtattcataaaacatttgcgagccattatcagtataaaggaaaaaaagttaaattggaggttattttacaacgtcaaatttatcgtctttcagggtgcttttcaggtgctaaaaattataaaccttacattttcaaatggtaatggattatgtctggattaatgtatgaagtacttgtcgcttatgatgttgaaaacaataaacaacgtaaaaaattatttgatcaattaaaagatattgggttaatgcctattcaacgttctgtcttttggggacacttgaataaagctgaagagcgcgctgtatatagattgtttcatcaactcgcaggtgaagaagataaagcatttttagtgagagccaaactaggtgatattattggtcaatatggtttaggttatcatcctgataattttaaaccaccgctaagctatgaggttttatgagtgttcctgctagtttgatacgtcaatattgtttttgtcctcgcattccttattttcagcatattattgggattaaagcacctactccactgtgggttcaacaagggttagattttcatcagcgagcaaggatattaagtaaatcaagaacattaaagcgatataattgttcagaaggcagcatcatgtttgatgtgaaattaaaaagtaaggttgatcaaatacatggcattgctgacgcgctcatttttactgaagatgaaattattgttgttgagtttaagttatcatgccgaaggccaactcgagggcaaaagcaacaattagctgcttatgctttatgcgctgaactgcagtatagaaagcctgtttcaaaagggtatatatcttatgagtcatcaggaaaagcacattttgtaaaactagataataaacttaaagcagatgtaggtaaaacagttggcgcaataatccaaatggaagataatcaattaatccctgatacagccgcatcatccgaacagtgtggtcaatgtgaatatttaaatttttgtaatgatagatagtaaaaactattgaaaactaaaaaatcccatctaagggcttttttagttaggttgcccatgctagcgcagagggacaatcaatcttgattttaattgatttcattacatagtaagtttgatatttccaatatactctttttttcgaaaaatttcaatgtttttaaggcagtggatggttttcgaaaaacagatgtttgaacaatctcacatcccttgccagataaggctttcgagggggagtatcactagcttatcaaacttacgtagtaatgaaacatggcaaggtactaattggagtgctgtgcctgagcgtatcactagcttatcaaacttacgtagtaatgaaactttagagattgcttacgatccgtggtcggctacggtatcactagcttatcaaacttacgtagtaatgaaacctgattaaccacggcacagaagcgaattcagctcgtatcactagcttatcaaacttacgtagtaatgaaactattccatccaatacaatttcgtcggcgctggaacagtatcactagcttatcaaacttacgtagtaatgaaacgaaagaatgagcgtcagtatgccgtattagtcttgtatcactagcttatcaaacttacgtagtaatgaaacacttagtaacaattggattagagttcatattatgtatcactagcttatcaaacttacgtagtaatgaaaccatataaatcacaaggttgctgctgactggatttgtatcactagcttatcaaacttacgtagtaatgaaacccgatccatcgtcgcatacgcaacgtggcatagttcagtatcactagcttatcaaacttacgtagtaatgaaactcaaaatacgtcgatacaccagtgtcattaaggccgtatcactagcttatcaaacttacgtagtaatgaaaccgctggcatgcttcgcaccgaacttaattttaagtatcactagcttatcaaacttacgtagtaatgaaaccgattcaaattctgctttgtgcccagtacttgaaaagtatcactagcttatcaaacttacgtagtaatgaaacgtcacatcttttcgttcgtcgatcaaatgtttaaggtatcactagcttatcaaacttacgtagtaatgaaacccacatgcgcggcttgaaagacctgactgataagagtatcactagcttatcaaacttacctagtaataaaactgtagtgaaagactagctatgtgactgagtatattaattttaggctacaagataaacctgactgtcttttgacaaatcgaggctgttttaaccaaaatacctatgacacaatataaaatgattccatcgaaccgttttcactatgcataagtatgatcaactcagttggtaagtttcgcatgataaaatatattgcaaacagatgtgaacatatggtttgtgagttgaagttctatcaaaaagaggcaagagtggcttaatgtttatacttcaaagggacgtttgatgtggtcaagtaaaactgtacgccttgataggcgtttaaattaagctgtagcgtccatatctgtacactgttatatagctacaataaaggcggttccataatatggaaccgatttttcagaatcataaccaacagtattctttacccaaacctaagtcattttccgaattacattcatgagagccttgttactcaaaacaaagctcgtagccttgagatggctcatcgacagtccagcatcttgcatcgcgttgaaaacaaacttgatgctagcaagataatctagcgatgctggtacagctttacgagtcaactgattaaacccttcattacggctttgaaccaaagcatttaaatcaacctggaatcctttatgctcactagttgcaccttcagacataaacttcgcatcgataatgtctttacctacgagataaccacgatctctgagtttgttatagcgattgtgtaagaataattgaactgcgccaacattccccttaaaaacaactatacagtcttgttctgatacaacaatataatcgacaaaaccattaattaaatagttatacttgctacgggattcaattgtagttaggtctagttgattagctgctggcattttagggattgaaaatgactggagtaaactcgtttgctgtcgtttacaattatcaagttctccgcatgtcttatcaagctcagtagccaaagcagaaatcgccattgcattacccacgatattaagctgttgtttaagttcattaattttattttcatgctgattaacctgcaattcagtatcagctaattgagtttctatagatttatttttattacctttatataatttcgtataattaatactagataaactatcaacgagtaatttttcaactggaagataattaattgatcccttagtacaacctcgattatcaagataatttcgacatcgcagtttaggttgtcctcgagtaacttgagaataacttaaagtgcctccacactgtggacattttaacatcactgcgaacaggtttttgtaattataggatttagttcccttttgatacttcttaaaacttaattgaactttagcaaaatcttctttagaaatcgctgctggataataatctgcgattggatcgccaagcggtatcttgcgcctgtatttgttactataatcatccgttgttggttgaaaaagaccaatcgcttggctcattttccaatatttttgaatgagcgtgcatgaccaagttcgtccattgaaatttttaattccttcggaattaaggattttggcgacacgactagaaccaagattatcgtcgatacgcattctatagattcgttgtaataaagcactataatcgggaattagttcaaattttgttttacatactgaaagagtcatccacgacgggcagatgctggttcgcctttctcccccttggggctcttcctcacgttttttatcaaaacgagctttaatacgatacgacttcatattactctcactataagccatgtgaaaggcaacggtgagctgtacatcaatgcctagatctgcttgtcgatcatgataaagaatcatattaaaacgctgtatagcaacatcaattttattttttgctaattctgaaaagatcatccgagctcgattcggctccattcgactaattcgatcaatagcctcaacaactagcattgaatacggtgggatcctaccatcctttgcagcttgcaaaaacgcacctaagccaccattttcagcggtatttaatccagaataagctgacaaccctctatcaataattatgtcgtccgcaagctgatattgtactaacccttctttctcatttttcaaattcaggtcatttataaattttttactctgctcaatttgtcgagttatccccccccctttagtgctttgcacggacttacttactctagaataaataaatgccaatctagtttccacgttatcaataattatttcattttccattacatctctccgtcaatttgaattcatttaaacaaatacaatgacagcaagcaatagtcaaattgtaaagaactgcaaataaccttttgttttttaagctaattatattaaaatggaataatttcaacaaatgaaacgcgaatatttatgcaaaatatattcagctattaaaagagagaaatcaacgatttgaacaataccttatacagctatcatttttacaagtataaaaaaagccgctgaaactcagcggcttataaatgcaatagtaatagacgaaaattattttttcatcagttcaatcgactgttgtacgataacccactcttcattggtcgggataaccattacaaccggtgtaccagcttcagtgataacgccagcattaccaaatcgcgctttttcattagcttgcagatcttctttgtaaccaaagatcttcaaataagccaatacttcgctacgaattggcagtgcattttcaccaataccaccggtaaagataataccgtcaagcgattcaagtgagaccatgtatgacgcaatgtattttgcaacacgataagtaaatacttggaatgctaatgtcgcgcctttatggccctgctccattgcttcgataataccgcggcagtcactggttaaaccagaaacacccataaagcctgagttagtattcagttctttataaacttcgtcttgtgtccagccttttttcaataagaactcgataatgcctgggtctaaatcaccacaacgtgtacccatcatcaggccagctaacggtgtaaagcccatgcttgtatcaacacttttgccatcacgaattgcacatacagatgcaccgttaccaagatgaacagagataaagctgctttcttcgataggcttattaatcattttagcggcttcacgactaacgtaataatggcttgtgccgtggaaaccataacgacgaataccatagtctgtataaagtttgtttgaaatcgcaccggtaaatgcttttgcaggcatcgtctggtggaatgccgtatcaaatactgcaaattgtggcaatgatgggaaagcatgcattgctgcttcaatgcctttggcaccagcggggttatgtaacggcgctagatctgacaggtcacgaatttcatttaatactgattcatcaattcttatcgtgctggtaaacttctcaccaccatgaacaatacgatggccaacagcaacaagcagtgacgttagccctagcgtttcgattagtgcaacaatgcgcttaatcgccagttcgtgatgattaccttcacctgtgatagcttcttcagacttctgtccttcatacttccagctaactgtcgcttcaggaaggccaaaacactctcctaatccactaagaacagcatcaccggtatttgaatcgataaccgcgaattttaaagatgagctaccagagttgatcactagtacaaatgagttagacatgtgaatatgattcctgtttcagactattgttgtgacttgggtcacttatattgtgaccctattattcaacattttttgantaattcaacttaattttgcatcaagttgattatcaaccaacatttcgttgatctgaggcagttattcagcgactaaagtttctcctaatgaggtggttgagcgccgaaactgatcttataacctcagattatattcccacgtccctcatgcgtttttatattaccaaaagtaatatctaatgaattttaattcttttaggtaattagatcactagtgtaatctgctgaaatacatccaacccattgttattaaatagcttaaaaacaccgtacaaaatagtgtcatctggttgcttaagctaaaatcacccacaggaattgatcatgtcattagctgttatcgctaacttagcggtctttggtatcatattatttttactcaacgtccaacaacgtaaaggccatactctttcacgtctggtattactcggtttagtgtcgggtagtgtattaggtctactcatgcaagtaggttacggtgaaggcagcggcatcattaaagataccctagagtgggtaaatattgttggtaaaggttatgtcggtttactcaaaatggtgatcatgccattagtattggtatccatgatctctgcggtagtgaagttagaccgtactggttcgctaggtaagatcagtggtttaaccattggggtattactgttcaccaccatgatatcagcgattgtcggtattgctgttgcgcaactgtttggcttatcagctgagggcctaacagaaggcgcgcgtgaagcagcgcgcgtaacagttatcgaatcacgtattggtcaagtaagcgatttaagcattccacaaatgttagtgagctttatccctaccaatccatttgccgatttaactggtgcccgttcaacatcaattattgcggtggttatctttggtattttagtgggtatcgcagcgcttaaagtcagtgcggaaaatgccgaactagcaaaaccaattcatgcctttgttgacgcatcacaagcagtcgtcatgcgcttagtaaaaatgatcatggcacttaccccttatggtatcgctgcattaatgatgaaagtagtggcaacatcaagtgccggtgatattcttaacctgctgagtttcattgttgcgtcttacgtcgctatcattgcaatgttctttgtccatggtctactggtatcgtttgttggcgtaaaaccaagcgagtatttcaagaagatctggccggtactgacatttgcatttagttctcgcagcagcgccgcgaccatcccactaaacgtagaagcacaaatcaacaaacttaacgtaccaccagcaattgccaatctgtcagcatcatttggtgcaacgattggtcaaaatggctgtgccggtatctacccagcgatgttagcggtcatggttgcgccaagtgtcggtattgatcctatggactttagcttcatcttgtcattaatcgctatcatcattgtcagttcatttggtattgccggtgtcggtggtggtgctacgttcgccgcgcttatcgtattaccagcaatgggcttacctgtgactattgcagcactacttatttcaattgaaccattaatcgatatggcacgtactgcattgaatgtaagtggtgcgatgacagcaggtaccatcaccagtcgattgctgaaatcaaaaactgattcaactacagcagacgttaaaactgagcaaacaaccgcttaacttcccaacactagaaattcaaatgcctattagaagtgaccgtaaatgatcactgctaatgggcatttttttcattctgcataaaatcatacaccacaataggctatggggaatcacctgtcagtgatcactaatttatgataagcatgtgctaatcatttggattttcattgaagtacccctagctgaagcaaggggattcttgtagtctacggtttaggcattgcaatattaaattgcgttagtcttctaaaacctcttacaagcatttaacgtgtcggtactacctaccgccacaaattatttaagctgctagtcttaatccctctttatggatattgatagcagcgttatgatctctatcgtgaacagcgccgcatgcgcaagtccacgtcctgatcgctaatgaccactgcccagcgtataacgcaccacactcactgcacattttagacgaaggaaaccactggctaatagctgataatttacgcccgtaccaatcagccttatattctaactgccttgctatttcaccgaaattagcatcatggagatgctttgccagcttgcgatttttcaccatatttttgactttcaatgactcgatccctatcacttggttttcgtttataagtgtcgacgtcattttatgcgtaaagtctctacgggaattcgctatcttttcgtggatcttagcaataacaagcttttgctttttgaaattgcgagagcctttttttcttttcgctagttttcgtgaagccttagcgagttttttcgcatatcgatttgttaagcgcgggttgttaaatttaacgccatccgagcagatcgctaaatctttaataccaacatcgacaccgaccgttttattaacaatcggcagctgttttatagcttctttcactaatattgaaacaaaatacttacctgatttagtcttggatacggtaagtgaacttggttttccagtgaagtagcgcgaccactttattttaagcggttgcttcattttagcgagtaataatgattgtttatctgcatcccatttgaacccgttactcatgtaactggctgattgataattatgctttgatttaaatttagggtaaccaaaccctgatttaaaaaaggactgaaaacctttgttaaggtgttttaacgcctgtngtaaaggcacgcttgatacgtctttcagccacaaaaggtcggggttctttttaagctgagtgaggttcttactccaatcgttataattggttttattgcctagttcatactgtgctttagaaaacgccaatgctgaattataagcgacacgcacacaaccaaatgtctgagaaagcatga

SEQ ID NO: 140 - DNA, 23774 bp, synthetic construct
  misc_feature 1..23774: note = Synthetic
  source 1..23774: mol_type = other DNA
cgtggggagcaaacaggattagataccctggtagtccacgccctaaacgatgtatgctagttgttggaatgctagtcatttcagtaatgcagctaacgcattaagcataccgcctggggagtacggtcgcaagattaaaactcaaaggaatagacggggacccgcacaagcggtggagcatgtggtttaattcgattctacgcgaagaaccttacctaggcttgatatctatggaaccttttagagataagagggtgctagcttgctagaaccataagacaggtgctgcacggctgtcgtcagctcgtgtcgtgagatgttgggttaagtcccgcaacgagcgcaacccacgtatttagttgctaacagtttggctgagcactctaaatagactgccttcgcaaggaggaggaaggtgtggacgacgtcaagtcatcatggcccttatgcctagggctacacacgtgctacaatggcatatacaatgagacgcaatatcgcgagatggagcaaatctataaaatatgtcctagttcggattgttctctgcaactcgagagcatgaagccggaatcgctagtaatcgtaaatcagctatgttacggtgaatacgttcccgggtcttgtactcaccgcccgtcacaccatgggagttgattgtgctttaagccagaatactaaaatagttactgtccacagcaaaatcagcgactggggtgaagtcgtaacaaggtaaccgtaggagaacctgcggttggatcacctcctttctagagtacaaatactctttctcacaaaagagtattcatttatctcttgtccttgtttggatatcaaaggttgaaatgttgatgttgttttaagagcttattagatatttatatctttaatgggcctatagctcagctggttagagtgcacccctgataagggtgaggtcacaagttcaagtcttgttaggcccaccatttttaactttgtcttattctcccattttatttttatagtattttaagtgcttgattattatgtatattatttttgtaataattttttatttgctaaaaaatataaaatattttttttgtttgttagctattaacttatttagtcaataattaattcaatatttatataatattaaaactaaagtaagcataaagtaacaagaataatgttagtttttattttatttgttttttaatttaataattaacattatcttttactatgtttttctctttgtatttttaaatctaacataaattatgattgttattatgtgctaataatatttgctagtatttttaataaatattctaggttaatattagtagtatatatttattaagaataaaggagaataaatgtttaaaaaaataagcatatcattattattaatactaaatataaatgcaagtgaaattgatgatttaagcttagaattaaataaaatttacaacactcttccttatattacaaaagaaataaaacaagaccaagatgaatttctaaaaagcattaataactgcaaagatgataataattgcattaaaactttatatgaaactagaataaaagaacttaacactagtcttgaaaactcaaaaacttatcctaaagagctaatagaacatataaaaacaattcaagaaaactcaactgaatgttataaatataactacatgagatttgaacatggaagatttactgatgagccagaaaaatgcagaaaattaccaaagctaaataatttttggcaagatttttttagatacaaagatttaaaatttaagccaaaaatagtagatgctaagccttattctagtaaagaagtaaaagatactcttaaatattgttgggacttaggtcttgatagaagggttttaaaagttatagggcgtgataacataaatggtattgacaatgatgtggattatcattttatagaagtggataagaatggagagctttattttataagtaaaattaaaggtaaaaaatatatagaaagacataaaagcataactataagtgatgttcttttagatggcaaaaactatctagctctttcaggagaatatggaaatatactatttatagaaaaagatttttgtaattatcctatgaaaaataaggatttattagaccttttaagaaaatctaataaaatgaaactatcaaataatttttatgaagaaacaaaagaaacttttattatagagtataagggtagtgattatattttaaaatataagagacataacaattattacagtattacttttattgatattttagatatggtatctaatattatttatcaaaattattcagaagaaattgatagatgtaataaatttaaaatttttggttgttatatttaaaaaaggagaataactaaaaataaataaaaacaaataaagcttacaggcttacattacacagctaactaaaagctacataaatttataaaaaataacacaaaaaataagtaaaattttatttatatttaaaattatcataaaaagtaacaaattataaaaaataataaagatttttaatatttttatttaaattaatgctataataagaaaaataacaaaggtatgatatgaaaaaagtattaaaaatactaaaaatactttttataatttttataataattgaaataatgattgctattggttcagttgttgtaggccctactattggcagaggaaaaccagaaaaagatatattttggatgcttgtttgcttttttgtggcaaatgtttgtatttatgaatatttaattaaaataatagttttattttataaaggacttatactttatccactaacttattttaaagtttttataatcatattttttacaatacttttctttaaattaagaaagaaatttaataacaaaatagcttttaaatatagcataattcctatgataataatgtttatattagatatttcctttttaagagttgttcctgattactcaagtaaaactcatgaaaaaacagtaactttaattggttataaaaaatatcagcaaggctattgtttagaagaagataggatattacctaaagatgagctttataaaagagtggtgattgatgattttacaaagcaattaatatttaaagatattgtttataaaaacaaatataatagtattgagaaacacgagtatatgatacataaagatattaatttagataattacaaagattacttaagaaaaaatgcttattctaaagaatatgttaattacgatgaattagaatcggttgattacactaaatatttagtagttaaaaataatacagctggatttactaagcctattattttacctgtagggggtgttcgcgtttcaattacattttatttagatttagcatttgaatttaaagataatacatatggaacctatagattttatctttttgatgaatttgatgagcgtaaagataaagaaaaagagtataaacgtaggcttgaagaggttgataatgagcttttatggtatgaaaataatataaaaaaacaacgtatttcttataattataaatttgataattgtggttattcaaactttgatccagaaaaagaagcaattgagatttataatggtatttaaaattataaaaaggagaaaacatggcaaattttagattggatttaaatggtgattttacaagtgaaatattatcattatacctatggggacaaaaaagttctaaataagtataaagtaacaaattataaaagttctaattattaatcaaattcttttaaaaattatgataattttaagtaagaatttaaaaatatcacaaaaagtaacaaattataaaaaataataaataataataaagatttttaatatttttatttaaattaatgctataataagaaaaataaaggagtttaaatgcttaaaatttggaatgttgatatttttagttgtgattttaacttaagacattgattatattatatagcaccatataattttattaaaaaaaggttagatgatatgcaaagagattacgataaagagccgctaattatcaaagatattaatacattttttgattttttacctgcttttgtttgtataatcatatgttatattgcgtatttactaacagataatcccagctcttcattttatagaaatgcttttataattatgccatttttaacactaccttacataagaccttttataaaatgtaaaagggaaatcataattactaaaaatacaattagttatctaaataatggcgaagttttagaaagtattgatttaaatagtccttttaagatatacaaaagcttttcggtagctcatcataaatcgcaaaaaccccatgaagtaattcaaattttatggctttttctactacctggcactatttttcaatactttatgaattttattcttaaattattttattatatatttgcatttaagctaaaacactataaggtaatggattcagtaattttattgcaagatgaaaagattataaatattttaagcattgaaaaatattatgaacttgaaaagtattttaaagatagccacaatatcaatataaaagagcttaaaatttattttgataaatatggttatgtttatgaaaaaattgataattaaggagttaatgatgacaaaataagaatatttgaattatatggataattttaaaaatatttggactgtaatgtagttataattaaattctacataaatttataaaaaataacacaaaaaataagtaaaattttatttatatttaaaaatatcataaaaagtaacaaattataaaaaataataaagatttttaatatttttatttaaattaatgctataataagaaaaataaacaaaggaataaaatggaattttttctactacatgtcgctgtacttgttacactttttattgctttaattaaaccaaaaggttttaaaaaaaagctaatgtggtttatcatttggttctttgtttgttttggtgatatatttataggatatgttgctttttattataatgcttataaatatgctagaaacacatactttgagccttttaaaggagattcattatacttaggtgagcataaggtttggttgtcaggtgaaaaagtaagcaaaataagtgaatattatattggaggatggccaaactctatattgccagatttttatacgagattacttttagataataaaataaaatatattgaatataaagaagtaagtgagcatcctataaacaatggaaaatattttagattatattcaagcaatgaagatgataaaaactgtgtagcatcaaaagagttaaaaactagactgtttttttcgataagttatgttaaaaacgatggaactaaaggttttattgaatatgatgaatttttagaactatacaataaatattataaaaaatatttagaaaattataataaatattatgcttattgggattattttttagataaaaatatctttcatgaaaaaattcctactgaaataaaagaattaataacatatttaattaaaatttataacatgaaaaatagtaatataatagcgtttatagattatttgccaaagtataaaagtataattgctgagcttgaagaattctacaaaaataaatgcatagcaagagttcaaatagataaaaatgaagtatcaagatatgaatatgtagaatgcactaattctgattatgaatatatatgcgattatcctgatataaaggataaagcttgggctaaatttaaatactttgcttacataaaagataggaataataataaaaaaatagctcagagtatatttacttataaaaccggcaaaccttttcttttatatagcacaatagctgaagttactgccccacctgaagttctttatggttctacaaaattatgcaataaaaacataaatgttggtgtttattcagatagcgaatgtcgcaatatatttatagaaaattttattaatgataaggagctaagaaatgagtgatttttctaaattaaaagcatatagtgagataaagttataaatatatttaagtctttattttagattttatataatttataaaaaatttaacttattattaaaattagcataaaaagtaacaaattataaaaaataataaagatttttaatatttttatttaaattaatgctataataagaaaaataacaaaggaaaataaatgtttaaaaaacttggattatcacttatgttagtttcattattaagtgctggattatttgatatatttcataaagataaaataccaaaaactcccatatatactttatttgatttaagcaaaaaaggatctaaaattgaaatactctttaagccacaaagaaaagatataggagagcatgtaggattttatgctttttatcctttgcgttttaaatatggtgaagtaggtaaggatttttattcagttgatttatacgataaaaaaacagaaagcaatatacgagataatccttattatccacttgcacttgatattaaaatatatgaacttactaaagatggtgatgagatattggtatttgataaaatcgctacgccaaatgcaaatacaaatgtagacagtcttagaactatgagtataaaaaatgaaaaagtttttatggcggtaagatatcttggattttattttatacctgagaataaaacttataaagcagtcattacaaatctaatagatgatgataatataaagggtgattttacaaaaattgcaattacagtttatagaagaaaagtttaatataaaatgatgcacccccccccatcatctttaacttttatttttatacaattatttaatttacattaatttattttactaatatcatataaaatatttaaaaaacataaaataaaaataaaggttaagtaacaatatctatgctaagcattaaaaaatataataataatttcataaattcatttcttatttattctttttatacaaaagatatcaacaaacaagatattaataaacaagatatcaacaagcaagatattaatacaaaatctatcaaaaaactaactatcaatacaacaagtatcaataaaataaaaaacacaaatataagcaaagttttaaacacaaacaaaggcaagtataaagacttaaataaggttttaaataacaaagcaaacaacttcacacataacaaacaagcatatacccttttagaattagttatagttattgtaataatagcaatcttatcaagtgttgcattatctaaaatacatagtattaatagcttagaagaaagtgcaagagctttgatgaatgatattaagtatgcacaaataaatgctttaagttatgatttttatgatggagcaaataatgatgattataagaaaaaatattttagacttaggtttcattgtatagcaaatacttataatgcaaaatacaaaaaatatatttgttctaaaaataaagaaataggctatacaatctttgcagacaaagctggtaagtcaagttctaatcctgataaaaatgaaatagtaaaagattatataaataaaagcttattaatagcagctccttttagtggagttagtatagataaaagcttatttaccccaagagctaatttaagtaaaagtgcaaatattattaaagctgctttttattattatgataataaagcaaaaattaaaaaaactagtacgatttattttaatgaatttggtaatttatcaagtaatatatatgattttaatagtattcagcactattatataaaactttcaagcaaggatgattatatttgcataaagcttaattacataggtttttctaaaatagtagataaaagcgaatgtattaattttaattaagctaatttagattgtttttaatttatttaacacactgcttaatccgttctttaatgtaaaaatactacttgctaaagaatatagctttttgccaaactaacaattaagacttacaataatcaatatattttagataaataatttggttagagaaattaaagaagtgcagtaagcaaaagataaataagaagaaattgtgtttcaaaccatgttttgctagaattaggtttgaaagattggcatcgttggcaccgattcagcactcgaaacgtttcaaaccatgttttgctagaattaggtttgaaagtcttctaaaattgaagtttcaagtagcttcatctcgtttcaaaccatgttttgctagaattaggtttgaaagcaaaatttgcgatataatgacgataatgaactgaagtttcaaaccatgttttgctagaattaggtttgaaagcgataaaccgaattgtctgcatctttaaatgctaggtttcaaaccatgttttgctagaattaggtttgaaagtatgaagttggaaaaagatgtttaattcgtactacgtttcaaaccatgttttgctagaattaggtttgaaagatcaacgttaattaaatattcgttattaacatatgagtttcaaaccatgttttgctagaattaggtttgaaagcatcctttcttcaagtggtttatctattaccacaacgtttcaaaccatgttttgctagaattaggtttgaaagaattcttcattagagaaatcagcatttaaagtattgtttcaaaccatgttttgctagaattaggtttgaaagcgagcattctgactgtcttcaaaaccccaatctttgtttcaaaccatgttttgctagaattaggtttgaaagcagcaaatcgtggctggtggtgtgctagagcttgagtttcaaaccatgttttgctagaattaggtttgaaaggttttcttttaaaaattttggtaagctttttttgtagtttcaaaccatgttttgctagaattaggtttgaaagtaagtgcttacataactttttggaaaaatatttttaagtttcaaaccatgttttgctagaattaggtttgaaagcatcctttcttcaagtggtttatctattaccacaacgtttcaaaccatgttttgctagaattaggtttgaaagcaagatttaatcttgttaatttttgcagcgactttagtttcaaaccatgttttgctagaattaggtttgaaagaacaaggaacataagtctcttgtagttagcaaatcgtttcaaaccatgttttgctagaattaggtttgaaagaaagctattggtggtggcattcctaatcctataaagtttcaaaccatgttttgctagaattaggtttgaaagagctattaataaacaaattaatattaaaaaagatatgtttcaaaccatgttttgctagaattaggtttgaaagttctttacttctagtttcgccaacaataattctgtcgtttcaaaccatgttttgctagaattaggtttgaaagcaatatcaaagaagacaaggcaatgtttgtttgtgtgtttcaaaccatgttttgctagaattaggtttgaaagtagccaattatagagactacttctttagctgtttggtttcaaaccatgttttgctagaattaggtttgaaagattaaaactccgcattcaagaccagcgtgaatgcttggtttcaaaccatgttttgctagaattaggtttgaaagagctagataaacttgtctagcttgtaaggatttgagctaacttaaagtttgcttatttttccactttgaaaatttcggcaaaaaacagccgttttgtggaaaaataagaaaaatttaagcttatggttaagaattttagcctaatatatcaactcaaacctaattctagcaaaatatttaagagtttgaaatcaccacaaggttggtaaaatatcgggcaactggcttagccaccccgataaatcttattagttaatctttgctaaataaaattccattaaaacataaatttaggagaaatcatgaaaactcacattagtatagatatgggagcgaaaaataatggggtgtttttagctcatacaaaagatggcaagattatagataaaactgctacgaattatatctttgaaccatcttctataaattttttaaaaaaagatagaaccaagaaaagacatcaaagaagaggttttaaaagaacaagactagctagaaggcttttagatgaaataatcaaaaaacttaaaaagcaagatttaagtcaagctgaatacgagttattatacggattgcttaaaaatcgtgggtttaattatataaatatagaatttgaaaatgatttgagtgatgagagtttggagattttaaacgaaattgatgcttatgagtttaaaaactgcgttagtaaaaacgattatgagttaaggctttctgagattgctaatgaatatgacatagatgagttttgcgagtttttggctaaacaagtagcgttgataactcaaaaagatgaaaatgacaaagatatttataagatagctgataaaaaatcaattttacaaatgtttgaagctttaagaaatgaaatgcttaaaaacaataagcatagagaaagatacctaaaagatataaaagagctttgtcaaggtgtggaatttaaaagcgtaatttcaaagcttaacataagcgttaatgagtttgctaacattatcggcaatatttcaaactatcaaacaagggttttaagaaggtattttaataataaatttgatgataattttgatgatgaaaagctaagactacaaagcataaaaaatataaattttcttagctatcaaggcaaaaccgagctagaaaataaacgcataatgctagaaaatctaaaaaactcaagctatgaatatctatgcaaaaacgacccaaaaacaagcattccaccatatgagagaatgaataataaatctttgcaaacttgtaatgtcttaatcttaaaagataatcttagcaaaagtctaaaaacttgcttaaaacatatcctagaaaatccaaatttttcaagccttactatggatgaaaatggcgttatcaaagaatataatgcacttgatgaaaatgaattaaaagtagtttttcaaagatttttagatatatctaaaggatatttagaagatattaagctttatcctagggggttttataaatacgctaaatattttaaagatacgatatgtttaaatgatagcgattttgataccttacaagactttgcaaacaaatattatgatgaattgcttttggctaaaaagggagtattgtcaaacaaacttttaaaaccttgtggctgccatactccatataaaaacaatcttaaacatactcatcttagtattttgtgggctaaacctagtggatttagcgaagatgatgtaaatacattcgtagagtttataaacaataaagcaaataaaattaaaggcaatactactttaaagggctttttaactcatcttagtaaaacggctaaggcttatcaaaacgccttttataaagccttggaagatgaaaaggcgttgctagaaaataaaaccacaaatgataaagagttaaaaaagattttagagcaatatgaaaaagcctacgagctaataacaagccaagagatatttaaaaatgtagctaaaagcgataagttaaaaactatgataaatcagctacttcagactacaaacataatcttagatgatactaaggggtttaacaagctttgcaaggagcattcattacaaagcttgttaagaacaagtggcgagaaagctatgtgttcggtatttggctctgatagcgcaaggcttataaatggtaaggtggagatgtatattgataggcttgcttatgagattgtaaaggatatagacttaagcaaatcaaaagaacttcacgtaaatatagagcaaaatgcctttaattttgaaacagcggcagaaaagcttaagcttactaaaagaaaaccaaaagagcattttgtgatatgcccttatagtggggaaaagctaaatctaaataatgctgaatatgatcatatcttaccaagaagtaaatgtgaatataattcagaagcgaatttaatacctgtaaaatcatacgaaaatcttaggaaaaaagatgcttatatgatgtttgatgctttgcatgaaaattataaaaacaatctttataaacaatgtaaagtaagcaatgaaaaagagtttaaagcctttataaatgatactttaagcaaaataaacccagatgattatacaaactacaaaaacctaaaatactatgagcaaatcgcctttagacacgcactttttatgcctgatgagagcttttatactaaagccttagaattattaaaacaagataaattaaaaaccacaaccaacggcactcaaaaacgccttgctaaactaatagttcaaaaggcactagctaaaaataaagatttaaatatttatgtaaaattcgtagatagtaggctaacaagtgctataagacatgagctaagcaagaatttaccagagttaaaaaaggaagaaaaacagcaaagtcatagccattgtatagatgctagtgtggtgttttatatagcaaatgctgcaaaagatagtaaaactaccattataaacgatatatcaaataaatttgagccaaaatatgattttaatgagatttatctacaagaaagcattatgaaaagcccaaaaagtaaggtatatttagagctagaacaaaaagaaatctcaagaaaacagctttttaaggatacgatttattcgcttagatatgaaaaagctgaaagtttgagtgatgagcatgtaagtattttaaaagagcttgatttattaatggaggttaaaaaacttaaatcagtgaaagtgcatataaataccaaaaaggttttcgatttaatctttgcaagttttaaggcaaaagatataaaaacgctagaaaaaatcaaatttttggataaatttttggtatcaagtgtgagaaaagatattttggatatattttttgatgctaaaaacaaagaattaatcaagccaaaagataagggtgcgaatatagaaaaattctatgaaatcctagtaaaaaatggtgtaaaagataaaagtgaagtagaaaaaatccaaaaactttatatagatagtttttatacaggcaatcaaaaaaatataaaaagagctagagataaacgccgtgttacatactcgctaagtgtggctggtggggctaattttgtagtgcgtagaaatacgggttatgagggtttagcaaatgaaaatatcgctactaaaaattattttgataaagataaaatagtgggtataaaatattacaccaagaatgttttaccttgcaagatagaggatattattaagattttatcgcttagcgataacgctgctgagatttataaacttagcattactaaagacttaccgcaaaagataattaaacttgagtatgaagtgagtcaagctgataggcatactgttaaagtatattttgataaggttaaattaggctatgatttaaatatttttaagggtgatttgagtttaaaaaacgaagaatgggtaaagttttgtaatgagtgcttaataagcgaattcgcagagtttttaggtaagccaagggattataaagctagtattatttgtgataattttagtgttttgggttttagctactcagcagataggacttcaaaagcaaatagagagattatgaaagataatatatgctaaaacatctagtagtggatagctacggggtgtatttagggttaaaatcagcaagattaatagtcaaaaaagatggagttttattaaaagaatacccacttaaaaacctaaaaaccataagcataaaatctcgtggagtagggctaagtagtgatttagcctacgcttgtgggatgcgtggagttaagatattttttaacgactttaaatctcatttagccctacatactttgcacgaacataaaagcgtaaatgtgataaaacatcagattttaagcgagcaaaacggaaaagacctagccttagcaaaagagctaattataggtaaaatcaaaaatcaacgctctacgattttatacttttcaagacataaaaaccaagaaaaagctaaactcatctcaaacaaactctcgcttttaataggagaacttaaaaaatttaagcttagcaaagatgagatttttggtatagaaggaagtgctgcggctatgtattttaaatatcttagcgagtgtgaacttttaggcgatgaatttataaatcgcacgggcagatttgcagaagataatataaacaaagccttaaactatggttatgcgatacttcaaaatcacatttataaatgcgtgataaacgctggacttaatccttattttggggtgcttcatagcctaagaagtgctaaaccatcgctagttttagatatcatggaagagtatagaagctttgtagtagatagaaatgtaatcaaattaagcaatcgtctaaaaggcgattttgccgagcataaaaaattcatagcacaacaaatcataaattctttaagtaaaaaactaaactacaatcactccaaactaagcctagaaagtattatgcaaaggcaagtttataagcttagtggttttttgtgtggtgctaataattatcattcttatgtgtttaggtggtaaatgtatcttgtaagttatgatattgaaaatacaaaaaatagaacaaaactttttgaagaattaaaagatttagggcttttaaatatccaaaaatcagttttttatggagagcttagcaaaagtgagataaaggtggtaaaggaactttttaaaaagctttgtggtgatgaagacaaggcgtttttatgtagatgcaagatagatttaaatgatacgcacggatataaaaaggctgatttagagcaagtggagtttgattttgtataaatatgtttgcggaatttaaataggatttttatggaacttttaaaggctagtttgattaggcagtttgttttttgtcctaggatattttatttttataatttttgtgatattacgccaaagtatcctaaacatgtggattttggtaatgaatttcatgtaattcaagatgagctttttaaaagtcgcacatttgctaagtttggcttaagcgaatataaagcctataaaaatcaatatttagaagatgatgagctttgtggggtttgcgatatgctttttgttggagagaacgaagtggtggtgctggagtttaaacatagcgataatctaaaccttagcaatggggcaaaaatgcagctactcgcatacgcaaaaatggctagtaaaacttacgctaaaccttgtgtaagaatgattttatgctcatcaaatcatctaaagcataaggtttttaaggtttttccagatgattttgctaggcttaataagattataaaagatatgaaaaatcttttagataacggagtttttccaaacagcagtgccagccttaacgcttgtaatcagtgcgaattttttaattattgtgatgatagggagtgaattttatttataattaataacaaaagagatttttatattatgcgcttgttttggtattttgttttttattttttttattgtttgttttgtttctttcataaatatttcatgcggacattcggttatgtttatgcttaaaccatctttactcacaatgaaattcccagcaacttttccttgaatatttagcaattttgcttttttaggatattttttatacttatttaaaagagcattaatttgcattgctaattgctgattgttattaccattacttgcgttgtttgttatattttcaccgtttgtcggactaggctttgtaatgttgttatttcctaaatctgttggttgtgattttgcttcagttttacttatattttgtacttttttagtatgtttttttactatttttttgggctttatttcttttttaataccttcatcttgaggtattttttttactacttcttctactatgggttcgggttttataaagctaaaattaccagcattcatattgattgcattttgcttacttaattcttcttttttatcaagtttaatatttagcacagcataaagttgtaaacaaaaaactattataaaaattatagtaaatctcatttttcaagccttgtaataattgagtaattatttatattgttatcttttagtatttgaattacttttatgaagtctttaaaaaatgtttcttcatcgcagataatattaagcttttcatttttatttaaaagatttattaattcatcaagtaaaattgtattttcgttatattttagctctcctaatttatttattattaaaacatttgcatctgtatttgctttaatttcgcttttgctaataggtggacttacatcaatggctttgtattttacaaaactttgtacgctaagagttattattataattactagcattacatcaattagtgggattatatttaaggttggcttattcatttgctttacttaaaagattatttatttttttatattttacataaagctttgcgttacatctatcaaaaatattaaataaaactaatgcaattattgcaaccacaagtccgcccgcagtagcctttaaagcagcacttaatgtacttattattttttgagtatcatcaatattattaaatcccatcataatgccaaaaacagttcctaataaaccaatatatggggcattttgagctattattgaaagaataataagatttttactagtgcttagttcaaattcttctaaacttttataattttcgtatttaaaaaaacaataaaaaacaactctttcaagcattacagcaatgcttaaagcgttcataatagctaaaatagaaaaaactataatatcaacctcgtattctaaatgtaataattcaaacattaaaaattcgctcctatttcaaaataaaacgctcttccttgtaaaacactatattttccttgaggcctttttgtgttaaatacatttgttatatcaatacttgcataagtatcaacttttttaattttttgttcgtatttaaactttaggtcgtataaaatgctagatttttgatgtgtaacttcataagctttcatctttgttgtatcgtttaaaatataatcatatgagttttcataatcaaaacctgcttcataatgaataaaatttactagcgtaaaattattgtatttatgagttgtagcaagtcttaaagtccaaggtttagaaaagtttaatataggcttattttctatttttataacttttccttcccacataatattttctttatcatatacccttccatttttatcaggcattgtgctgctatcaagtaagctaaaaaggtcggttgtgtaatcttgtatattttttttatgtattgtgtaatttgctattagggcaaaatcatttttgataccaaaaatatcaatattatttgcatttgctaaggttaaactaaaattatgatttttaattttgccaatatttgcataatatgttttttcctttccatcagcttcaattattcctaatctttttgactttgctgtcattatttgctcttttgaatttctaaaaacatatttaaagtcaaaattaaaattagatattttttgatgatataaaaacgctatttcatcatcataaggagtttttaattttttattactcattttagcttctttaaaatccgctattagtttccaagaatcttgagctgtttttcttgtgtatgtttgatttgatgaggaaatcatagaatttaaaatataagcataaggcattcttccataatatcttgcatagccaagttttattttactatcatcgttaaattcataacttgctttaattctaggggctagattaaaattattatataaatcattataatcagctctagcaccaaatctaaaagtaaaatcattgtaattaaactcatcttctaaataaaaagcataataattttgtcttattttatgcaatgtgccatcatattttagcaaggtagataaaaactgaccgctattattaaaagaattatcctttaaacaagcttcatcattagctaaacaatcacccgttaattttgtagctcttgcataaattgcagcacttgggtctatttgatgtttaatgctggttttatcaaatacaaaaccgctgtttaaagtgttgttatcaaaaaaatatttaaaatcaaaatctagcgatagggtattttgctccttatttactttagtagttgaaccttcttttgctattttagaattactccaattatttatattagagctttgccatattttcataatgctagtatcagattttctattataattaagcttagaataagatatgtttgaatctaattcaaagatatcatttgagtaaaacaagttaattttagaaattaaattgttttgatttaattcatagtaaccatttttattatcacttgcattgtattgttcaaagcttggtgcgtaaaaaatgctaggtgttaatatataatcattattagttatgtagtttaattttaataaaagattttgattaatatttttaattttatatgtatttttattaaaagtattgctaggctttgttttaatacttcttaaatctgaaaaattaaataaaattcccaatttttcattaaattttccagataaagcaaaattgctattatatttttgccatgtctttgaacttgtgtttgataagtcgttttcataagtagaaattcttgcttggcaagatttatcgctataatcacaatcagggtataaggttttagttaatttgctagatgtaaaaccaaaattaatatatccgctaaaatctttactaggattttttgttttactattaatgatcccgcctgtaaaattaccgtatctagcagggataaaactatctaaaagctctatattatcaagaatatttgtatttaaaaaaatcccttgtgatggggtgctaaattgtcctttatcatctagggcagtatttgaaccagctgggtcaatatcgtttgtaatactaataccatcaagagtaaaattattttgataaaaaaggcttccgtttatgcttatgttatcaggttttatgtttgcgccatcaaagcttgaattattgcttacatcaaaactaacatttggattatattttaaaattgaacttatgtctttatttgcgtttgttatattgtttaaaaattctttattgtaaatattattttcaattatcggagtagaatttgtattaaatacttcaatttctcccacattaatctgtgcaagtaagtactttgataagagaataaaaattaagctttttttcattaatactccaaaataattaatatgatattataatgtaatgaaaattaaaatcactttaaaattaaataaatattaattattttttttataaagtctttgcaaatttttatctcttatgattatgctagattttttgattttattaaaatatgtatcaattaatactaattcaatattgttttcatatttaaaaatactaaattttttacaataatttgtaagacaattagtattttcatcaatatcaaattcatcgtaattatccatataataatcttgcaaagatattgaactctcttttattagtgtatatttttttgcaatttcttgtttaagaatattgtaatctttgtttatttcatattttatttgttttaaagtattgttttgaaacataagccataaaaaataattttcatttcttatcacacaggcaatacttcttaaatttttataagcattttcttccttaaacatttttttaaagatacgacctttttgattatttggtaagaataaagagcgtaaattacagttgtatggcttagcttttgcatattcgtaattaaaaaaagcttctacttcactactattaaattcatttatttttaagccaaaatcataagcatttatgttcaaaataaaacataaagataatattattttcttcatttttttgcctttaatctatcgtagttattacaagatgtaaatactcgcaatttacaagcttttttataaaattcttttgctttttgcagatttttttgcctttcataaatacttgcactcatagcacaagcgatattatgatttaatttacaagcttttaaaaaatacttaaaggctaaggataaatcatttaaattgtattttttaaaataataaaaataagctaaatgataacaagatgcagcgtaattgttggtacaagctagtttgtgatatgaaataatttgttgaaaatcactattttgcatatcaaactgccacatagtagcaagttcataacaagaagcgtaaaagccttttttgcaagaataatcataatatttactagctttttgaaaattttgttttgtattagcaagagcgtatttgtaaatatttgcaatattataacaactgtttaattttcctaatttacaagcctttttagcatatttttttgccaagactgggtctttaaaaaccatcattgcattaaaatatgtcaagcttaaattatggcaagcttgagcattatttttattgcaagcaatttgcaaatattctcttgcttttaataaattttcttctttattgctattttctaacagttgttttgccaattgcaaacaaacagaattttgtttataacaatccttagctatgtcgttacttgctaataaataaacataaaataaaaaaaatattaactttttcatatttaccacttttttattttaaatattaataaataattattaatatcattataaaaaataaggaaattattttgagaaaaattattttagtattttgtatgttttttgctttaataactgatgaaataaatatagcaaagataagagaaaatatttttaatctaagcgatgaagaattaataaaatcagcaaagctattaaatcttgttccaattcctagcaataaatatgagttagaagagttaattaagaatattagtcctgattatgaaaaatacccaacaacagataaaagaatacaattaggaaaaaaacttttctttgacccaagactttcaagaagtggaataatatcttgcaatacctgccataatttagccttaggcggagttgatggaattggtgctagtacaggacataaatggcaagcaaattcatcgcatctaaatgctccaagcgtttataatgctgtatttaatgctaggcaattttgggatggtcgtataaatcatttaaaagaacaagcaaaaggtccattacaagctaatgtagaaatggcatctagtagtgatgatttagtagctaaaattaaaagcatacctgaatatgtagatgagtttaaaaaggcttattcaaatgatatagatattgattttgatttaatagcagcaagtattggtatatttgagcgaactttaattacgccatcaagctttgatgaatttttagaaggcgatataaatgctttaacgagtacgcaaaagcaaggtttaaaattatttataaacaaaggttgtgtgatgtgccataatgggataaatattggcggagcttttagaggttttggctttaatagataccaatatgtaaattatggagattttagaggcaatgaaaacaatagagtaaaggttccatcgctaagaaatgtagcaaaaacagcaccttattttcataatggcagtgtatggactttagtagaagcagttgaatctatggctagaattcaactagctattgaattaagcgaagaagaaataaaagacataattgcctttttaaaatcacttagcggtaaaatgccacagattgtttatccagaattaccagcttcaagcgatgaaacaatacgcccaagacttgattattagttttaaaaataaaattaataattaagcccaaattcaaacattatatttctacccatagcataatcgtaagaaagttgattatttactttgctcgcattgattttattttttgtatttaataaattttcaatattaatattgctaaaaaattctatattatttttaattttatgtttatatgaaatattaatatcccaagtaaaataatcatttagcttaataagctcatattcttttatagcttctattttattgtaagtactaattaaggcttttttgttaggtataaaagttaataaattagtaaaatttaaatcatactgcataagttttaaattgtgcataaaaacaatcttgcatttatcgtaataatcaataataggcaagtcttttgataagattatttgattattgtattttacctttgtatttctttgcctttcatcgcttttataatctttaaaattggattttttatttgtataactagcgcttaaactaaagtcgtttaggagatttaatagtttaatgctatttatatttgcaatatcaaaagaaaaaatatcagccttactctttccataatttgtataaactttataatttgatgttagtctttcatcatttaaatcatctaaagctaaactttctttatcgcttaatacaacttgattttttgcaagtctttttatatatttaaaagctaaattaatattattaatttgcgctctgtaaaaaatactaaattcatcattgtatggtcgttttaagtctttaaaattatatctatcctttacaaagcctgttgctttaaaatcttcatctggagaatttctactaaaaaattgagtgcgtgagtagattgcatcatataatttgtatgcaaaaaaactttttccataatatctattatacccagcgcctaaaaaattactttcatcttttagaatatcaaattcagccactgttcttggagctatgttgaatttgtttattaaagcatcataactagctctagcgcctagccttaagtttaatcttttatattttatttcatcttctaagtaaaaatcaaaatcattagcactaatgctttctttaaatataggagtaaaggttagccctgctacatattgccctttagctttattgccttgcctgtcagttacatcgcccattaggcaaaacatatcatcgcttttacaagtataatcattagctataattttagggttataatattctcttaattctttaagcgcattataacttgcttttttatattttatttgcaagcctgcaataagattatgctctaaattttttaaaatataagcactttcaaaatctagcttgtaatttaattcttttgtactttctttaatatcagaatatccacctttactagaatatattcttgtaccccaatttgcaacatcatttgtaaaaaaagcaatttttatgtttttatcaaaatatcttgcattttctaaaagactataagataaactatggcttaatgaaaaattatcatattcgctaaataactcaagattgctaattataccgccaaattttgcttttagattagaatcaattaccccttctaaaaaacctgtataaacgctaggagcataaattatgctaggttttaaaatgtgattgtcaaaagcaagaaaagcttttaataaaaaattttcattttttctactttgattaggataaaaataattttcttt

SEQ ID NO: 141 - DNA, 24654 bp, synthetic construct
  misc_feature 1..24654: note = Synthetic
  source 1..24654: mol_type = other DNA
gaagcgatgagttattttacaaagttatcagaagatgagagaatccaagagttagcctgtgatgagtaccgaagtaaagatggatttatagattagacaggcagggctggatggaagaaggcatgaataagggaggtaagaaggactgcaagaaatttaaatatgctaaaagaaaaagtagagatggcttttacatctaaaattacaggtttttctaaagaagaaattgaaaaattaaaaaagaattcttaaaaaatctagtcttctaattttagagatattctcttttttttagaaaatctttattaaaaatataaaggatatttaataaggtaatccccaataaaatataaaagctagagtcttaataaatttaggaaaattattttctataataatgtataaagcaaatatagaaaataaaagaagatatatagaccatttatatttttaaggttacctgtttttttatcttttcattgaactaactttgtaacataattttttattaaaatcagaaatgaatattttttgattttttatatcaatgagtcaaaagctttgtaaacttctctctatctaattatgctccttgaatttttttcttctttctgagctttcttattataaaacagtatcaggtctaggcaaagcactttcttcttgataattctattttgttctcttagattctcattatactcttcttcgaaaaatcctgtaaagaaaaatcttcactactgttaggtagaaggctgaaactagtttagtaatcaccttaaaatcaacataagcttttagaagatttttcctttattttgtaggttttgaatttcaagcgagatgatgaagttgctgttgacccttttgtataggagcgatgttttaagtcgtttctggataaaattataaatattaatcttctatattcttaagtatttagaactcatgtaatgttgtattttaaacaaggctatcatctggcttttcttttgtgtgttcaagatttttcaagaaataaaacaacagatttttattcagggaagaatttatgatgtgaaaaaagaaagtgttataaaaagaaacttattttattcatgaaaaggaattctctttcaaactcgtttattaagaagaataaaactttatcatttataaaataactcactaagtgaattgccggacaaaagtaactgtaaatcttataaaaaaaccttgaatctctttacttattaaagataataaaaagctctttttctatagatttttttaattagcaaagctcattggaactaaaattttgtcttttttctctctcataaaaagctcctaaaaccctttatttaaaggcgactataaaaaaaaattatatattaaaaacaaagcaaaaggagtaaaaatgaaagaaagagaaatgagagtatttttgaagataatatttttaaatttagtttttgtgctttcttgtcaacaggtatctcctgaagtggattttcctattgaaccagaagtatctcaagttaatttatcatcaataggagaagagtcttctgaacttgagacttcatccctagaagaagaaagctctgaacttaagacttcatcttcagaagaagagtcttttgagcttgagtctccatcctcagaagaagaaacttctgagcttgagtctccatcctcagaagaagagtcttttgagattcagctttcatcagctcaagataagtcgaaatgtaatatcacaaattataaatattacctgaagtatgaggatgattttaaggaactagataaaaccgttagagagacaggttgtaaggataaaggatgtttaggaaaaggatgtcaattagaaggagctgatttttcaaatcaagatttgagaggttttatttttaataatgcaaatttgaggggagcgaattttaaaatggctaatatagaaggtgccaagtttgtaaacgctgacttaacagatgcgaatttagagacgaaccttgatttgagtgattttacagatgccttattaaaaaatgcgagttatgattctatgttgaggttcttttctgtttggggaggaggtatagcttctccagacaaaagagaaatggtagatatccatgaagctagacttgctgaaatgagagttaaaagggagggtaaagattgtgatgctagaaattatctgagatatactcgtgatttaactgcttgtaatttggaaggtctcgatttttctgatttgactttagacaattatatttttgattatgcaaatttgaggggagctgattttagaggagctaaattgataagagctagttttaaaggtgctgacatctctttggctgattttaggagtgcagatttaacaggggcgaatttagagacgaaccttgatttaagtaattttggaagtgttactctactatacagttctactaaattagaaaaagctacctataattctctttttagagtgagtcttagtttttttaatattcttattaccgagattttcgcattcacagccacaggtattagaaatccagaaaaaagaggaatgatagatattagatacaatttgcaaaattgatggactaaaagggtttattttaaaataacaaggaagaaaaaaaagcacatttatttttattattcctaagtttaaatagtcatttaaaggaaggtttaggacaaaaagaagaaatagaggaagagttcacaaaaggaagctttcagtctaaaatttatgagtccatttgcttttgcaggtttagcatagattggagtttagaaagacccaagtcattacattggaaaatttaaaagataatggtctcatggagaattatgaagagttttatgaggccattttagaaagaaagatatatagaaaaaattcaaaaatcattaggaacttctggtttagtatgcggtataacagcgactttctaatggattattttgataatattcttttattatttaatatctatcagatatcattgttgatagaattttaaaagaattaaaaaaaagaagaatcataaaatagtgttaattatgtttgtttttgcaaataatctgaagaacaaacagaaaaaaatgagtaaagacctggaatatgctggatttgttagcctatagcttgtgatatgttatttgctatagaaagtcaaagaaaactgctgacaatgggttgagcaacaatggatggtaaaagaagtctatcaagattatgattggcaacagtatgaagctaatagcagatgctatagctcaaggtttaggagctactagaatgcactcaaagtacctttttagatgagataattaagaaggctgaacaagtcatcggtttatatattgaaaaatgttttttataatatttttttacttaattgttataaaattaaaaaaatggaaaaaaaaggaatgttagattttataaatttcatatacatatggcaaaaggtacttggaattcagaagatagaggaatggtagattttagattcaatttataagattgaaaatatgagctaaatttttttatagaattgacaaaaacgtcttttttatttaatttatctatggaatggaagaaaaaaaaatctctttatcaaatgacaaatttcaaaatctagagagtcctttttttacatctcgcatggatcgcattgtggcttggagtcgtcgtaactctctttggcctatgacttatggaacagcttgctgtggaattgaaattatgtctgttttaggacctcgctatgacttggcaaggtttggagctgaggtggttcgtttttcacctcggcagtctgatttgatgattgtagcgggaactattacagaaaaaatggctcctatcatttctcgtgtttatgaacagatgatagaacctaagtatgttattgccatgggagcttgtgcaagttcaggaggtttttatagagcttatcacgtgttgcaaggagtcgataaagtgattcctgtagatgtttatgttccaggctgtcctcctactccagaagctgttatagatggagttatggcgattcaaaaaatgattacagaaaatcgtccacgaccttacaaagatcagtggaagccgggagcttatcgttaatgagttctataaaacagttaaaacaagatttaaatcagagatttaaaaaagaatttgtttttaatcaaatatgtcattctcatatattagagttagaaacaggagagttaacttctgttttacaatatctcaaaaaatatcaatcctttgattttttaatgtgtgtaacaggagttcattatcctgaacgagaaaaagaatttgaagtttgttatgagttgttttctgtgaaaaagatctctcgtttgagaataaaagtctttgttaaagaagaagaggtgattcctacagctcaatttatttatccaacagccgattggtttgaaagagaaatttatgatatgtatggtttgaaatttaaagatcatccaaatatgaagagaattctaactcatcatcaatttaaaggatatcctttgagaaaggattatcctgcagatttacagcaacatttgtcagaatctctggaattttctatggataatgaaccagatggaaaagctcctgatttcaaagataaggatttgattcctctcaatataggtccctctcatccagccactcatggaacccttagaattatggctcttatggacggtgaaaaaatttatagggctaatgtggaaataggatacttacatcgctgttttgaaaaaatggctgaagttcatccttataatcaagtgattccctatacagatcgactgaattattgttcttctcctatgaataatgtgggttactgtaaaactgttgaagaactcctagatgttgaaattcctccaaaggctcaagctatgagaatcattctctgtgaactatctcgtattattgaccatattgtatgtatcggagccgctgcgtttgatttaggtgctttaactggtttttttcaagcttttacttatagagagaaagtttacaccctttttgaaaaactttgtggagctagattgacagtttctatgactagggtaggaggcatggcaaatgaacctcctaaaaattggtttaaagacattcttcagttttgtaaagaaatgaagggaggaattaaagacatagacactttattaacttataataaaatttggatgcaaagaaatcaaaaagtaggagtgatagatacagaacaagctatttcttggggatatacaggaccttgtcttcgttcaacaggtttaaatttagatttgagaaaagtagaaccttattatggatatgaaagtttggattttgaaatacctgtaggaacaacgggagatgcttatgatcgctatctggttcgtttagaggaaatgaggcagtcggttaaaattatagaacaagtgtgtaaaaatgtacctgcaggggactatacgattcgggataaagatattgtgttaccagaaaaaaaagaggtttatggaaatattgaaggattgatgaatcattttatgctggtgatacatggcttaaggcctcctaaaggggagtgttattctgccacggaagcagcaaatggagaacttggtttttatcttgtcagtgatggaggtcctaagccctatcgtttaaaagtaagacccccttgttttcctatttatcaatcttttcctcattgtattcaaggttttttaacctctgatgcaataactcttttaggaagcatgaatattattgcaggggaattagataggtaaaattatttaaaaaaacaggtatttatgaaatcatctcagcaaagctctcagttaaataaagaaaattctcatcatttcaaggaattttctctttctaaaaaaggtctagagattgtacaaaaggagatgactcgttatgaaacgaagctctcttgtgtgattccctgtttgtggcagattcaaaaagaaaaggggtggatttctaaatccgctgtgtcttggctcagtcaaatcactcaaattcctgaatctcatatttttgaagttcttatgttctataccatgtttaataaacagcccgttggtaagtatcacattcaagtttgtacaaatgtttcttgtgctttaaagggaagccgtgagttggttgatgagctttgtaaaaatttaaaggtgaaagaaaatgaaaaaagtgtttgtggaacatggactgtttctagggttgaatgtttaggagcttgtgatgaggctcctgtcattcagttaaatgacgagtatttagggaaaataaaaaaagaagacatgctaagttttttaaaatcaaaagcggagtaacatttttgtaatagggatttaaagtttttttatatttgagttaatgatagaaataaggatttaaatggaacataaacttttaacagaacattatcatcgtaaaagctattctactctagaagggtataaagaaagagggggctatcagactttaagacatgctcttttaaaaaaaccacaagagattgttgaggaagtaaaactttctggtttaaggggtcgcgggggagctggttttcctacaggtgtaaaatggagttttttacctaataataaggaagatcgttatcttttatgtaatgcagatgaaggggaacctggaacttttaaagaccgaatgatcatggaaaaagctcctcatcaattaattgaggctatgttgatttcagcttatgctattcaggcaaaaaaatcttatatttacattagaggagagtatcaaaaagcctatcttttgcttttaaaagctttagaagaagctcgcatagaaggcttgattggaaaaaacattttagattcttctttttcccatgaaatggatatttatttaggagctggagcttatatttgtggagaagaaacaggaatgatttcttcattagagggaaaaaaaggtcaacctaagttaaaacctccttttcctgcagttcaaggttacttaggaaagccaaccatcgtaaacaatgtagaaactttagttgctgtgattcctattgttaaacagggagctaaagcttaccggcagattggaacagaaaggtctcctggaacaaaaatcttttctttaagcggggatgtgttaaatcctggaaattatgaactccctttaggttattcacttatggatttaatctatgatttaggaggaggcatgagagcgggacactctttaaaggctgtgattcctggtggttcttctgttcctattttaacggccaaagaagctgagagaacccgtttggactatgagagtttaaatgaattgggaacttttttaggatcaggaggggttatagttttagatgactctagagatatgatggatattttatctattatattagatttttatcaccatgaatcttgcggacagtgtactccttgtagagagggaacaggatggttatctaagcttcttaaaaaagtctgtaaaggcatgtcttctcaaagagattggattttgattcaaaagattgcagagaatatgcaaggccggacgatttgtgctttatctgatgcagctgctatgcctgctattagttttatgaaaaaatttagaaatgaatttgaacagtgtttgtatgaaaatactaatagttccgttaaaggggtaaaggagtcaaagcatgcctaagaaaaagatttcttgtcaaatcaatggtcattctattcaagtcgaagagggaagtactattattcaggcttttaaaaaattaaatcaaagaatatgccattactgttggcaccctggtttaagtgtgtctggagtgtgtcgtctttgtatggtagaaattgaaggacaaggaaaacttcaaattgcttgtaacactcaagttcaagaaggcatgaaagttagcaatcaatctgaaaaagtaaaaacagctgtaaggtggggtttagagtatcatttaattaatcaccctttagattgtcctatttgtgatcaagcgggagagtgtgaacttcaagatcaatatatggaatttggttcttatgattcttctatgtcagagagaaaagttaaaaaaagaaaagtgcttgatttaggatctaaaattgttcttgatacagaaagatgtatcctttgtactcgctgtgttcgttttacagatgaagtgactaaaactcatgagttaggtatttttaacagaggggatagaagtgaaataggttgttttgaagataaacctttaaataataattatgctataaacacagttgatatttgtcctgtaggagctttaacgtctaaacattttcgttttaagcaaagagtctggtatttaaaaacagcccaatcgatttgtacaggctgttcaactgcttgtaatacctatgtggattacaatgaagaaggtatttggagagttcgtcctcgttttaataaagaagtcaatggtcattggatgtgtgataaaggacgttttttatttcaagatatggatagaaagaaaagattacacatggctttagaagcgaatgataagttttggaattttttagaaacaaaagttgcctttgagaaaattaaaactcttttagaaaataaaaccgctcattttgttttaacaggacagtacacaaatgaagagtatgaaattttattaaaacatttttcaaacagtgttttttatatttggagtcaagaaggtcaatttcctaaatttgataaacttcttttgagagaagatagaaatcctaatacaaaaactttaaaaaagctttttcctaaaattaagcctttgacaaagttagagaaaaacaaaaatgagattcctttgctttttgttttaggaccagagaatttgatcttttatcctgacttagaagaaaaaacaaagctcttttcgcaggtgaagtctttagtttggttaggccttgtaaaaaataaatttttagtttgtaaagaaaacttttttcaaattcctatgaaatcctcttttgaaaaaacaggaactttcaccaattataaaggtttagaacaaaaaattgataaaatacaatcttttaactcacaggctgtatctgttgaagatattataaagcttttaaagacagataattttaaattaaaagaagacagggcttattttaaacaaaatcagtttttaaatagtaatcaaaaaatttggtaaattaaagatatctttaattctttaaatccgtagagatttgtgttttctaaatctataaatttattaagagctttattgtaaaagaataataaaaaactatttcttaaaagaaatataaaaatcttaaaaaatatgttgaaaaaaatattttttttgttattatttgatttaattattaaaaaataagcttattttttaaacaaggttttagatatgtcagaaaaaaatgattttataagtcctattgccgttgatcttggagctaaaaatacaggggtgtatttcactcactataaagtgggaagctctttagatgaaattcaaaaaaacaaaaaaggaattgtctataaacttgataattacactcttcttatgcaggaaagaacaattcatcgccatcaaaagcgaggactagatcgccgtcagatgcttaaaagacttttcaagttgatttggattaagcattttaaactagaatggaatcatcagatccaacaagctcttagttttttactcaatcgaagaggttttacttttctaacagaagaatatgaccctgaagttttagaagaatttcctcttgaaattcttgaacatgaagattttccaaaggagttgaaagataaattactttcttcaaattctcggcaatctgaatttatcaaccttcatcaagaaatagaaaacttatctaaaaagagtgatgatttaaaaaaagtaattaaattattaaaatatgaagaaaggaaaataaaaagacctctttttgtaatcactcgaattagaaagctaaaggattactgtaacgaaattctaaagacaaagaaaaaaattaaggaaaaaggaaaagtaaagctttcagagcttcctatgtgggttttagaagattggaaaaaaagaggtatcaaaagccttcctgaaacaaataaagaaaaaaacagtgttgatcttactagatacttgaatgagctttctcaagaaaaagtcgaagaaatatttgatagtattcctaaaactttagaagaagaaaaacaacttcaaaattcaatatggaatcgaaaaaataaaaaatttgaaatagaaaaatttcgttcagatttagataaattttcttcagaagaggaaaaaaacaaattaagctggattcaaactcatcttcatcatttggaatttgcattagaaaaaactgaaaatgaaattacatcaggagggaggcatcgaagtaaatactttcaagaagtagaagaggttttaaatcaagaatataatgagaagtctcctaagtatttaaaaaatttttgttataatctaaaatcaggaaagtattctcctttagatagagaaaaactgaaaaatttaattggaaacctgagtaattttgaactcaaccttttaaggtcttattttaatcatcaatctcatatcaaagcggatcaatggaaggaaaaagaattaaatgaaaaatttaaacattggattaaaaatatttggagagtgaatcctaaaaaagatagagacaaaggagatgatggaaaatatagttataaaaaactaaaagaaaaactaaaaaataaaaatattatagacttctttttaaatacagatcctaacttgacgattcctccctatcaaaataaggataataggcatcctcctaaatgccaaagtcttattttaaatataaattacttagatcaaaattacgaaaattgggaagagtggcttgaaaaattaaaaatagaatctaaggattatattgaagattatgaaattcagctaaaggatttaaaaagtgataaagagaaatcttattttggtcaagaatataaaaatgatttgaaaaaagattcaggaaaaaggacagaaaaacatttaaaagcccgggtccttcagtttatttttgatcgttcaaaaaaacaagataagttgaagttaaatcaaatatatagttatgtgaaaagattgaaagagagagataataaaaatattgaaaaactaaaagaaaaattacaaaaaactatagataatttacctgaagaactcaaatcaagtccaaattttgataaaaaagatatctttcaagaagatagctttttacatcttacctgtgaatattataaaatgagacatagggcaagagctggtcgattatttattcacccaaaatataattatgtaaaaaacagaggttatgaaaacacaggtcgctttgaagaatcaaatcatcttttaatttattgtaatcacaaaccaagaagaaagcactatcaaacttttgaagacctttcttcagttttacaaatctcttcacaaaaattaagacaaaaagtaagagattctgatgaacttattgaaaaattaaaagaaataaaaggattaaaatcaaattgcagtaaaatagcagaagaacaaaaagaaagacgaagttatttaaagttagatataaatagcatttataaagctagaaaagaaattgatttttcaaataaaaaaaataaggaagaaaaacttataaaagaagctttgaaagctactgaagtaaaagatgctgatagcctttataaactttgtgaaaaagccaaagaactttacattgaaatactaaacaaactagatcgaatagaacgaaatgaagagagaaaatcctctatagaagaaaacttaaaagataatcctgctattgctttttatttattatctcaagttaataatattgcctttaaggaaagaaatggaaatgcaagcacttgtttggtttgtagcatggacaactctgagagaatgcagcttgttgaaaattctactaaagcaagccgtctttcagccatttcaactcgcatgattaacggagctattatgagaatgaatcgaattattacaaaagctattgcagaagaaaaatgggagactataaaagatctcttaaaagataacaaaaaagtaagcattcctatcattacagaatccaatgaatttgagtttgaaccttctaaggaagagttaataaaaaatcaaagaataaatccaagaaaaggtaaattgctggatgaagacaaaggatttgagcaactggaaaaagaatataaagataaaaggaatcgtataaaagaaatatctcttctttgcccttatacaggaaaaacattgtcaaataatgagggtgagatagatcatattatacctagatcgtctcagtatggaactttaaatgatgaagctaatttaatttatgcttcccgagaaggaaatacaaataaaggtaatgaaatatatagtttatttaacttaaacgaaaaatataaaaaagaagtgtttggtaaaaaagatgataaagaaatcgaagaatggataaaagataaaatatgggatgaagataaaaaaggttttttatttggaaaatacaagaactttagttacttagatagtaagcagcaaaaagcctttaagcatgcattatttcttgtaggaaatcatcctctaagaaaagaggtgattcaagctattgataatcgtaatcgtagctttgtaaatggaactcaaagatattttgcagaagttcttgctaatcagctttataaaaaagcaaagaaagaaaaactagaacacttattaaattttgattatttttctcttccctctaaagatatatctgaaataagaaaagatatggaaaatttaaaaaagaaagaagaagataaattattataccaagagcttgaggaatataaaaaaaagaaaggtgaaaaacaaacagattactctcacttaattgatgcacaagttactttcatctcatctttttctaaatattataaagaattaaagcaaattcctatagatgtatttagagactatgaaaaaatcaaaatttcaaaagaagattttgaagttaaaaatcttgaaagacgatctataaaaccaaaagatacaaaaatctcacatcaagccatatttaattctaaagcaggagcttggcattttttaaaactgattgaaataaaaatcgatgaatcttcttactatttaaacggttttttggattttaataaattaaatttatgtttagaacaaagagattggtcaaaaataaaggaaaagatagaaaagatagaagattcttatcatcatgaaaaaatacctattgctcaattgcttaaagaaaagaaagagttagaaatagttaaactttatgaagttggagaaggaaaacatcaatttggttatcaaaaaaatgagcaatacccaaaaatgataatggaaaagaattggaattctcattcagaaattcctggaacttctgtcaaaaacataaaagtatttttgcataatatagataaaacaaaagttgcaaagttcttattaaacaacttcaatacaaaaagcgatcctaaaaaatggaaagatgaagactgccaaatattagatcagttaaaaactatttggtatcacactaagaaaatagaaatccagtacaatgctaagaagaaagagatagaagctaaaaaaaagatacaagacattttaaaatttaataaggattttaagtttaataaatgttttaattcttctttattttattcttggaaaaatttagataataaatggaatcagtttgttaaaaatgaaaaacctgaagaatttttaaaaaaatactttattaaccagtactcacgaaaaaacccgaagatactaaaccaaccccatcaaaaagtaagaaagaggttctcattacctctaaaatcatcaggtcaaggttggtttttagttaaaagaagaatatgggaaaaagataaaaacacttatatatatcagtgtttatctgaagagaatatccctaaatttggttctcacaaagataccttaaaagatattttacatttacattttagacaaaataatttgtttttattttcaacatcttctaaaaacttaaaagaaaagttggattttgtagatgatattattgattctgatgcttattttgaaagagatataccagaggatttattgaatctattggaaaaaattgaaaataaaactagtaacgataacaaaagagcttattttcgtttcacttttaataagcatcttgatgaaaatgatcttgataaaaattttatgaagataatcaacagatttcctattagaagatttgttgaaaatgaaggtttgaagaatttgttggaggaatattctaaagaatcaattaaatctatattaagagaatttgaagaattgaaaagaattgaagaaaaatcaaaaacaaaagaagaagatgatgagaaaaagaaaaaaaatgatttttattctgaagtaaaaaaactatatgataaagtggatgaaaatattttagaatatcaaaccaacacaccttttagcaaaaagaaaaataacagtaaattaaaggaaaagaataaaaaaaattgagtatagaagaagatttaataaaaaagaaatttattctaaataaaaaactataggataaaataaataaaaatattttagagtattaaaaagctatttagtaatgagacatttggttatttgtgattatggttcttttataggtcttaagaaacatcacatattaattaaacaaaaagataaagttatttcttatcctttaaataggctccgtactttatctattgcaaaaagtggaattagcatttcaactgatctcatagaaagtttgagtactagaggaattaagactttctttttagattttcgtggagttgctcattctgctattttaggacaatctcaacatggagtcgtctctgttagaatagctcaaatgactttttgtaaaaataataccttgcctttagctaaaaaaattatttctgcaaagatcaaaaatcaaagagcagtcttaaattacttagataaatatcataaaaactcttttttaaaagaagctattaaagaattattaaaaaattcagaacaagcaagtcaagcaaaaaatatcacaattttacttggctttgaaggagcaagtgctaatagctattttcaagctttaaggcaatctaagttattttcttcttcttttaaaaaaagagaaggaagaggcagtcaagaaatcaataatagtatgcttaatcttggatattctgttttaagtagttatttactgaatgctattatcaatgcgggtttagagccttatcttggtcttttacatgttaaacgtcctggaaaaatggctttagttttagatcttatggaagaatatcgagcttgggtggttgatcgaaatgttattaaacttcgctctcaaagtgaagggaagtcttttttagattcgagtttaaaaaaaactcttatcactgaaattcaaaaaacttgtagtaaaaagtatctgtattataaaaaaaagttaaaattagagtatgttatgcaaaggcaagtttataggttatgtggtcatttttatggagagaaaatttatagaccttatttatttaagtggtgagaaaaatgaaagtttatcccttgagaaaagagtatttaattagttatgatattgaagataataaaattcgtaattacatttttgatgaactcggtcggtatggtttaaaatggactcaaaaatctgttttttggggttatcttactatagctgaactttcagcagttaaacgttgtttaaatgaaaatttaaaatcaaaagataaagcttttatcactcatacaaattttaatgggcaaggacaaagttattctattggacatggaaaggaagatttcagtgactggaacgaaacagaagttatatgataatttgaaaaaatctcctgaagctaaaactggagatagtgtaaagtctacaaatataattcccgttcatcttattcgtcagtggtgttattgtccccgcgttgtttattatatggaattaaattatatttctattaatcaaccttcttgggtacaacagggggaagactttcatgaaaaagaaagactattatggaaaagaagaaatctttcaagatttaacttagatgatggaaaagtttatcaaaatttatttttaaaatctgaaaagctttcttttcatgggattgtagatatggctattgaaagctcggatgctgtttatgctgttgagtttaaactttcaaataaaattgctaaaagaaaagattggcttcaattaactgcctatgcaatgttgttagaagagaagttttctaaaactagtccctttggttttcttactggaaaagggcaacatgttttacataaaattaagattgacaaacaaaaacgtcaagaggttttgaggatagtaaatgcaataaaaagtatgctagaaaaaggtataaaacctgattctagtgcaactgctgtacagtgttgcatttgtgagtatatcaatttctgtaatgatcgtatgtaactataaataaaaaaccacctcagaaggtggttttttatctcttgttaaagagattcagacgtgatgaaaaaactcagaggtccgttcaaaatacttcctgatgattacagagcatcaggaaatgtgttatacgaataaaagtataatataaactcaagacaaaagcaagttttttctcaaaaagtattgatttttaaacaaaactattattttcgacaaaaagcataaagcccccctttaaaaaaaccttattttaaaagattttttaggggggcttcagtagtataacacatttcccagcaactgaaacataaagatactttttattttgatcacaggaaaagcttcagtagtataacacatttcccagcaactgaaactcaaaaccaatccaagaaaaagaattaacactatacgcttcagtagtataacacatttcccagcaactgaaacctagttggcggcgagtttgatttaaatcagtttcaagcttcagtagtataacacatttcccagcaactgaaacgtttttgtaataatcggataaagattttgcattctgcttcagtagtataacacatttcccagcaactgaaactgcagacaattagtatatgaaagtttttgttcttagcttcagtagtataacacatttcccagcaactgaaacgtcttggaaatcaaaataaaaagaatcttccaagcttcagtagtataacacatttcccagcaactgaaacgcttcaatttttttttctttttttgaattatttgcttcagtagtataacacatttcccagcaactgaaaccattaggaaaaagtagatttccgttatttataagcttcagtagtataacacatttcccagcaactgaaacgttgcaattaaatatctttcaaaattctttttaaaattttttaaatacttaactcttaaatcatcaggtaaaatacttgcatgaatcatagcgatgtcagagttaacaaacatttctctaacctgctctccaaattcatctatataagttatttgttcagtagtaaaattgctttctaggtattctaatttgtcttctctttttattttttgaatataagaccttgtttctctaaatttatcttcttgtgtaggagttagtttatggattactttttcattttcatcaaaactgtaaatttcatctaaaagtgtttcataattaattttatttctaaatcttctctatcttgtttgtatttttgaatatacaaacaattttattttcatcctctaaatttaaatccaaactcagttttaaaattagttaaaactctattatgtcatataaattataatcaagacctttaatagcatctaaaatgtctattaaggcttcttttttgtcttttgaatattttatcttatgatcataaattttattaatatgttcttcaacatcatttgctttaggtatgatgtaagcactatctttttctgtcattttttcttcctcactattattgtttgaacctcgcaaaaattatctaaaccaggttcacacactaatatttgctcttcgataacttcataagggtaacattcatcctttatacaataatattttttattattgtatggtaatggttgtagttgttgaaatttataattgttataatctaaataattacctaaatcttctggaactaagtgtgtgccatgttctaatggattataacgaggtaaactataatcatctaattctaaataaggctctggtacatctttagcaaagtcgagagaccttatcatgaaattaattaatggcatttgtggatcaggtttagcaattccaccaccacctgctccgaaatcatcaagtgtatgaggactatttcctcttacctcaggtggtagaggtatctcagctttagttaacttaaacaaaaaaattataaataatatactaaatagtttcatgatatctccttgttacaataaaatttaactttatcatctcttacggttacatatctgttattaataaaaaaacggtcttgaataaataaaaatgtcaaaccattttcacttaaccttgaaaaaattaactttaatttttttaagtcttcgtttgttgcatattttttcatttgtatatattttataggacatattactgtcctatattttttgtctacttcatcatagcaaattaatttatcactatatctgctatacttattgcaatctaataaatttccttttcttgtcttccatatttgagagacatcttgactttttttaatttgtttacatgatgcaaataaaattaataaaaaaattaaaggtattctcaaatattttcctcctttagttttttaacttttttttattaattatttagacataagtcaagtttttaaggaaaaattgtaaaatttataattttctaaatccaattaaattcttttgaatcaaaagtataatagatatctttttcacaataaatatcaaaccttaaatttgttttttctgttacttctaattcatttaaaattttcaaaataatttttaaatattcgtcataaaaagtagattcaatttttatgttaaataaatatttttgaacaaatcctttttgattttcttcacgtaaattgaaatttactttttcaatttacttttgattcaaaggaactttcgaatcaataaaatgtcttgctaatttttcaattttaaaaattctttttcttcttctaaaagtctaatgaagaagtaaacagcaactcccattgcaatccacaataatacaaatgaaagtatgttcatatttcctccttatttgtttaaaattttttttcttctttttgttaaattttcgcaagtttttaaaactaattctgatcgatgtagccagttttctacatctccaaaagcaatttttcgctcaataaattcttctgaaaaatccagttccaaatgcaagtcttctaaatttttaatatcttctttaaataaatttttatcttggtcgcttaaagaaaatttatttcttaaattgataagcaagttgtaagctctatctaaattcgtcttacaatttctataatttttaattttttgttccattttcatttcctccatagcacattagtagagtcgcttcatactcctttattttttgtatctcttttttaaatttttcttcttgaactttcttaattttccaatttcttaaagttaagactatatctcgcattaggagatactcctctttagacgatttcggtaaggattttatttgattttcggttaacataattttttaatttttttatttaatttcgttttaaatttcttcgatagaaaatttcttccttgttatcttcattttcttcgaagtctgattttttaatttaaaaaatgaaatcaagttcctcatcagagtctaattcgttgtaaggagttttgactccagctttgaattggaactcatctaattttttaattttatttctctgttcaaaatcaaaagaatttttatcaaattttaatatgttatttttaaaattattttctgctgtgaaatacgatttcaaatctacgctgttaaaaagttcaagatgaattgaaaatttttcttttgtgaaatatttatcgaataagtcgaattcgtaataacgagtagcaattgcactcctgcaagttgaaagaaatcttgaaaaagaaaaaatcttgaaaaagaaaatgagtttctttttgtctttttttaattcttcgtttaatctaagtaaaggctgaagccacttgttagcttttcttcgtctgccttagttccatgaaaatatgcttttatgaaaaaaacaatttcggattcatgtctactgtagcgacgagcgaattctcctgccaagattaaatcttcaaaagtgaaattgattccaaattcttctttaaatctttcatgatattttttgaaaaaaacttccattgctgaaagaattttcaaacttcctgagctttctaaatcaggaataaatttataaggaggacgcgtaatcaaatttcctccgctatttttttaatccgataagaagaaattttcggatttaataagtcaatctgattgtagggaatttcctctcctcttcttgagaaaggcaaatctaaagtaagctcagtgtaaatttcgcacacatgactaagtgcgtgcgggagagttccaaatacatacttatctttcaatatttcagaattttttactctctctattattttcttagtaacctatttgctcgttgatatagcgagctaagccttcatagcgtgagattatcaagattttttcttcaggaatttctttcggcaatcttgctttagaaatttgataccgaagcttcagtagtataacacatttcccagcaactgaaacatctccaataagatcgtcttgagaaaaagattgaagagaaaataaaaataaaaaggaaaacttaaatttgttcattgcaaataaattcaatgtctacctttcttaaaacagaatttttttgatttataaaaagataattttttgtaaaattaaaagttaagctttcattgcttttgtcaagcttaacaaaaagtctttgaagttttaacaatttattgttatttatatttgctttcaaatttaaattctcaataggacaattgagtgtcatcattttgttttgattttgttcatagcaaaggaactgattgctatctttttttaacttactgtaattaaaaaaattataatttctaatttcccaattactctctggattttttctctggttgattacaagatataaaaaataaaattgttattataagtagttttatagttcctcctagtttgtttgatccattttaaattgaatcgaattgatttttctataatttcttgaattttttgaaattcttcttttgtcaaatctttaagatgaaattcttaagttgtttaaaataaaatccaaaacagattctattttttcaaagtcgttttttgttaaaattattgttataattaaatccaatttcctttttttccgccgaacttcattagtgtaacagattttccagcaactgaaacgagttttatcttgttctaacgcattatgacatcggctattgcgaaaagaatatctgttacacttttgattcgaaaaattttcaatggatataaaaatatttacaaatttttcttaaaatcttgacttttatcaaaataaaaaataaaaataaaagttggcgtagatgaataaatttttaaattttaatttttcaaaaacagaattaaataaaataaaaaaaaaaatcatttcttcaaaaaatatagatacaattttcttacttaaatatggaaaagaaattcaaaaaagaatttcagattttaattttgatgttcataaattaaataaaaatttaatcaaacaaattgatgagcaacaagaacaagaatgaagtttttaattttaaatttatttttaatttcttgcaatcataatgaaagaaaatttgttgatgaaatgatttgggaaataaaaaaatacaaatatgtaaattgtcacaaatttaataagcgtaataatttattaacttgttacgagacgacagataaaaaaataagatttatgaattgtcctattaagaacttaattcttaaggcagatatttataattacattagattaaaaaaccttcataactttttaattaaattagataacagcgatgaaggtttaattttttactttaaaaaagataaattaattattaacaacaaatacgaatttgaaaaaaatgaattagatatagagtttgtttgccgtgtattataaatttttatttttatttttattttctttaaattctttctctgaagagttgcaaggagattggcagttagatgttccaagtggtttatacaatcataatgaaccaagtaaaaaacaaattgaagactatataatgaataaaattagagaagaaataataaacgatccagaggaaattataagagttcaagaagaattaggaatagaaattttacaaagagaagaagacttaattgatgatcaaatattaattgatcaatttggagatttgcttagagaagaacttgaatctcaaggagtaaatatttatgatggtgaattgattccagcttacgaagttgaaggaaaaagattgattaacattgaagagtatagattttttgagtctatgtatcagaatgacttagaaaatctagatcaaattcaaaaaacagaaaaaagaaaatttacttgttttccggattttaaaacagcagataaatttgcaaaaaaatatagattaaagtttttttgtttttatgaaaaaagaggagttgatacatatagatgcaatcaatattacgaatgcactaaaatttattctggcgttgaattaatttttgaaataaaagtagatgatacttatgcaaggattaaacaagccttaattgagcttgaagaacagagttcagacatggatgaatttattttaaaacaatataacagaatgataaaagatttaattcaagatataattaacaaaaaataaaggagtaaaaaatggaaaaagatttgcttcagtagtataacacattaaatattttgttttttaatcctaaaggagttttggttactttaaatgaagttgagtaggaataaagttatctttgctagaatctaaatcagctgtttgtttttaacagttactatgagcattatgtagtcaatacgaataaggaaagcagatgttacatcattatatttaaaaaaaagacattgttaaattcttcttgcggtataaatgcaaaagaattaaatatttcatgtcttctccttttttaatattttatatagattattaaaatgacattgcatcttacaataataatattaaacaccatatacatattaatatattcgtttccattttttaactccttttaaatcattaagccacataaaaatgatgaagctataaaaagattatctattcgccttacatgcctatcatgtgcttgataagcttgtaagtgatgttgataagttgattcacttatagttctagaattatataaattgtttaaatttatatttcttggcttgtaaaataaccatgattgctattaaattaaccatctgtaaaactacaagtagcaagcttaattatgaaagcttcttgaattaacttctctttatttaattcttcttgctgtatatcattgtttttttgccagatttagaggcataaaggagaggagttagcccctgattacctgttgcatttaattcgctctgttttctattaaagcaactacaacttcgttgttaccagattcagaggcataaaggagaggagttagcccctgattatcttttatatttaagtctgcgtttttgtttataagatctaatacacaatttaaagtctctgtatcattttctataataactgtatgcaaaacagttcttccatccctatctgttgaatttatctctttattgcgtaagtaatgactatgagcaaaagaaaaatttactacaaataaagaaattaaaaaaagacttccctttaaaataaaagttttaaaccttttcatagagacctccttaaattttttatatactttattttaaattcactttttgtcaatagtaaaaagtcaaattaaatttaagaaaatttattagaacacatttcccagcaagtgaaacgcaactaaaacttttcatattcatcagctatgtccttagcagtttttccattcctatcttttgcatttacatccactccgttttctattaaagttaatacaacttttttgttaccatatctagaagcataatgaagtgcggttcttccatccctatctgttacatttacataggctctgttttctatcaaagttaatacaacttcgttgttaccatattcagaggcataatggagaggtggcactccatccctatc

SEQ ID NO: 142 - DNA, 24443 bp, synthetic construct
  misc_feature 1..24443: note = Synthetic
  source 1..24443: mol_type = other DNA
  variation 970: note = n is a, c, g, or t
tgtttgttcggttttaccaggtacttttcgtatgcctcgcaattttcgttaggtagatgtttcaatgcagtgatagctgcgtatttttgctgtttataaagtctagtggacttgatgggatggtgtttttcgcagtagtaatgggatcggctgcgtagacggaagcatagagcacaatacggaagtacactgttccagcgcattgtttcttcttgatgctggggagtgagtgaacgtaaatcttttaacccccagagcacttgatctacataatcagtgtgttgttggctatcaagcccgaatccacgcaacgctagcaccgcttcaatgagtttaattgttttatttaatccgccgtaactttcgacgatctcagcaagatggatagcgttagaactgctgtactttttgagtacggagccatgttgactgagtaacttggtaaaccatggctctagaacaatgttccgaacagcatcgacagcgtataggtatccagagcgacgtcgctgagcaattctacagccttgagattcggcctggttttttaaatcattgattgctgtttctagctttagtttcaatgcattgcgtttttgatccaagtccattagtcatcatgtcaacatagttttttgcttattctatattatgattcagtagatgagaatctaagatgcgactaaataatagaaaaataaaggtaataaaatgtttatacgacaggagcagttagctaaagagatgggagtaagtgtcagtactctgtggcgctggcgtcgagatggaaaaatgccgcccgtggttgcacttagctctagagtcgtgggctggcagagaaaagacattgaacagtggttaaaagaacaaacaatagatgcgaattgccacagagggaacagtgttctcgcttcactttcataaacataaagtatttcattttttacgattaattacgcgtataaaaatnctcttgcaggagctgtgttcctgctttggtctatctcagggagccacgttctgctcaagtcttcataagttgaacggagaacgatgttctccgaatagcgaaagacagatttgcgtattatccaactcatgttcggggatctcaggcaaaggctgatagctttcaaacgctactgcgagaacactgttcttgctcatatcatcaaaaactaaattttggtcatttaattaatagataaaaaatcactctcagtgctggactctctggtgaaaaatgtgttaatcattatctttcataagtcggtttgtcagaaccaatggggtaatgaacgcaagctctgaaacacttttgccccaaaaccgtttagagtagatactcttcgctaaacctgtttgagctgattgaccaacattttctaatgtaggatgctgacagtcagttcagccacttcaaaaaataaaaatgctcactaagagtaaagtggtctatccaacatagtttaaggatgagtatgaatggcaatgaagagatcattatttttttggcaattataggacttcctatctgtttatgggcattagtcaagatgcctaacgctagcaaatgtggttcatgtggccttcctttgaatatgcatcgtcaaaaaacgtatcactctgttgtagagaacaaaaatgttgaggtatgcaagacttgctataaaaaccgtatcccatttattcctagaaaaactaaatcgcagccaattaatccagtcagttccagtagttcaataagtgaagcggttgaagaggtaaagcctcttaccagaagtagcatgccgcaacaagctaatcctgtcagtgtttttggcgaaaggatttcaattagtgaagtagttgaagaggtaaagcctctcaccagaagtagtatgccgcaacaagctaacccagtcggtgctcttggtgaaataatttcaattgatgaagtacttgaagaaatgaaggcaaataactgtttttggttggataccgaaactacaggcctctctagtagtgatgaaatcattgagttatcaatatgcacgcatgataaacgagttgtatttgactcagtacttagatcaaaagttaactgtagtgcgcaagctagagccattcatggcataactgatgagcagattgctaatggcatgccaatagaatcagcgaaagcgtcattaattgagttgttagaaggaaaaacgataatatcctttaatgtagactttgactgccaaatgctgttccaaacctttgggataacagctaaaaaaagattttgtgtaatgaaatggagtcaatctgttcttgattatgaaagatggcctagactggaaaaagtttgcgaacggcttaatatcaaacagccagaagcacaccgatctcttgctgataccattactacaattgatgtattcaacaaattggttgatcttacaagcaaccacaaatcccttctacgggacttcgccttaattgacctgaacgctatagatcaactgggagatgaagaagctctatttctatcacctaactctaatatatttgcttttgattgtctcatcgatcgttatggtaatgagatcattggtatacgctcaaaagctttaaagaggatgttaaaaagagaagggacaaggatttttgtaaaaaacggtcgtatgggcaagacactaaaagttcaatacatcgataaacctgatatgcaactaccaatatccctagaggaattgaatcatagactgattgcgttgaaactcaaaaaaacaaatccaaataaatacttgagtttgaaagccacggttactcaatcaaatataaataagaataaaaatgaaatacttgatggtacgttctatatcccttccattgctattaacgcaaagatatatgaaagtttagagaacttaccaatctttcgtaacaacgatagagagactattgcgtttacaatcaagactccgaagaataccttgaaaagattatttgctttagggttacaagggtattcatcaattctcaaggtaattgagcatgataaccaagtaatcattactgcttaccaccttctggatgcacaaaagataaccatccttagtacatggagtcttgatggagagaaggcatggtcaggtgattactaagcaaaaaggatgcaaaactatagttcaaaacgaacctgctctgtactagtagtaactgacactgagctaagcgcttccatacttttgcatttcatggaatgctaatattctaatttccgaaactcacttatgtccaaaaataatttataaattgcttactatagcccatgcattagccattaaagaagctcactcatttctggcacactgttggcttgctctaacaagtattcacactctgtttggatgagtgagacgcatagttctatgtgttcacgttctcgatcctcgattccttgagcgtcggtaagttcaatcgcttccttcaaggtgttttttatagcaccaacggtttctaccattatggaagccattttggtgcctgaataacccagcagagcgccgaattcagcgagatcatagctggtgatagggcgtttgaagttacctttcggcggattttgaaagtcttcactttcccaatctccaatcgacattgcaaaatattgagggatactggcggcacgcccctcatcagcagacaacttaccgcttcgtgagttgcgttttgttccctcttgagcgattgcttctatgtttactaaatcataaaaaggggtcagctccaggcctttaggggtgacgaagaagctaatatttttaccatgggcatcgtagtttagcgttactagattaaagagcatccattgggtgagctttaggttagtgatgaccgtgtctatggttttgacgcacagtaggcgtgggaaagaaacgccatcacgcatatatacgccatcgccttcatccccattctgacgctcgtatttgtaacctggtggtaagtcagttgcctgacagccatcaatcacatgttttcgttgaacgacatcacgagcttcaatataggcacgatcgaaccgctctatgatcagtgtcctagtgttcccaatgcgagttaactcaacattagcgacgtccaaacctgctagcttggctaatgtcatgcaaaagaactcattaacagcaatacacggtgctctaccgctttcaaacttcagaatgtagttcgaacttaatttgccttcaccaaacccccattcatcaccgcgcttaagtaagtttaatttgttttgcacaccagcaaccgaaaggcgaaccttaccgtcccaatatactaatggcgctagatttctctctagtcgttctattagttcatcatcaggtacaggtctaaaactagtttcttgaggttctgattctggaactcgaaaagacaatgcgccagatgtttccgcaccaagcttacgaatcagcccgaacgtgttgcttttggatatagtggtgttttgtatcatctcctcaaaggcttctccttcaggaaggagatttctgaggtagttctcaatactacgtggcgaagcccgatcatcgaaagggatgtgtggcgaaattgggaaaccagcgtgtttccattcatcttcatagatgaatgagaactctgtttctgttccgacaggaagaatcaaacgaccaattttggtattcgtaccgataaacacgtctaactgttgtaacttactcataccaaccgtcctcattgcttctcacgctgttttcagcttgggagggtatttggctatgtggacgaacaaataggtttacatcgataaggcgtaacgacagccctaagatgtccatgaggatgagtacattggcaaaggtgacactggtatcgcctttttctactttcatgactgttctacgagataagttggcttttgaagcgagatcatcaatacgccagcctctatcggtgcgttttgagcgaatggcgctccccagcgtttccatactgaactcggtattcaaatcaggcataggttgtgcctttaccatcttgccttttttcataagtgccttttaatgtacttttgtcactattgggttcgtcttaacatataagttcactataactcacttttgtcgtgactgtataagaaattagctataagtgcaatttaagttacttatggctggtttgcgagtttaatacctctctttgttctctatgagagagttttatcagccagaaggacgcatttggcaacagcgtagtattcggattaatattgggagaagacagagaagagtgcgtgatcggggcttacctgacccattacctgacccaaaatcggcaggtacaaaaaaggcgtagtaggtactaacctgctacgccttgttataactggtggcccctcccagacttgaactggggaccaatcgattatgagtcgtgatatgactgttttcgataaaatctcacatcatctcatattagtttatttgtgactcaattcaacgagttacaaacacctcttcggtttatcttttctcgcacagtctcattcaggtacgctcttgtttgactaattgtttgactaaaaatcgccgtagtcaaacaagggaatctttgagtgagggaatgtgccatgttaacggtaagtgctattcgggggctaaaacccaaagccaaaccctactatgagtgggacagtaatagtgagcgcggaacgggcaagttggcagtgcaagtcacgccaaaaggcggcaagcgttttgtgtttcgttactttatggaccgcaaagccaagttcattccgttaggccagtttccagcactgtcgcttactgaggcaagggcaaaacagaaagagctgggggagttgcttttacaggggattgacccgaaagagcaaatcgaaacgcaaaggcgtgaacaggaaagtgcaaaacgcgaggaggcaaggaaggggtcaatacagcaattgtttgaagcctatgtcgcgcaaatggtgcgggacggtaagcgtacccacaaagccgttctcgcgtctcttgagaaggaagtgtacccggttatacctcctgcaacgaaagccaagaatgtcaccccacacgagttaaaactggtgctggcggaaatgataaggcgtggggcgaaaacgcagtcaaatcgtgtacgcagctatctgatggccgcgtttaactacggactaaggcacgataacgaccctgctaacttcattgatgaagcaaagtttggcttggtatttaacccaatgacggccatccccaaacaaaaagatgcagagcgcgtgggtaatcattacctgaaaatgggtgaagtgatccagctaatcgccgatctgaacggggaatatgagcggtttagaatgggcgataccatccggtgcctgattttactttgcctctatgccggaggccagcgaccttatgagctggcagcctcgaagtgggaggcgatagattggcaacaaaaatcgttactgataaaccgtgatgtatctaaaaacaagcgagaacacatcattcccctgactgaatctgcgctggtggttcttcgccatttgcgcgagataaaccaagactctgactttatttttccgcaccgcttaaaccgcaatgagcatatccggctggattcgctttctcaggccgttactcgataccgagaggcaacgccttttgtgtcgtccttcactccccgcgacattcgccgcacctgtaagaccctgatgggtgagattggtatttctaaatcactacgggaccgcattcagaaccatgcgctcaatgacgtatccagcaaacactatgatcgctatgaatacctgcctgaaaaaagaagggctttggaatcatgggaacaacgattaaacgaaaacaccaatgccgccaatgtagtggcatttgtagggagggattaaaccatgtcatcacagaaagaaacggatacccagctgccacccttattgcctcttgagtattgcacagttgaacgagcggcgaggctgttaggttgtgaggaagaagacatctatcattggcatgaagtcggtgcaataagtttatgtgtcaaattggaagatgagaactgtagaccaaatatctggattaaaactgaggacgggaggatgtctctatccgagaagaaagtactggaaaaagaaggatctcttgatgcttttgtatcaacacatagcattttgggaggtatatattttgatccatctaatagcgactcatggatgtttggtttcagtggctttgctaacggattttggaaaatacgtggcaagactgaaaacggaaactggttactaaccacagttggagagattgaatataagccaactggagaaggcttagagcatgttaccttactctctattgaccttcctccgatagagggagagcggtatgtatttaaaccagacttagaaaggctacaccgagcaatacatggcattgagactctgtcaaatcgttacaacaaccgagaaattgcggaaaatatgaggcaggctgaattagagacacaaaacgcccgtccgcatcgggtagaaaaaaaacaggcccacctaatacgtctccttatcaagtcacaccctaatttaggggctgaagttatagaaaatccatacgcggcatgtgatgtgttggaggcccaatttgcaagagacggaattggccctatcgacgcaaaccctgtcactgtaggaaactggatttcaggtaaacgaaggaaatgagtaaagatagtttaaagttattaactacaaataatacttaactaagtccctgcctacccgaaaattcatccttatattagctagccatgttctcaagttaaccgatggagtaatagagcatggcaataaaccgcattgtatctcttaaagaaatgtcagcccttgtcgggcgctcccctaaaactatttggcgctggtggcgcaaagagcagtcattccctgcccctcggcaaatcaacggacgtaccattgggtggcgcgaaaccgactatcaagcgtggctagatggggagtggcaacaatgagcaaactacctgcaccaagcaaagccgaactgtgcctgttagagcttttacgccgtggcaaagctggcctacatccgctggacgtgaatatccgagatctcacccatgccaacttgctggatgaggccggcaagttttggagtatcacgttgccaacggatatgagccttctccgcatccgccatggtgtgcgcatcgccgatcaacccgcaccgtttaccagtgtgcgcggctacaaggccatgtttaaacgctactggcttactgatctcgatgcagcaaaaagcgcgattggtttgattaataattggcgagccaaacggggagctgaaccgctatcaaagtgcgattgcaatgcgctgctagccgcttttcagccggaatcacaagcgctcagtgaggtagcgtaatgacgagtataaccaagcatcccgttgatcacgttgagctggcggacaaggccttgtgtcagctagagagcctaactgtcgtactgggtactgctcattttgaggacgttgataaccaacattgtaagggggttatatgggcaatgcaggagctcgctacaacggctaaacgtcacttacaggctagccgagacgatatacccccgcgccgccgatagtagaaaatcattcaaaccagtggctgtcagtgttggcagccatttttattggcaatggcaaaagtaagtaactgctatcagctaaaaatcctatttaataaggatgagacgaggtgagatatgttttcaaggttttttaggcgcattttcacttgtttcaaagtgcttggttactgagagcgacttggtagccttgcaatcacgttgatagtggccacttaccgatcctagggaagcatgtcgggttttattaatatcttccactcaatatccatatcactgatacaagaagtaagggcaatacactttggttcgccgacttccgatgcgtgcgaagcgactttgaagccgcaaacggtgatgaaaaaggagctggtggagtaatgaaaaggagatcaggaattggcctactccactaacacgggatttttcaaaaccaaagacggtcgctgctgggaggtgaatacagggccagacttgtcaccgctctacactgacattcttcagcgattagtcggtcagttggaagcgatggagtctcactacgcgagagtattctgctttcgatttgatttgcacttaaccgaatacgcagacaatagcacaacggtgagccgcttgttctcgctggtggtgcaagccttaaagcggcgctacaaaacgcctaacattggctatctatgggtgagagagcatgaaaaggccaaacagcagcattaccattgtgtattctttcttgatggctcaaaggtgaatcacttcaacaccattcaaaccaccattgacgattactgggcagcctttgaaggaggccatgtacaaggatgcggttttaaagtgctacctagaggagactcacacgccaaagccgagatcatctactggctctcttatctcgctaaagtacgtggcaaagccaacagcaaaggaaaacgatataggcccaaccaggctaaacgttatggtatcagtagggttaaaaccaaagtgaaaaattgcgcacttgcagacaaaaaagaaaaaccggacaccgatgacatctttgcgtcgctagcctttgtggggtgcgggtcttgaatcaaaaagtgcgcaaaacactgtgcagctttgaagggggaaagtgcgcagttagagagaaggcgatgtctgtggcaccaatctacacctgttgctactgagtagaccatttggttatgcgtcacctccaatgatgagttcaacacttcatagactttaacaaaaatatgagccatgcaagtgaaataagacagactgtcaattaaagtgtgagcttcacccataaaacatggcttgtttatgtctgataatgctttaattttccctgttgctattgatttaggcgcaaagactaccggtgtctatgcggctggctactcacccaacacccatgttgggcaatttaacagcgattccgtatttaaaaccggatttgtcgcagaagtagacgatggacaaaccggttatcagctgctgcaaacgcagcgcactagcacccgtcatgctcgccgaagccgaacacgcaaccgtcaagcaaagcgattgcttatgttaatgcttaagtgttgcctcgggtttgacactgacaagcatcaaatcgctatcagtcattttattaatcgtcgcggctactcgtacgttgaaaccaatatagatgaagcggctattaatgagatagcgagtgataaccttggcacctttttccacgtgctagagagcaatgggcatgaagcgctcagtgagctattgactcaaacaatgcccgttgatgggctaccgctttttgatgcgctacagcgtattgcggaagataaacaacagctgataacgctgcaaaccgagctacaagcctttacccgtcaagataaaaaacaacaacgcgcgctcttgccgctcagtaaagcggtcgatttcctgattgccgaacaatcttccggcgctaagcatcgtcgagaatatttcaaaaatattcgcagcgatctgaagaagctatcggaccatccagaacgtcattgccgccggttatttcatgccctgcaccatcataaaaaaactaccggaagcgatacatttgatagcttctatcagctgctttgccatattaataactttgatcttaaattgctcaacagcatactaaaacgtgttaaatcaactcaaagcggcgaacagatagaagtcatcgtggcggagaaatttggcaagtggttgaccaagcaatggcggctctctagtgcaaacggtgccgatcgtctacaacaaatcagagatgtacaacacgcgtggaaagattatcgtgcccaaaatccgcaatcggtgattggctttttcctcgatacgccacctgaatgtaccgtaccgccttatgaaagccataccaaccgtcgtccgccgagttgtcagaccttaacacttaaccctgacctcctatcacgcgattatccacaatggcgagattggcttgcatggttatccagtacacccgcaatggctaacgcggtacaagcctatcgcacccaattagtggcggtagagagtgccaaagggaatacgctgatacagactgacgaattagacgcacgcactttacaatttattttcgacagcgctcaagacaaagacccatttaaactcaatgccatttggggaacttggaagaaacaaagacagcaacagcgacaaggcgacgaacacgataaaacgacggataaattagcgaaactattggtgcaaagtgctttgccggcctcactgacggagaacttcacttcgcatcctgtaccgggagatttctggcatttaatcaaccgttacttccaaagccgtcggcgtgcgcgagaggggcgttactttctacattacgacaatcactaccctaagcagcatcgttggcaacgagacggcaagctactcgtaatgtgccagcaccgacctcgccaactaaaacaccaagcgacgcgcgatattgcggtactgcttggtgtgccacaaacacaactccaacaagcagtagataacggccagtgtgacgataacaaagcgctatttgccaaggtgaaaggactacaagcggcgtgtcgtcaggcatatcaagcccaaaaagcgtggggaccagatttaaaagccatgatggtctccgatcctgaactcaaaaagctcgctgagaaattagcaccgctgacggcaaaggtggccactcaactggcgcttcgcgatgagcaatacgatagtttttgtgagcgaaaccaatctgtcttcacttttgcccaactgttccaattggtatggggagatagaagcggctttgccaaaacctgcccggtgtgttctgctgataacgcaaaccggatggcaggcgaagatggccaaccacacgcagcgcggctcaacaccctgacaatgcgactgattgatggcgggcttaagcggctgctcacccaccaagcccatcacattgccaatcggttatgggatcatatcgagcatattggtcagtcagcagataccatcaccgtaccctttgttatcgaacagaaccgcttcgactttacggaaaacttaccgaccttaaaggggttaaacaaaccgaaaccacaaccccaaaaaataaacccggaacaagcgaaaaaagaccgcataaaacacgcctctcaaggactttgtccttatagcgcgggtagctcagtgggcgacaatggcgatattgaccatattattcctcgttcgggtcaatatggtgtccttaatgatgaagccaacctgatttacagctcaataaaaggcaatcgccaagtaaaaaaagaccggcagctaacactgaccgacctcaaccccgactatttgaaagcgcaatttggtaccgccgatcctatcgcaatcacacagcaaatcgaaaccaccttatgcggagatgatgcggaccgctttagcttcggtcgctacagccaatttgcagccttatccgctgagcaacaaaccgcatttcgtcatgcgctctttttatcggcagaacacccgctgcgcatgcaagtaataagcgcaatgcagcatcgcaacaaagctaaagttaacggtactcagcgctttatggcgcaactactcgccgatattctgactaaaaaagctaaacaaaaaggcttagcggcaagattaaaatttgattactttcaagtcagtgccaatggtcaagacgaagattctaccgtggctttgcgccgcttgatgcgagaccttcatgcagggacaaaatacgacattcaacctttcgaaaaagggaaagagaagcaacacgcctactcccatgtcattgacgcaacgctagcgtttatgatcgccgccgagaaacaccaaggtgaaggggcgctgaacatccactttgatgaaaatgtctctatttggggacaggtagacgaaaatggcgtgctgagtgacgcattgtttccgcaaatagcggtcgcgcccgaaaacctcgcgccaaacgtcagagttgggcctcaatccaacgaacaccgagcgcgtcagctgctagcgggcaaaaaaccacatcaagtgttcagccagcctatcttcaagcaaaacgcgctcgggctggagttttatgacttagccgttatcgatggccagctctacaaaggctttgtggaaggtgaggataaacactttattaaagcgaatgaaaaagtggtggataaacaactcaacaccttcctctatgccgtaagccatcactactatcgtttgatacaaagcagtgacatacaagtatacactgcggacaagcacaaactcaccgcacttttattcgagacacttgcagcagctaaggacgcgacaacgtttgatagcaacgcagaagccaacaagcttgcccgctgggtgtgtggaaaatcggctggatcattgtatttttacagcaccagtgctgggctagaagaagctccctctgtggtcaaaaagcagcctaactctcgctttcggaagcagtggcttgcgcattatcaatcatggcaggccaaacaccctgacacacccgagaaaaatggtatgtggatcattcccaccgaacttgaagccgattggcgacagcattgcgattggtatttaggtcggccaacggatgatcaacaaccggatcaccgtgcagtaaaaagcgacaccatgcgcgctgaaacaaaatccagtggtgctatggcactggtcagacggcaaagccaaggtaaggctatttatcagctgttagcgctcgatactcagaaagttcctaaggatcacagcgcggccttggcgctcgcctccccgaacctcgttctccttgataaagcgattttcactaaaggctatcaaaccaaagtggaagaacagcaaccattagcaggcaagaccatagaatccagcgccttttttgatcaggcaataagtgaacagtggcaattagatatatcaacgcttcaagttgctattgtctccaacaccaatgtgcaaataaccggattacacaaagactgggtggcggagcacttgatcctttctggggaagatagtgagaaggcgtggaccaaactgaccagtatagcgatcagcgatgaggcgcaagtgatggatgtgttcgccaaagcctcgctaaaagcgtggctgaccgccccgtgccgcaacgataaaagcgtgagagtgaaactggatgatgatcaggtttcacttaccctgccctataagcagccacaattaagaaaattggtggactaaaacgcaaaaagcgccgtaaaggcgctttttctgcaagggtgcgcgatgcagagccttgttcatcgttgaccgtaaagtgatttcagctttacggctgacttgttgaactaagagcataaataaatcattcactgattgcaaacaaacgggacggtaccatgcagcatattgtgatccatgaatatggaaaatcgctgggcatcacctctgaacgcttagtgatcaaggaaggcaattttccaaccaaagaaattccactcagaaaaatcagcacactgtctattcaaaagccgggcattagcttgtcctctaatttgctcagcgcctgtgcgcggtatggcattaaggtgtttattggcaaccgagcccaagagctatgctgtttgcatggtaacgcgcaacatgctgtggtccagaatagaatccatcagttcgaatttttatcggatgacgagcagcgttatcgtattgcaagagcgtttatttacggcaaagtacgcaatcaacgcactactatgctgtatttcaataaacaaaagtgcggcctcgccaaaaagcaagcagcggcccatctagcggctgagctgcacttactctcccaacaagtccgtgatctcccctataccgaaaactggaatgccaccttgatgggcttggagggccgagcagcagccagttattggcaggtactcagcgagcatcaatggctcggtgaacaatttactcaccgtacggggcgcggagcgcaagaccccgccaaccaagcgttgaattatggttacggtattttatcaagtgtaatctggaacgcgttaactaatgcagggctagaagtctacctcggtgcgctgcatgccattcggccgggtaagcccgctctcgtactcgatgtaatggaagaatatcgcgcttgggtggttgatcgggccgtaatcaagttgcgaagccaactcaatggcgaaacgcttaagccgaaaacgcgtaagaagttaaccaatgagatcctaacgacactcgccaaaccaatcccttatcgaagtaggaaaatacgcttagagagcgtcatgcagcgacaatgctatcgcttatgtggcatgtttgccgacgaacaaaagtatcgtccattactctttaggtggtagaacatggcaaaaacaacggaagtgcttgtcgcttatgacatcgaaaataacaaaacacggacacggctatataaccaactcaaagatgtcggcatgatcccggtgcaaaaatctgtcatgtggggacgtttgttgcccgccgatatcaaactggcgaagcgtattcttgccagtgaaatcgacaaagacacagataaagctttcgttttagtgagcaaattgtccgaaaacgcaaaattttatggtcttaccccagattttgaggagtacgatggtcatggcatcttttgatgagctgatccctatcagttacttgcggcaatatctattttgcccacgtatcccgtggtacaaggccgtaatgcgttttgagccccctgaacaaggatgggttacgcaaggaaagcgttggcacgagtcacaaaacccgcggcatcgacgtcgtttatgcaaacatattccccaaccaagagagcatatcgtcaacgcgcatgtccaagcgctatcgttaggcattcatggttatatcgacgagctaatcttcaatgaagaaaagtgcgtggtcgtggagtataaagtggataagggcaaacccaccgatgcgcaaaaggtccaactgtacgcctatatgcttgctgcggagcaaacttatcaacgacaagtggttgcgggcgtattactaaaaggcagcgcaaataagcagtacacgatcacgctagatgataaaataaaggacaaatgcctaaccacactccatgcggtgaggcaaacactctccagccatcgtatgccgcattcaagcgcaacagagagcaaatgcgcacagtgcgagtacttgaggtactgcaatgacagatgaagattatttttgtctaaggagcatgttcgcaaaataccgccattttctgacatcaaagcggtttgcgaaaaaaataggcgctgagcccctaataacttgctgtatcaacaacaaaaaatcaggggcttcagagcctatctcaacaagtcagccactgaaactgcctccagagtcggcagcgcagaggcgtcattggttgcttcagagcctatctcaacaagtcagccactgaaacagcattgcccgatgatgtgaagtcccgcttcaccggccagcttcagagcctatctcaacaagtcagccactgaaactacggcgaagcggtttcaaaaatcgcgggcatcgatggcttcagagcctatctcaacaagtcagccactgaaacggctttacgtgtgggacgcacgagagctttgccggcttcagagcctatctcaacaagtcagccactgaaactccaggtcgtcgcccgcggtctcgataccaaacgcgggcttcagagcctatctcaacaagtcagccactgaaacgcgacgtggcgcgaggcgctgcggaccctgaaaccgcttcagagcctatctcaacaagtcagccactgaaaccagctgtacgcggttcgctcgggggcgccttttatgcttcagagcctatctcaacaagtcagccactgaaacactgactgcccaggtaggcgtcggccccatcccttggcttcagagcctatctcaacaagtcagccactgaaacgcaaaggtcacgccagcaaagttatcttgcagtgcttgcttcagagcctatctcaacaagtcagccactgaaacacttgtcgtatttctcgcgctgtggtttggtcggctgcttcagagcctatctcaacaagtcagccactgaaacacagtgcaatgcgttttgtttccgcggggcccaggtcgcttcagagcctatctcaacaagtcagccactgaaacatgaaaatcttgtattcaataccccagctttcctggcttcagagcctatctcaacaagtcagccactgaaactgccagaccagcgccggaggcgcaatgctaatttggcttcagagcctatctcaacaagtcagccactgaaaccttataatttgcaaccgcatacgctacagcaatagcgagcttcagagcctatctcaacaagtcagccactgaaaccacgcgaggacgcattcacaccacatcagaaactctttgcttcagagcctatctcaacaagtcagccactgaaactgctaccgacacgcaagagtacggttcggtcaaggcttcagagcctatctcaacaagtcagccactgaaacctcaagccgcgccaccactgggctgaacgcctattgcttcagagcctatctcaacaagtcagccactgaaacaattctcgccgaaaatcgacgcgtctgtgccagcttcagagcctatctcaacaagtcagccactgaaacgtggttgatggtggtgaaatacgcggcggctcggcacgcttcagagcctatctcaacaagtcagccactgaaacttaaccagctcgcggtcggccgataccatcatgggcttcagagcctatctcaacaagtcagccactgaaacagtgccaatgaatacttctaatttcgcgccggttggcttcagagcctatctcaacaagtcagccactgaaacatccccccgttcattcgatttgggatcccaattgcttcagagcctatctcaacaagtcagccactgaaacaattctcgccaaatagcgaagtcactcaaatgcttacttgggtacagcaatattaacattaatggatttgaggcgctttgctcatacgaaatgctcacgtcgttatcgcgacaacagattttttctaatgcgaaaacgggagttgtacccgttccttgtttgactaagtgtttgactaaaaatcagcaggcacaaaaaaggcgtagtaggtactaacctgctacgccttgctatgactggtggcccctcccagacttgaactggggaccaatcgattatgagtcgactgctctaaccactgagctaaggggccgaatggagtgggattataggggaaggctcacagggtgtctagctgtaaggggggcgaattcagtatgctttttgagcacttagcgtgtggcgggataaacaagcgccgccaatgtggcggcactcacgctttgcttgcttaggaggttaccgccttattgcatggcggggtcttggctgtcttcagccggccaggtgctgttgtcgtcttttggcattggctgcgtgtcgcaatccgtgccgccgtctgggcaagttaccacgggctggtcgccttgtggttggctggcttcgttggccatcgcgggaccggcgaggccaaccatcatcatgagtgcgctaagagtcagtgctttgttttgtgttttcatcatgttctccttcctagtattgtcgtttgcccttgaggacataaacactatctcgtactcatcgcgcggccctgtcattctctcgctataaggcggtaaaaggattgtctagtttgtcgccaacttatcagcattgtcagcgcttgattaaatccctccttcgcggtcataaaaccatcaaaacggtgtgttattggtcaattcatggcctttactctcggttttgtcgcttgcatcttgctggcacgcgctttaccatcaaagaataattaaacataaatatcgatttaatattcaatttagcgcgttatttagggatagatatgaaaagcgacctctaccagcaatcactgctcaccttactcgacttgtcacctcagcaaattcacgatctgattgatgatgccgccacactaaaagcggccaaagcctgcggtgaggaaaccccgcagctaacgggcaaaaacattgcgctgatttttgagaaaacctcgacccgtacgcgctgtgcctttgaggtggcggcgtttgatcaaggcgcgcaggtcagttacctcggccctagcggcacccagattggccataaagaaaccatgaaggataccgcgcgggtattaggaagaatgtacgatggcattcaataccgtggctttagccaagaagtggtcgaaacgctcgccgcgcatgccggggtgccggtgtggaatggcttaaccgatgattttcaccccacccaagtgttggccgatctgctcaccatgcaagagcacagcgacaagccgcttaatcaaatcgcgtttgcgtatgtgggggatgcgcgcaacaacatgggtaattcgctattggtcggcgccgcgaaaatggggatggacctgcgcctgattggccctaaagcctactggcctgaggccgatttgattgccgcctgccaagatatcgccgccaatactggcgcaacgctcaccttaaccgaagacaccgcagcggtgaacagttgtgattttgtgtataccgatatctgggtgtcgatgggtgaacccgaatcggcctgggcgcagcgcgtggctgatctcaccccttatcaggtgaatccaagcttgatggccgccaccgcaaacccacacgctaagtttatgcactgtttgcctgccttccataacgatgagaccggcgtagggaaacaaatcgccgatcaatacgggcttaatggcttggaggtgaccgacgcggtgttcgaatctgagcagtcgatcgtctttgatcaggcagagaaccgactgcataccatcaaggctgtgatggttgccacactcgtcaacgcaagcacgtaaacgattgcacttttgcttgcacgacataaataggggcgtataattcggcctgatttcactacacggccagaagttatgttggttattccacccacaaacagcgatttatccgccccattgcgggacggtatccgcattggtcgtgatcgtaaaaacctccgtttcggaggtttttttttgcctgtagcacactgcaaagaaagggactcgcgttatggccaatacgctttataacaaacatattatttccattcccgagctcagccgcgacgagctggagttaatcgtcgccacggcgggcgagcttaaagcgcgccctaacccgacgctgttgaagaataaagtgattgccagctgcttttttgaggcgtcgacgcgtacgcgcttgtcgtttgaaaccgcgattcaacgccttggcggctcagtgatcggcttccccgacggtggcaatacctcgtcaggcaaaaaaggcgaaactttggccgactcggtacgggtgatttcctcgtatgtcgatggctttgtgatgcgccaccccaaagaaggtgcggcgcggttggcctcggagttctctgaaggtgtgccggtggtgaacggcggtgatggcgctaaccagcacccaacccaaaccctgctcgacctgttctcgatttacgaaacccaagggcgactcgataacctcaatattgccatggtgggcgatctgaagtatggccgtactgtgcattcgctgacgcaagctttgtcaaagttcgaggggaaccgctttttctatatcgccccagatgcactggcgatgcctgagtatttgttagatgagctgactgccgcgggccacccgtatagcctgcacagtagcatcaccgatgtggtgcctgaattggatgtgttgtatatgacgcgggtgcaaaaagagcgctttgatgaatcagagtacgcgcacattaaagcggcgttcattttaaatgcggctatgttgcgtgatgccaaacccaacatgaaggtgatgcatcccctgccccgtgtggatgaaattactgtcgatgtcgataagaccccgcacgcttattactttgagcaagccgagaacggcgtctatgcccgagaagccctgctggcactggtgttaaacgaacaggttgaaggagttgcaaaatgagcacggataacaaactacaagttgaagccatctgtcacggcacggtgatcgatcatatcccggcgcatattggctttaagatcttaaacctgtttcaaatgcacggtagcgatcagcggatcaccattggtctgaatctgccctcgtcggcgttgggcagcaaagatctgatcaaaatcgagaacgtggtgatcagcgaagatcaggccagtcaactcgcgctgtatgcgccacaggcgactgtgaatcaaatcgaagactatcaagtggtggccaagctgccattgaccttgccggaagtcattcaaggcgtgttccgctgcccaaactctaactgtattacccacggtgagccggcggtggatagctcattccgcgtactgagtgaagcagatgatgtgaagctacgctgcaaatactgtgagaaggtgttctcacgcgagatcatgactgagcgtcattgatacccccgcagcggatacaggcgtcgtgaggcgccttaccttcgctacccgcacggcgggcacaaggtctaggcgtaaggcctaggcataaaaaaaccagcacttgggtgctggttttttgtgtctcaccttcaaggggaacttgcgacgcggttatttcaccacggtcagcgtcggcttgccttttttgcttggggtggccggcgtgtcgtcttcatcatccgcttgcggcagtgcttcaggatcatcaacgctgtcgaccgacaccaaagacggctcttcgtcgtcttctccctcgctggatggggcggtttgttcaaacatctcctcatcatcagcgtgggcgtaggcaggctccatatcaaacatggtgcccgcgccattttcacgtgcgtagatggcgagcaccgccgccataggcaccagcacttgctggggcttgccgccaaagcgcgcattaaaacacacgtgctcgttgctcagttccaagttaccgaccgcacgcggggcgatgttgaggacaatttgcccgtctttaacgtaatcaaacggcacttgtacgcccggcaaggtcgcatccaccaccatgtgaggggtgagatcgttatctaataaccagtcgtaaaacgcacgcactaaatacgggcgacgtggtgtcatcgcaaattctgatgtagacattattgacctgttagtcgcatttcacgttcagcttctgtcagtgaggcgagaaacgaatcacgctcaaacagacgcgtcatgtaatcttttacttgcttcgcacctgggccagttagctcaatgcctagtgcaggcaaacgccacagcaacggcgccaaatagcaatctaccaggctaaactcttcgcttaagaagtagggatcttcggcgaatactggagccagagctagaagctcttcacgcagctgcttacgcgctttgtcggcgtcgtcagcactgccttccataatttggtcaaccaaggtataccagttacgcttgatgcgatacatcatcaaacggctttgtgcacgggcaacagggtataccggcatcaatggtgggtgagggaaacgctcatccaagtattccatgatgatatccgcgttgtacaacgctaactcacggtctaccaaggttggaacagagttataaggatttaagtcaaccagatcttctggcagattattcggatccaccagctcgatttctacactgacacctttctctgcgaggacgatgcgtacctgatgactatagagatcagatgcgtcagagaataacgtcatcaccgagcgtttattggcagcaacagccatcaacccctccaggatgttcaatatcaatagaaagcaatggggacctaaagtccccattgcggattagcaacacactagattaaccgatcagtgcacatcgcgccaatattctttcttgaggaagtacgccaaaatcaagaataccacgaagaaaccaatcacccaccagcccagttgctggcgctctagcttcaccggttcccctgaatattcaaggaagttaaccagatcgcgcaccgcattatcgtactcgctggcactgagttcgccgttgccgtcagatttgaggccaacaaactcttccaccggctcaccgtccaccatacgtgtttcgtacactttacggggtgtgccttgaagctcttcgagcacgtgtggcatacccacgttcgggaacacagtattgttcaccccaaatgggcgcgatgggtcgacgtagaacgaacgtaaataggtgtataaccaatccacgccacgcacacgtgccaccaaggttagatcgggcgcaggtgcaccgaagtactgcgcgcccgcttcttgcgtcatggcgtttttcatcaactcgccgtaatcagcattcttgtcgacaatcaggttgtcttccatcaagtctttaggaatattgagatcttcggccacacgctgataacgctgatactgcgtagcatggcaaccaaaacagtagttcatgaacagtttggcgccacgttgcaatgaggctttgtccgtcaaatcattgttggcttcgtccaagtggacattaccaccggcggccatcgccaaagagggcaacagcgcgcacaagattacaatccattttctcatttgaatgtcaccctctctggtagcggtttcgttgcctcatttttgctgtagaagaacaacagcacgaagaacatgaagtaacagaagctgaagatctgcgccagcaaggtgtacgttggggttgctggcaacgcgcccagaatacccagagcaataaaagcaatcacaaattggacgatgttcgccaagtgtagcttgctgcgatagcggtatgagcgcacacggcagcggtcaagccacggcaggatgaacagcatcacaatcgacgcgcccatggcaatcacaccaattaacttgtctggaatcgcacgcaaaatcgcgtagaacggcgtgaagtaccaaacaggggcaatgtgctcaggggtcttcagcgggttagccgcttcaaagttgggtggctcaaggaaatagccgcccatttcgggattaaagaaaatcacgtaggcaaacaagatgc

SEQ ID NO: 143 - DNA, 19112 bp, synthetic construct
  variation 4122..4131: note = n is a, c, g, or t
  misc_feature 1..19112: note = Synthetic
  source 1..19112: mol_type = other DNA
atgtccgcctcgccgcgtcgcaagtcgtcttcggtaatcgcggagtctttctgcaggcacttgagttcatcgttcccctctcgacgaatgccgcgaatgtggatttttgtctcttctccgtatttccggcagactttcacgaattctttccgacgttcctcgctcaaggcgggaatcggaatacgaatgaccttcccatcgttcgacggattcaagccgagatccgaggacaggatggctttttcgacgtctttaatgctcgtggggtcccacggctggatcatgattgaccggctgtccggcattgagaggttccccacctgctgcaagggagtcggcgtcccgtagtactcgactttaatatgatcgaagagcgataaagacgcccggctgccccggatggatgccagttcctttttcaggtgttcgatggcgccattcatcttttgcgtgagctgttcaatcgttgtttgagacggcatgataaatcagaggctccttaattgagaaccgcgtcgtgtttgaccacggttccgattttttcccccaggaccacgcgtttcaaattgcccggttcggtgaggttaaagacgatcaagggaagattgttgtccatacacaacgtgatggccgtggcatccatgactttcaggcttttgttgaggacggacaggaacggcagttcctgaaacattttcgccgatgggttgtccaagggatcggaatcataaatgccgttgaccttggtgcccttcatgataacgtcggctttgatttccatcgcgcgtagggccgcggccgtatccgtcgtaaaataggggttccctgtgccggcggcaaaaatcacgacccgttttttctcgaggtgccggatggcgcgccgtcggatgtaactttcggccaattgccgcatttcaatggccgataacacccgcgtggccaccccggctttctccagggcgttttgtaaggcgagggcattcaacatagtggcgagcatgcccatgtagtcggccgccgcgcgttccatcccgtccgcgctggcggccaggccccgaaaaatattgccgccgccgatcaccagcgcgacctcgatttccatgttcacgacgtccttaatttcatcggcgagtgccgtgaggatgtcgcggttaatgccgtaggtttgattccctgcaagcatttccccgctgatcttgaggagaatgcggcggtactgcacggacgtcactcctggcctaattggtatcgcgtaaaccgggcaatggaaatgttttcaccaagtttggcaattttttgcgtgaggatttccgtgattgagacgttgggatctttgatgaaactctgttccaggaggcaattttcctggtagaatttttccaattttccctgaacgattttgtcgatggcggcttcaggtttcccgagttctttcgcctgggccaggtaaatcgccttttcccgttccacctgttcggacgggacttgctcgcgtttcacgcaggaaggattggcggccgcaatctgcaacgcgacgtctttgaccaattcctgaaattcttcattgcgggcgacgaagtccgtttcacaattgacttcaaccaggacgccgattttgcttccggcgtggatgtaggatgagacgacgccctccttggtttcccgcccggcttttttctgggccgcggccagaccgcgttggcggaggaggtcaatggctttttcaatatccgaaccggtttctttcagcgcattttgacagtcaaggattccggctcctgttttgccgcgtagttctttcaccaaggtacccatgctggacatcgtgtatccttctccctctatttggccaggatgaaaagaaacgttgaggaccctctgtaaatcagaggttccttgaggacgtgccgtgacgttctacgccgaaggcgtctgaacgctttccaccgggttctcggttgcacgggtggagagcaagtcactcataatcgtatcttcttctccttcaccaccactggaaccctcctgcttgttacgaaggtccacaccttccaggcaggcgtcggcaattcgggtggtaaagagtttcaaggagcgaatggcatcgtcattcccggggatgggataatcgatccgcgtgggatcgcaattggtatccacaatggcgacaacgggaatgcctagacggttggcttccttgacggtaatgtgttgaatgcgcgtgtcgaggacgtaaatgcagccgggcaaactttccatggccttgatgccgctcaagtatttctccagtttgccccgctctttttccatcaataagacttcttttttcttcagccgttcatgcgtgccatcggtttgagccgcttcgagtttcctgagttgcctgatactttttctgatggtttcgaagttggtgagcatgccccccagccaacgctgggtgacgtaatacatgccacaccggttggcttcttcttccacgatgtcgacggcttgacgcttggttcccacaaagaggaccgattctccggctgcaacggtatccctgacaaagttataggcgtcgaagaagaatttggcggtctgttgcaaatcaatgagatagatgccgtttctttctccgaagagatacggcttcattttgggattccagcgattggtttgatgcccaaaatgtacgcctgcctctaacatgtctttgatcgataccatattggggtttttcgcctccattcagagagattaggaattaagccgtcactttaaacggtattccggtgaaagccggccgtcggctcatggcgtcaatcagttgacgcaaaccaacaaggtctaacacaacccctgttttcaatgcaaggtcaattgccatgcttgtcaacccaaagctgaaatgtcccctttacaccaggatgaaccgcgggcgcgattcgacggacaacccagggggttgtcactacatgaggaagatgaggaacctctgattaagcgtgatagcgggatgcagggcaaggcgttctgcagcgaaacctgtggcttatcatagagataggtgaaggttgagcgaggacacaacgcagccctgcgcccgatagtgcagtaaatcagaggttcctacagtctatctgggatcgtcaggtctctgtgccctgtaggttcccactatatgtggtctgcttacggttccgatgatgtaggcgtttggcacgttccccggggccttatcgtaaaactttcccgtcagatcaccgctccaggtggaaaattctgattcggagaagtccagattgctccaggtgtcaagcgtgtacctcttgcttacgtcgttaccgtgatctaccgcataggatattcctgccaccgctttttcagttgagaacgtgtacctgaagctgatccggggatcggaccatccggtgtgcttagggttgatgatgccgcggactttgccggtccacgtggcagaggcgttaggatttcccgccgcccaattccttaagctttctgaatccaaaacgtttccggcaccgtctgccgacgcggtcatgtaggaactactattttcatgggaagtgaccaccaagtcgttcaacgaaggtatcccatgatgaactgatcgtcgcatctcgaatggcaggtcatcccacgggccccacggatcgttgcccatccacgacggaggggatgacaattcatgaagacgccgaagggttctacctatcttcgtccataatttttccatcctgcgccgatccgtagcataatctttcctgctctcgttcgttgcccactgaagcaattcgtccgaaacatatcctgactctatggcctctgatatttccgtccagcgttcgaccttggaggcttcgcccttctttgtccagtaactgatggccttttcggcggccctttgcgcccgttggactttcctgtcgccgggcttctcacgtgcagagaagccatccggcacgggtatgacaaacgctaaggcgattatgcaaaccacagttgtcagcaatcgtttcatggcttctctcctatttcatggtcgttaccagaagaaatcttggggggggggggggggggggggggggggggggggggggggggggggggtggggnnnnnnnnnntttttaaaaccttaagggctttttcaaaaccaacttttgccccatcgttttaatggtttccaccttattaattggggttaacccaataaaacttaaccccccccccccttctgtcaatcctcctcctttcttagtgcaaaaggggacattgaattgcgctaacagggtcaattgccatgccttttttaagagagtaaaacgaggggaaatgggcacaatcgcggattagtgggcttgcagttttgacggggcctcacgaatatcggtacagttcccttttcccgcaaaccctcttgtcctgtgggagaaagttgggggtcgtggcggttttcatcctcaccttactcctctcccatcaagggagaggaagtcaattttgctccctctcccatttcctgcattaagcgggaaatagggagagggctggggtgaggggcacacatttttgcaatgaggggttaagaatggttgaagttcctatcaagctgtacgtgcaaggtcttgccaaagaggccaacgccgcaacccgtgccgtcgcattgatgacgagtcatgacagaaccgtggccctgacggctatggcggaacagttggacgcgagcaaggacgacgtgttggctgccaacaaagaggatctcgatgctattcccaaggaatggggcccggatgagtatcgtaaagcgagagagctcattaccgtgacggaagaagatcttctcgacgtcgtcgcccatattcggcggattgcggaggaacccgatcccacgggagaaacgtcccaggcctggttgacgcaagaaggtctgcacgtgcatcgcgtacgcgtccctatcggcgtgatcgccgtcatctccgaatatggcccgtccgtggttgccgaatccatggcaatgtgtctccggtcgggaaacgtgtgcgtggtgcggggcggcaaagagtggttttggaccaattccgcattggcgaaggtcttgcgtgagactgctgaacaacatggtgtgcctcaaggggccctcacgtttgtggatcgccccgaccgtgagggggtgcttgaactgacccggttgagaaacgtggtacacggcgtcgtgcccaggggaaaagcgaacttgcgcaaagtcgtcatggagcagtcacgggtcccggtcctggggtacgacggcggcctgtgtcacgtttacgtggataaagacgcggacgtgccgttggctcaagggatcgtggtcaattccaagattcaggacccggttgccaccaatgccgcggatacgctgttggttcatcaggccattgcccggcagttactgccgggcctgctccggcggttactcagtgaatttacggttgatctcatcggctgtccgaaaaccgtctccatgatggggattatggccatgaccggacacaaggggattcgagcggccacggatgaggattgggaacagaaaagacaggcgctgacgttagggattaaggtcgtcggtgatctcgacgaagggttggcccatattgcggcttacggaccgggccataccgacaccatcgtgacccgtcgttacgatactgcgatgcgattcgttcgggaggtggattccggttcggtcctggtgaatgcctcgacccgcttgcattcgggttcgcagatggacctgggtgaagaactgggaacgaatacctcgcatttccacgtgagaggaccgttgacgcttcgatccctgactacggaaaaatacgtcgcgttcgggagcggtcagttgcgacaacctcatcccgttccccaggcgtaccaggatgcgatgatgctgtcctcaaaattttagaggcgtttcgcaaccctctcttcccaaggggcctacggcccggttttgctcccatggccgatttggacattgcgcggcatcttgccgaatggggacttcgcaggtttcccgatgaggattcctattatgcctggcaacgccaatccttaagcggagcgcgacttcggcttctgcagcaaacggctcgagcccgtggtgaagcagaggactcggatcaagctttttatgacctggcggcgtctcccgacgttcttcccgttttgtatagtcaacggtacgggtattacaccgtgctcggctccgcgatcgcggacgcattggcaggggcacgatgcgtgttggacgtggggtgcggggttggcattctcacgacctggtacgcgacccggttccctgacgtgacgtttgtgggtattgatcggtccctgaagtcgatcgaaatggcacgcaagtttgcccaatgtcatcaactcgaaaacaccagctttcaccattgtgaaataccccaacacgatataccggggacctttgacgccattgtcgccacgcagtccctgtttcaatcggaatccgagcccggactcccaagccggagttggacgacctttgaacgcgaccgggatgaccgtcaacagcaggcattggaagagcgcacgggtatcgggcctcgtttggaccggctgttgaaggcgctggtggtctcgggaaaggtcgttctgtttgaaaaggccgtgcatccgggcaggcgtgtgttgttccagcgggccatggaagcgagggggtgcgttcccgttgcggaaccgcaactgttgacgtattcggaactcggtgagcgggttgaagatggacctttgtacgttgtggagcgaagtcctgcatctcctgtagcggcgtttcgggaagacgtgccgcagaacctgcaagagtctatcgagactcgactcgcgcgtatttggtccggacaggagagcggtccgccggacgaatcgtctctctatgaaaaccatagtttcgcggctcaggaagtctggcgacaacttccggaccgggtcgtcctgcgacagcagaccgacgaggaagcggatgggcgacaacgccacattgaatacggacgctgcgcaggaaagttcttctacctgtattgggcgaatacctttgatcaacggcaaattgtcatcatggaccgggagcgaagtgcgctcttggaaaactattactccgaagcgatcggtgagccttgaaactggcggagagatctcagccaagcacgagccatgttggaaaattatggtcgataatttgcattccaaatgcaaaactcaacatgtcttcctcgtacatcaggcgttccaagtggatatgggaagcgcggctatgcccggatacgtggtgcatcccggtgacatatgcctgcctttcggtcccgacgtgaccgtactgcctttcgccaaactgtaaatacccgaagcaatttatttattgacagcctatgcgaaagcggaccgtgaagacctgagcccggcagataaaaaggtcctgtcgcaattggtggctgcgattaagcaagaggagacgaatagatgacgacgaaacaaacccgattggggcaagaggtggaagcggccttgagcgaggttgttgcccacgtgcacggcgaagaggaactaccgtgccgcatggtcgtcgagccttcggcggagcacatttttgcggtacggaagcgcatgaaactgagtcgccagaagtttgcggaccggtttggtctcgacgcgcgtgctgtacaggattgggaacaggggcgccgtgttcccgatcgcgcggcccgtgttttgctgaccgtcattgaccgcgatccccaggcagtcgtgcgtgcgctcggtcagtgagtgacgaagttggcagacgttgtgtttgggaaaatggtggcggtgaagggtttcgaacccctggcccgcggcttatgagtccgctgctctaccaactgagctacaccgccacattccatgatggatataccacatggcatgaagtttcgacaattccattgttcagtaattcgttgacgaatggtcagattgaacaggagcgacggtattcttttcctcccctttgtcaggggaggccaggtgggtgtaggggcgacctgccgggcgcccccaccagagaaacccgctgccacccctcaccccggccctctcccgcaaggggcgagggagttaaggcctctacctcccaacttctcccttttcggaaaaagttcccgtccttacaaaggaggggaacaagaaaacgacaaatgatgtctacatgaacgtcgagaccaaccgttggttcgagggcctcaatgaccgtcagcgggaagccgtgcttgccggtgacgatcctgtgctcgtggtcacaggtcctgggaccggaaagaccaaaacgttgacggttcgtctcgcgtatctgctggctgagcggcacgtcgcgcctgaggcattgctggccgtgacctttacgacgcgggcggcgagagaaatgcgtgagcggctaaccctgctcatcgggtcaccggcggaccgggtgttcctgggaaccttccatagcgccaggagatgacgcgggtctggctgaaattgccgaagcctatcaacgacaattgcgcaaatgcgatttgctggatttcgatgaattgttgttcctcggcgtgcggctgcttgaaggttatgccgacgtgagggaaagcctgcaacaacgatatgcgcacgtgttggtcgatgaatatcaggacgtcgatccggtgcaacggcaactgttgcagtgcctgtccggcgaccaaaaccgcctttgggccgtgggagacggcgatcaggcgatctacgcgtttcggggcgcgaagtccgggcatctgttacggtttgagcagcattatccgaatggtcgagtcatcacgttggaacggagttatcgcttcaccccgcagattgcagccgtggcttcgcaggtcatccggcggaacgcatcacgccggcccttgaccttgaatgcagcgaatgcatccggagtgccggttcacgttgtgagctttcccgacgaacatccgcctcggggaatcggcggtcagacgcaagcagcccttgaagacaaggctgaacaacgtggtttctcgctgtatgccgccttgggacaatccgaggtcctttcgttgtctcaaatgaaagcggccaagttgttgctggcgctcatcgaagacgtccaaaggaacaagacggagcaatctcttgcacagttcattgcgcacgtggccgacgtcacgggtctcaggcagtggcggattgagcaggacccgcgtcatgaaaacgacctgttgctgctgcgctcaatcgccgcgaaatatgatggggtgcccacgggaacggcgcttgagcaatttccggaagaagcgtcgttggccgtcgaggtcgatgactatgatgtctccattgatgcggtgagcctgatgactatccatgccgccaagggattggagttttccaacgtgatgctctgcggggtcgaagaagggagtttgccgagtgaaaacggcgaccttgaggaagaacgtcgactgttctacgtcgggttgacgcgcgccaaagaacgggtctggctcctcaattgccgcagccggtttttgtttggggaacgtagagaccgtgaaccgtcgcgatttcttcaggaattcgacgacagcctcaaagaaaccaccatcatgcccgaccgaccacgacgctccaaaccggaaccgaaacaactgtctctattgggataaaagcaatcactccccccttgagggggagtcgtggagccaagggcgtagcccgcaggcgaaacggtggggggaaggagggatacgggttagaacctcctcccatttcctgcattaagcgggaaatagggacagggcagggtgagggggccaaaaacctgaaacaactgtctcttagccccgttcgatatgattgacagaattttatctcgtacctgatacttgttgcgcttttcagtcaaaacaggagcaaacatctatgccaggaaatctcattatcagtccgatttccattgatcttggtgctaaaaatacaggggtgtattttgctcattatccggaaggcagctcgattgaagagatcgaaaaagaaggcagggtctatcaacttgagaaagacagctacacgttgctaatggccaatagaactgccaggcgtcaccagcgacgcggttttgaccgccgacagatggtcaaacgtttattcaaactgatatgggagaaacattttgggctggagtgggataagaacgttcagcagaccaccagttttttattcaatcggcgcggattcagttttttaacagaggaatacgatgttgaggtgttgagccggttcccaaaggaagcttatgagcagctacctgaacagttgaaaatcgatcatgacaaaagtgggttgtacaactttgctgatgcattgtcgcaatggacaaattcagataatgcacttgaaaagatacgaggcaagtttcatcggattttgttcaagacatattgtgaaaagattcgcaaatgctggaaggacaagacaaccaatgatcaaactgttggggaaggtcgagactctgcaaagttaggcaatacgcccaaagacatttttgaagaactcttccaggaattgcccgaactcaaagaaaggatagaaacggaggaatacacatttgaaaataaacggaaggagaaagtaacagccagatacaacaggggcgaggcaatcaatgtcctttcatttgtcaataataattctgtcgatgtagccaataaaattgtaggaaaactccctcctgaacaaacggattggctatttaatccttttgctgattttgatttggaaaaatcaaaagaaaggcttacatcgcctgaaaatagtaatatcaagttgcacttgcaacatcttacttttgctttacacaaaaccctcaacgaactgcaatctggtggacgacatcgcagcaattattttggagaaattgaagatgtactgaaaaacgagaaccatactcacaagtatctggaaaagttttgtgcacagttacagtccggtcgtttcaaacctcaggattcggattcacctctcaccgttgaagccttggccaacctcatcggccatctcagtaacctggaacttaagccgctacgcaaatatttcaatgatggaaagcataaaaccggcgatttatggtgtgaagatcatttgaataaaatatttgaccgttggatcatgcgggaatggcgcatcaatccggataaagacaaggacaagctcgaagacaagagaggagattacaaaaagctccgtaaggactggaaggctcataacggttcagtcgtcgatttctggttggcaacaggccctttcacgactatccccccatatcaggacaacaacaaccgccgtccgccgtgttgccaaagcctgatactcaacccgacatttttgaataacaactatagtcaatggcaagtctggctgggagaactcaagaaactggcaactgtgcaagagcatctgggcgattttgaagttcaactgaaaagcttgaaaagtggtaaagagcaatcgtatttcagcgatgaaaaagtgggaaaactgaaaaaattttcaggccacaggacccataaggacttggacgcccgtatccttcaatttatcttcgatcgtataaaagctaatgattcgctgaaactgaacgaaatatacagccatgctaaaaagtatcggcaagagcaatcgaccgaacaggaaagaaagggcgcaaaaaacaagctggaaagagccatcgaagacagcgaactacccgatatgctgaagacgtccaggaatcatcaaaacagctccgtgtttgagcaaggcagttttttacacctgatctgcaagtactacaaaattcgtcaaaaggcccgtgacgggagggtgttcattcagcccgaatatcgctatgtcgatggacgaggctatgaaaacacaagacgctttgacgataaggatcatctgcttatctattgcaatcataagccgagacaaaaacgctaccagatattgggtgatttggcggggttgttgtcggttgcgcccgtgaagttaaaagacgttgttgaaggacaacatggggagaccctggacgaaaaattattcaactggctaaacggcattgatcatttgaagacaaattgtgaccgggctgcaaaagaacagaaggatcgtcgaggtcgcctgaaactggatatccaaaagatagctgatctcatttatcatcaaagtcaaagttgcttgccttctgcaacggaaatcaaaaaaattctgagtaaatcgagagtggatgaggcatctagacttcatagtttttgcgaaagggcgagaaacttatgtctgacggttacccagcctttgtatgacgactcaaagcagcggcaatggcaacaagatctgaataggaatcccgccatcgccgtttatctgctcgcgcaaatcaacagcatcgccttcaaggaacgtagcggcaatgccaacacgtgcgccgtatgcagtacggataacgctcagcgtatgcagatggccgcaagcaaggacgacagacaaagcaacgccaaagcccaacgtcttcccgccattgaaacgcgcctgattgatggcactgtgatgcgcatggcgcgaattgtgggtgacgtcatcgccgaggataaatggaaaaggatcgaaggcgatctgaaagcagggcaatctgtttgtgttcccatcatcacagaatccaaccgttttgagtttgagcccagcttgaaagagataaaaggtaaaaaaccaaaaaacgtggagaaaaagaacagatcagaaggtcaggaaagaatttctgtcagcaaggatgaacgtattaaagaagccagtagggggatatgtccatatacgggcgccgagttgggcgatgccggcgatcaagaccacattattccccgttcttctgagtggggtattctgaatgatgaggcgaatcttatctgggcaagtgatgaaggtaataagcaagttaaaaatgacgaagagttctccctggcggatctcaactctaattataaacagaagcaatttcaaacgagtgacgatcaggagatcaagcaatggattattgagcaaatcggtgatggtagaggagaaaatttccaattcggaccatatcgcaatttcatcaacttgactccggaccaacaaaaagccttccgccatgccttgtttctggttggcgaccctttgcgtgaaaaagtcatcaaggccatcgataaccgtacaagaacttttgtcaacggcacacagcggtattttgccgaggtgctggccaataagttgtacaaaaaagcccgggctatcgacaggcagaatttgctatcgtttgattattttggcgtggaggcacaagacagttcccgaggcgacggcatttatcatttgcgtaaacggttcgagactattaatcctgaggtgcagaactaccgaaaagacaacgggaaagcccaagaaccctactcgcatctcatagacgcgcaactagccttttccatagtggcagacgcacatcggaacgaaggcgggcttaaactcagaatcgataattccgtcagtttatggcctgtggatggaacagtcgctaacactatcttcaacgcaattcgggtggctccagacgaattgcgtccaaggaaattggagcgaaggaagcctgatgaaaaatactttagccataggtccattcaccgcgatagcatgtatgctgagcattatgtgccgattctgatagacaaggaaaagggcgaagtacacataggatttgactggaataacagctatgctctcagagataccaaacctgatcgcataaccctctacttcgtgctgcaacaatttggtttgctggaaaacagtttgcatctgacaaaggacactccctttcacgaattaccacagcaattggcaaatgctggattcagtacggaaaccaattatttctccatttcgcttaacgtgcaggcgatacatgcttactatatagaaaactataatacggctaagggttatcagagctatcccgatgagatgaaatttttgcggtcgcttgcttaccggacagagaaaaagaagatcacgacattggaagaggtccaaaacgtattgaacaaggcaaggaatttccaagttacgataaagaaactcgctttgccagcaaaaagggaatggcaacggctcgttgacgaatgggagaaaacagatttagagaacgacgattttttgagacaatttttcagggtatcggagagccgacaatctcatgaaaaagttcgcaaagtcttttccttgcccattaagacgggtgaaggaaaaattttactaaaaagacgttcctggaatggagaagatatcttccaaatagtcaacgattcagattcaagaacagttgatgcaaagatatttattcccatctttgtcgaaagcaaaggaagcatcgctaaattattatctgaatcagcccggtctaaaaaattgtttctcttggatgaggccgaatattacgaccggattaatgatgatattacagaaatagatcccacaggctggcatccgatagaattagacgatagattgagcagcttgggcattgctggattagaataccgtatcgacaataatactcgtccacaagttcgtcttacttttaacaagagattagaacaagaaaaaatagagacaatcttaggacatccgctacttaaacctaaagaaaaagaaagactgaagacacaactgcaggaagtaacagaagaagataaaattattgaatacacgggtagtggttttcagcaaggcattaagcaaaagcttttacctgttttacaggagcattattcacgaaacgtctcttcataaaacgaaacgaaaagctcgatcatgagtcccacaatattcagttcggatggatacaggtttttctttttttcgagggaagaacggagaaagcacgttcatgttttttcggcggatggtgaagcaaagttctggctggagccggaaattgagcttgccaaaaactaccgttattcaagcaggaaccttaaccatatcgaaaagttaatcaaggaacattaccatgagatcatcaacgcctgggaacgacacttcgacaactgaaattacgcatatctcttcatatgggatatggctgcttgcagacaacgaggaatttttcatgtcgtatgatgacttcccttggtttaaggatcagcctctcagggcaatattaaacgtggaacagccatctcaaggccacttttactggccggaaatcgatgtggatttatccagagagattattaataaccctgacaggtttccgctcaaggcaaaaaccacctgatgaaacatcttgtcatctctggctacggggcctttctagggctggagagtcaccgtttggcagtcagacaggatgacgaaacccgatattacccacttaatcgtctttgcacagtcgccattgccaaacgcggagtcagtgtttccagtgacttgatcgaagcgttcagcttcgtttaatgtaatcatcgagcgacaacgctgagcttcaccagtataaccaattacccagcaactgaaacagaactacctagatctactccggggcctcatgtcagcttcaccagtataaccaattacccagcaactgaaactaagaagtgagaatcgaccacgtaaaaaagggcactaagagtctgaaaatctttttcctggttctgaggtatttcatcggactgtttgtaaaaaagatgatgagaaatggatgcccaagcatgctgggataattttacaattctgccttttttgtgcctacgatccgtagctgccggttagggttgctttccatccaagccgttccttcaatttgatagtcttgcacctgtccttcgagtttcaaggtgtattgtccgatatctccaagaacggaaaggcttttcaagttataacgggtgacgtcaatggttccggaaaactgaccgttctctgtgtcgtaatgcccgctataatagtacccttcatctcctccaaggagccgtttgtcatttagaacgacaactccggatcctacaagatgtaaagttgaaatgaactcaatagtccataaaccgtcaatcttcataactcctccttttctgccgcctcaggcttcgtgcagtttttggtttgtcagttaggataccatgctgtcagagaaggtgtgaaaatgaactctgttctttgcaaatggggtcgatgagatagtaatgtacgtcgctcgtccaatggttgaaggacggcacgttgccctgaacgtctccagccggtttcgacactccaccattttgttctgaaagcagatagaggaatccatcgtgcgttcgagaaagggaacggtcatgcagtatgcgggttggctggtcatggcgttgggaatcctgtttcaggtgctggttccgcttggtatcctgggacgtcccacgggacgctggttgggcatgcctgcggaaatcgctgccttgtttatggctacggctacggtggtcatcgggatggtgatcgtctatctcacctggttgaagccatacgcgacgggtctcgaccgggatggcaaataatagccatgggattgccatttatgtgtatgtacttgcgaatccccctcaccccagccctctccctccaggggagagggagatttgggaggccagctctcttcctccaggggagagggagatttgggaggccggccttctttctccaggggagagggagatttgagagtccggccttctctctccaagggagagagttgagagtccggtcttttccctccaggggagcggggagtttgagaaccggcaggaagcggcgatcatgagcgtggcgcaattcaccattcttctgttgttggtttacctggtagggattaagtgcatttcgtattttgcctaccggatttccagaaacgattccgaggattattttctggccagtcgcaatatcggcatgctcgccctgaccgggacgatcatggcgagtatcttttcgaccgggacgatcgtggccgcgccgtccgagtttttcagacagggaacgggctatttctggttcttcttttttgcgcccatgcccgtgatctacttttttctcgcgaccaggatgtggaaacttgggaaagtgaagggctacgtcacccccggggaaatgctcggcgacttttttcaaagtcgctgggtcacgttttgggcgggagcggtcggtctcctggcgttgttaccgtattcggtggcgcaactcgtggccattggcaagacctttgaggcgctgaccgacggccacgtcacttatttctggggcgtgacgattgcctcggcgtcgattgccgcgtacttgtactttggtggcgcgcgtgcagtggtgtggacggatatggcccaagggtttctgttggctttcctgctgatacttgccggtctgttgtcgatgaagtgggccggtggatggaacgcgatggtcgatgccttggtggcccatgctcccgagaacgtcacgtttgagggaaaagtgtcatgggcaaggtattacgaatacgggttgctgacgctgtcgtttccgtttttgccctacatctggcagcggatgtatatggcacgctcggcgtcggccgtggccttcagcctctgctcttaccccgtcatcttcatcattctgtttttttccgcttgggtcatcgggacatcggctttttccctctttccggacgggttacaggatgccgatacggttgtgggagcgatttttcgagaaaacgcgccctattttggggcgatggtcctcgtcgcggcctttgccgccggcatgtctacggtcgatagccagatgctctcggccgggtcgttgttcgtccgcgatctcgtcccgctcgtggtcaccggcattgatcagcgccgtaattttctgatcggtcgttgggcgaccatgggcttgttggttctcctgtacctctggagtctgaccctgcaatcggaaccggtcctggcgttgatcgtgttcggcatgagcctgacggtcatcttcatcccgtgcgtcttcggtatgttctactggaaacgggccacgccccagggggcggcctggtcaatgggtctgggactgctggcattcctggtgaagcagttcaagctggccgggttggatgtgtacctgcccgtcatgggtcccattacctgggccttgatgacggcggtactcgcgtttgtgggagtcagcctgttgaccaactccgatcgaatggcggccaagcggcgggagtatgaccgattgctgttttctcttttcctcccctttgtaaggggaggttaggtggggtagagttgaacgtccatagagcacgtgggttcacttcctggccgccggctctacctcccctcacccctccttatccttcggctacgctcaggacaggcaaaggaggggaatgatcaacgaataaatgaatgcctacacacaaggataactccaactccctggtggatcatctggtaagcaacggcgaacgtcattccccccttcgtggattgctgattgcccagttctttggggcgttcaacgacaacgcgtggaagttgatggtcgcgttgctggccatcaaacagttagcctcgcaggtcggcgccggcccggaattcgaagccgcgtcccaagcccaaacgactctcacgttcgtcgtgttcaccctgccgctgatgcttgtatccatcttcgccggcgttttttctgatcgattcagcaagcgatccgtgatcgtggttatgaaggtcgttgaagtggtgttgatggccttggggactttggccctttaccataatccttccgggggcatcctgccgctcatcgtgttgggtgggatggccgtccaaagtgcgctgttcagtccggcaaagtacggcatcctgccggaactgcttcctcatgaacgtttggctgtagggaacggacaactggaattgtggacctttctggccattatcggggggaagggtgctgtggg

SEQ ID NO: 144 - DNA, 22572 bp, synthetic construct
  source 1..22572: mol_type = other DNA
  misc_feature 1..22572: note = Synthetic
acccagcgcctgaaaaacggatccgcgagctcaaacgcttcatcggttttcgtgatgtctctggaacgcatgagtttggcaagtgcactgtaggtggtgcttgtcgggctgcttccgtcgttaaccggacgcccgaaaagcgcagtatctctgatgacgcggcggtcagtcagagagagggaagtccagagcaccagataattcatgtcgtgcctggagacgacttcagccacagcggcttcaagcgcaccgtcttgcagagtgcgtccgtaaagactgagttgatcaaaaagggcagctcccagtatccgtgtgtaatgcgggtggccgtgcgtgatgttgaaaagttcctgtgcggttttgcgggcatcttctcctgcaacgggactgagtatttttgcgaggcagacaacgttgtctttccgcgcgggggatttaagtgcaacaacgtcagccaagctgtaaaaggggcctttgggcttagtgaagagatccgcggtgagtgcttgcgaatgcacgcagaaaacacagaccgcatgcctgagttttgaaagttcagagctgagtttttcggttgcggctttgccaaagagaaggacttcggcaaacccgtcaaagattacggtgaggcccggtttttcgcggccggcggcgtctatcagacggacggcgtcttctaaaagcacagtgccgtccgatgctgcagggaaagtgacgctgagcctttccggggcgagctgaagtgtgatttcgggtattacgcgaaagtgcgcgagaagccgggaaaagctgcgggactcaacactttgcagtacggcctgcacgatgagtgctgcaaatgtctgtgggctcaccgctttttgcacacgcaccgtgacggcgggcagtttgcggtcggcggcggttttttcaacgacccttactgcaccgaatccgcgcggggccgtgaaagcgagatgccttccggacacaagagcggctgaaagggctttgtgctctttttcgcgtccgggaaacgagagggtttcaagagcgtcatcggagcggaagggattgacgtacatatcgcaatttttcgtaacgaacttctaagggtcaatcctatcgaaaaaattcgatatccggatggtttggaaagaacaagcccgagcaagctttccggtgtcggcagctgcttatgactgccgttatgtttatctaatcatatatctaattgttatctcatcatatgatatttaaatacttgtattaaacagttttgtatgttgatataatgcaataaatatattgtgattatctaatcataatgttgtgattagatcgtgattatattggtggtctgacggaagctccggaagttgctcctttggatttgaagcttggtactgatatgcgtcgggaagatctgaatactgaatttaagcggcattatgtcgatgacatcaaggcaacggttatcgcgtttgccaacacgcaaggaggatatctgtatgtcggtatcgaggatgacgggactgcctgcggagtctcggatcctgacggtgccgttcttcagattcagaatgcactgcgggattcgatcacgccggacgtgatggcgtgcgtcaattgccgcggtgaagaaattgacggcaaagatgttgttgtcgttgaggtcaaacaaggaagtcagagaccttactttctcaggggcaagggactgcgtccggaaggtgtctttgtcaggcagggatcgtcaactgttccggcaggcgtcaatgcgatcagggaaatgctgatggaaaccgcaggaagagtttttgagaaagaggtttcctttgagcaggagctctcctttgattacacatcgagatactttgctcaggccgcggttgccttcggggatcagcagaaaaaaacgctcggtctggttaataaaaacgggctttacacaaatcttgcgctgcttttatccgatcagtgtccgtattccctgaaagccgcggtttttcagggaacagacaagatgatttttcgtgacagagccgaatttgaaggctccgttttggagcagtttgacaaagccttggcttttttggagaaacaccagtcaaagcgttctgtttttcagggcgcgaaaagaatcgatataccggactatccgatgatggccgtcagagaaggactcacgaatgctgttgtgcaccgggagtacgcaagtaccgggccgattctgatgagtattttcgctgacagactggaaattctgaatcagggcggattgctgtcgaacttcacaatagatgaagttctcagaggggtatctgagcaacgcaacgaaaagctggcagccgtgttttaccgcctggggctgctggaaggctacgggtccggttacagcagaatgctttcagcctatgccggcacagggaagaaaccggaaatatccgtcacgcgcttcagttttatgctgactctgcccaatgtgaacggcggtttgggggatgtaagcggacgagcggttatccgggagcagccgcagcaagttgtgcccgcagtttcgcttgaagatctctccgaacgggcaagagagcggatgcagaaggttctgcagcgctgccgtcaacagcctcagataacccgcgcggaggcgcaggatttgttgggcgtttcgcagagtacggcaacactgctgcttaacgccatggtgcagcgcgggctactggtgtctgttggttcaggaccaacgaaggcctatcgcccgacttgcttggcttaagtacatgcgacagtctgtcggtgggggatgacggagatgaatcccgtcagctttcccaccggaaacataccggactgaaggttgaggatcagtgcgtctgcagcgtaaagatttcctgcagttcgttcttggagagatctccgatccagttttcgccggtctcaaccgtcatctctgccagggccttcttggattcaatcatcgtgttgatcttttcctcaaaggtctcggcggaaataaagcggtagacgttcacggaagacttctgcccgatacggtaggcgcggtccgtggcctggttttccacggccgggttccaccagaggtcgtaatggatgatcgcggtggccgcggtgagattaagtccggtgcctgcggctttgagcgacaggataagcaccttgtcgctgcggttagtctgaaagctgtcgacaattgcctggcgctctttctgggccacacccccgtgaataaatttcggcgtgctgcctgtcttctcgccgatccacttctgcagcagtttccccatctcccgaaactgcgtgaagatcagtaccttgcgccctgcggcttcgagatcctcgagaatgccgaaaagccgctgcatcttgccggaatactccgcggaagcgtaagagccgtccttagcgtactgcgcgggggcattgcagatctgcttaagcttcatcatgagcgtgagaaccatcgcacggcgctccatgggactcatgccgtcgttaatctgttcaagcgactttttaacgaccttgtcgtaaagaagcgcctgctctttggtgagcgtgcagtattcatcggtcgaaatcttttgcggcagctcaggcgcaatcgccttgtcggttttgagccttcgcagaataaagggcgccgtgacgcgcttaaactgctcggccgtttcttcatcgtgctcgatttcgatgggctgcgcgaaggtgttcttaaagcccgttgcggagccgagaagccctgggttggtggcttccatgatggaccagtattccatgagccggttttccacgggcgtgccgctcatcgcaacgaccccgtcagccttgacggtacgcacgctcttaaaagtggaggtgcggtagtttttgacggcctgggcttcatccaaaatgagaagccgccaggcgcgctccgcaagcgtgttgacggaagacctgagcgtgccgtaggtcgtgagcactgcgtgcaccgtctctttttcaccgggcagcgcccggcccgggccgtagtagacgtgcagtttaagtttcggcgcaaagcgcgcggtttctctctgccagttggtgataagtgacgtcggcaccacaatgagcgcgggtttgcctttcaattccctgcgggtgcgtaaaccttcaagaagcgtaatcacctgcagcgtttttccgagccccatgtcgtcagcaaggatcgaaccgatcccgatacggacattgcgcatcatccagcggtagccccgttcctgatagggcctgagtgttgctttgacggttgcgggaatgggtgtgtcggtttctttaagcagcctctgaagcgccgtgcgcacggcctcggtgagctgaaccgggcttgaatccatgtcgcccgtgagcgctgcgcgcagaatcgccattttggtgaggccctgcttttgcgcctcgatgcgcttgcggatgcgggtaagttccttttcatccacaaacataaagctgtcgtgaaagcgtacgacgcgtccggccatggctgaaagcgctttgagttcttcgcgcgaaatcgcttcgccgcccaccgccaccttccagtcaaaatccagcaggtccataaggcccataaagccctgcgacacatcccagttttccgcaaggtcaatctgcatcgtggcctgaggtgcgagaagctttctgaggctcttcggaagaatcaccttgacgcccagaagccttaactgcggaatcgctttaaagagaaggggcgtcaattcctgcatcgtcacaagcgtcgtctccgagccctttcgcagaaggtcggtgagttccgcacagtggttgcttaaccttgcggccgtgcgcatcgcgtcaaagcggaccggcttaaaggcggggtcggccaaaatgcgcttcaaagtggcataacccgcgcctaccgcgcctccgctggcgtttgcgtccatcgacaaaaacccgagctcaaccgtgaggggctcttcagcggccttatcagtgtcgtgcgcttcgcttccgtgccagggatcgcgcaccgtgagaacgggttttaagtgcacggcaacagaggccgtgctttgcgccagggggctcaaccactcggaaagtcgcaggcgcagcgccgtgttttcggggttttcgagcgtatcggtgtagtccgcggcaaatagcgccgtgttgtcgggcagcagcgtctcgccgcgaaccttttcaaagcccgcgcgcacgaagctgtcgatgaagatccctagaacaatttcgcccatggtgaccgcactcatcgcatccgggcgcccgaggatctcaagccagggtttgtccacccgcagaaaaagcgcaccgagttcccgggtgagctcccggatttcaggggacgtggtcgcgggaatccagcgcaccgcaaagcagccttcggcgggctcataaatctgcggcatcgcagcctgaaccatcatgagttttgccgccagcacccaggcgtcgtagaaggcttcgatttcctcggcttcgctgtcaagtttcttcgcgtttaaaaagcccgagaacatctcgtgcacgcgcacggggcttccgtccgggcgcatgtcaccgacgcggcaggacacaagtttcccgctttcgtggtcaaattcctgccagtaaagggtttcggaggttcgaaccgcgccccaggtattgaccgaaatcagtgctgcggggtgctcttcgtcggacacgaaaacgggcggagtgtgctccgagagttttgtgagttgcgctttggcaaccttggccgctaccgtgagcacctttctcaccgtttcccgcaagtttccgcccacgtagcccgcgggcttttctgagaggagcgcgagctgcgcgtccggttcaaacgcgggcgtcttaaaggtcagtgccgagaggcttctcaaccagtcttccttggtttcggcttcggagggggcggaccacgtgttgtcgtcaccgatgtaaagatcggtgatgttgctgtcctgcatcaccgacgcatcaaacgtgccggccgcatcggacggatcggagcgcttgagaatatcgcgccaggcgggtagttccgaattgagtgcccgcccgatttctacgcctcttaacgccagttcttttgtgaggtcaatgccgcgcagcgcaaagagaatgaagggattggcatcgatctcctggctcatcttgtaaatgaccgccgcgatgtgtttgcagggcaccgcgctgtccgggcacgagcactgcatgtccatgtcccgccagctcgcgggaaacaggcggatcccgatcttttcgcataaggggaggatgtcgggtgacagttcgcgcgcagagagcttggcaagaatgaggggcgaggacgcgacggcatcaagcagcttttcgcgctgctcgcgggagatttcggggagcttcagagttaccgtataaaacggatcgtagtgcccgataacgcgcgccttgacggcgtgctgttcaaagtcaagccggaaggatttgactttgccggtgttggcgtaggttttgccgcgagggatgcggttggcgtagtcgatgtgcgtgagggcgttgagccactgctcgccccaccaagtggtaccgtattcggtgcgtgccatgagtcggaaaccggttgtcgaaagaagagggctgcacggggaaaagctgtgcaggagaaagggaaagtcgggggtattgtaaggggacggtgggatgcacgggaataaaaaccatgtgcacggcagacggggcggacagactcgtttgcggtaagaagagaaactttcccgacacatcggtggcgtttcagccaacataaccaacacagcagaccgtattcttcaggatgaaaaccttgttacgtctgattggcggtgcggatttcggcggccggcaaagggtagatgctcacggacgacctttgcccgatacggtaggcgcgatccgtgtcctgattttcgacggccgagttccgccagaggtcgtaatggatgatggcggttcggctggacgaagaagaggttttgtcagagatatcgcggcgtcaggggcttccctctgcggatgcttttcagatctttaccggcagctttacgcaagcggtcggctttccttttccggtgcgcccttctaaggataatgtctgggctgagcctttcgcttcagaagctcgaatggatacgtttgcccggtgcaggagcggataaaaccgtttattgcccgagtcgggagagttgccgaagcacctttttaagaacaaaatcggcgaaagctcacttgatattcaccggaaatgctgcccgagttaaggtctgagtgcaggtcggccgcgtgatgatcggcgggcgggaaaataggtcccgcatgaaaaggactgtgtcgctaagattgatctgtcagtctttgttcccggagcgtcattcatgacagagtcccgtgtgtcagaaaaaccggtcatcagtgccgatacgttgaaacgcattcttgcgtttcgtgatgaccgcaactggaagcagtttcacaaccccaaggacctcgcgatctccgtgagccttgaagccgccgagcttctcgaatgctttcagtggtctggagccgatactgaggtcagtgcaaagaaagaagcgatgaaggaggagttaagcgacgttgtcatctacgcactgctccttgcggaccgtctcggtatcgacattgatgccgccgtacgggaaaagattgccgtcaacgatgcaaagtatcccgtcaaagaaagctacgggtcttccgccaaatacaacgaactcaaaaaggccgttcgctcatgacgatcgtttatcagaaaactctcgctgaattttatgaagatcaggccgcaggcattgtcgccgacatgctcgcaggcgccggtcatgagtcctcctcgcgcggttcggcacagtaccgtgcctgggaaaattcgctggttttcatggaaagcatgcttaaaggcgccaaggtctcgggtgactgcggcgtgcttattgaataccggttgccttcgacaagccggcgggtggacttcatcgtgacaggacacgatgtgaagggcgatcccaacttcgtcatcattgaactcaaacagtggtcgtgggcggatgtggtgcgggaaaaaccgggcattgtggttgccaacgtcgcgggcagccgcaacgaagaaacgaaccatccgtgttatcaggcgtggtcttacaaggtttttctcgaaaatatgctcaatacggtcgaggaacaccacctgcaggcgcatgcctgcgcatacatgcacaattacccgtacaaaggctttgaggttgatcccttggcggccgaccccaatcatgaacttgtgcgtgacacaccgcttttcggccagtatgaccgcagggagctcggcgactttgtttcgcagtacgtggggcgcggtgacggcgaagcgatcatggagcttctggccgacggcaaaatcgtcccgggtaagggccttgtggacgcggtaagcggcatgtttgatgaggtgagtccccgctcctttacgcttattgatgagcagaaactcgcttacgaaaccgtgatggacgcggtgcgtacaacgcccgtcaacgacaagcactgcgtcattattgcgggcggccctggaaccggcaaaagcgttgtggcgatgagtgcgctcgttgcgatattgagagagttccgcaacaacgaaaagcgccgcaatgtacgttttgtgtcgccgacctcatcctttcgtattgccatggttgaaatgctgaccagcggatgcaccaataaaaaggagaaggcgaggcgcaatgcgctcgcaaagaacctcttttgcggcagcatgggctttttcacaccttcccctgcagacccgaaggtaaacggctttaccgataattattaccactgcctgctttgtgatgaatcgcaccgcctgcactcgtatcagaacatgtaccgcgggaccaatcagatcgaggacatcattcaggctgcctgtgtttcagtttttttcgttgacgacaatcaggctttaaggcccaacgatatcggatccgtagcgtcgattgaaaaggccgcgcaaaagtacagcgccaaaatttctcgcgtggatcttgcggcgcagtttcgctgccgcggcgctgaggggtttcttaattggcttgccgtggtgctgggacttgcggacgccgacaccgccgggaatgcgcaagggtgggataaggagagctttgactttgacgtggttgatacgccggaagaagttattgcgtttgtaaacgccaagaacaaagcagcggatgatgaggcgccgatcgcgggccagagcattatttccggtgcaagacttctggccggttacgcctggccctggactaaagaggaaaattctcacggagaagtagcggacgtggatttgggcagcgtgaaactgccttggaataaccgtgcgtcaagctacaagtgggccgtggatccggatacgaaggaacgcaacgaagtgggctgtgtgcacacaagtcaaggccttgagtttgactgggtgggtgtttttatcggcaaagatctccggtacgatccggagaaaaagatcctttacgccgatcttaaaaattacttcgatacgggcggtaaaaacggcttggggaaaacgcctgcggagcgtgcaaagaacctcctgccgtatgtttgccgctgctaccgggtgcttctttcacgcggtgtgaggggtgcacgggtttactgctgtgatcccaaccttgcggcgtacctgaaagcagagctcgcaaaagcacagaacctcaaggtttctgagtgacggaaaagggcttctgaagtcctcaggccgcttcgtcaccggggcggctgttgcatttttgatgcagtttcatttatcagccgggacattttgaaatggccccggctcaaaccatgcacgccgatttttcgtcaggcaaaatagttcgaaatcggctcaaaaagccgctggttagccatttttacgtgcggagtgcgtatgtcaggcagtcatcagaaagttactttagcgatcgacctcggggctcggtatacggggctctttctcgtcagccacccggcagaccgggttccgacagcagctgatgccaaggcgatgacactggtgatgccgcaggatacgactgatatgacgtactccatgacggcacgaagggctgcccgacaccgcatgcgcggttataagcgttttaagcttgctcggcgtcttctggcgcttgccgtggaacagaagatccagaccgcgggtgtttcgtttgctgaagatgaaaaaagacgtcagacacaggccttgcgcggtttgctgaaacgccgaggttactcgaggctcgacgcggaagtcgacctgtccgcgctggaaaaggtagatccgttccctgtggctcagcttgaaccttttcaagacttgcttagcggcacaacggatcttgcgacacagtgggaaaacatcagtgaacacttcgacaaagtctcggagctgaaagctgcgcttgagacttacggagatgcaactcagtttaaaaaagccgtcaaacaggttttggatccggaagcgcaggggtttgttaagtcctacggagatgcgtttaacacgttgtctgaggcagtggcaaacctgattcaggcgaaaaaatttggtcagcggtcaaggtcagagtatctgaaggaaatccggcatgacatcgaatacgacagccggcttaaaaaattaatcggtgtatttggcggtgcggacaacctttggcgtctagtagggaatatttcgaacctgcagctgagggcagagcgctggtacttcaataatcctgacatggtgaatgctgatctgttcgacccaaaacgtttgcagaaaacactggccagagcgttcaggtattttcatgccaaaaatgatccaagcaaaaatttgccggcgttgatagaggaagttgaaaaggcacccgacgtcattgagtggctttgcagtaccagcccggaaaaaacgattccggtttatgaagaccaaaacaaccggcggccgcccgtcgatcagacgctgtggttgagtcctgtcgctttgacagatcagtttggagacgactggactcagtgggctaggaagcttcacgagcatgacccggttttgtctgaggaattggatgaaatccttcagcttgcggatcgccgttcccgtgttcctgctttgggaggagaacatccgactgacaaaaccggataccggtggagttatatcctgcagcgtgcattggaccgctccaaatcaagagacgatctgcgtcttcgccaaatcgcggccagaggcgcagtgcctccggcacttgaagttaagtttgcgggggtgatcggttcccagcacaaagcggcatttgtcgagttcctgacgcgttactacaacgaggtcagcgaggccaaacagggcatttggatcccgcgtaaaggcaatctgctggagcgttccgatattcatccgccgatgaagaagaacgtgctttccacattgctgggtaatcttgtgggtggagacggctcgctcggtgaaaaactccttgcctgttggaaaaagtatgagaaggtgaagggcaacagcacacttcggtctttgtgtcagatgctggaggaagcccgaaaggagcagggcaacgggtttaagagcgggttttataacatctacggacagctggaaggctcaggcggatccggcggtatgtgggagacgctcgctgaggcatccaggcactgtaagcccaaagaaaaagaggaaaaggaatattggcggtatgtgcagaacaccgttgccgttgtcgattatctgcagcgcaacatcggtctgacggatgcacaggcacagcgtatccgtaatcctttttcgcttgctcagctctacaacttaattgagacggaagttgacggctttacggcaacaacactggctgcgcacaaagaaaatctttggcgtatgagcggagcggagtctgaaaaaggtgctcagtgctcccgtctgccggctgatgcggcacgcccgtttgacggtgtcttaagaagggcgcttgaccgtcaggcatgggagttgacaaaactgattgtgcagacagtcaagaccggcctgaaagcgcaggatccctcgacggataaacaggctgatatcactcttttgatagaacagaataagtttgcgtttacagaaagccttcgtgacctgaaaaagctgaagacgaagaagtccgccggacgtgttcagactcaggaagagcggctcaaggaggcaagccgtaacatttgtgcttacagcggtaagccgctcaccggacaggtggaaattgaccatatcatccctcgttcggcgacgcttcacgcgggcaccatatttaattcagaggcaaacctcatctgcgtatcgctcgatggaaaccaaaacaagaaaacgacgctgtatgagctgtcggatttaagccctgtctatctgcaaaaggtattcgggacggcagacgtcacggtcattgaggctcagatcgaggagacagttgcaaaactcgcaaaaagcggtgctttacggtttttcaccggacttcgccgggaagaacaggactgcgtgcgccacgcgctttttcttccggagggttctcctgctagacgcagcgtgctggagaccttggggtcgatgaacaaaaccaaggtcaacggaactcaggcatggctcattaaaaacatcattgcgaaaactgaggaagagctgaaagcgttctgtcaagagaatcatgtgcggctgatcttcaatgcgttcaacattccgaatgaccaaacgggcgctgaaagacggaatcttccggaggtctatcgaaaggaaaagaacccgcagcctgtggcttctcactccgtcgatgctatgtgcgtgtacggcgcagcttgtgcgattgaacgcattcgtcaggttgtcggcggtattgaatattcccacgaacccagcatgaaaattgatgctgatgaatctgagggactggtcaccttatatccgaaagcatgtgatcttctccgtgtcacgtccaggtcagtttttgataaaacacagacctttgaaaagaacgtgtttaacgagacgatctacgccgaaaacttcattcccttgattcagtgcggtaatgatgtatttgccggttttgaaataccgtcgaaaaaagtcgtggatggcgctgcgaccaatacggcgggagcagtgaaggttacgggagacggaatggcgttactgcagcttctgacgccttatttcgaggacaaggtcactgaggcagcgggcggctcccgtattttcaggattaataaggcgaaggcgtatgcattactccggaaagtcgctttaaatgactgctccggaaacaaggatgagctggcggcagcggatgttgttgatgccttggcgtatgtcacggtcagagagccgctgagtcagttgatgaaaaacaaagctgcagagaagccggataatttcaaaatcgccgtcaagctcactccgaaagaagctgattggtcgattgcaggcagtctgttgcttccgtcgtatcacgatttggtctgtgcgtgtcgggttgccggtgcaatgtcagcgcaggacggctcacatgagactcagcaggaaagagcgcggaagcttcagcaccacagggtgagaagagaaaaaagtttaccggttaaagctaagcctgccggcagctgggtcagggtctaccgcaagagtgttgacggaagtaaccctgtgcaggttttgtgtgttccgacacgttacgtcggttataagaaagagacgggcgcagggaatccggaatgggatgcaccggtaactttcagggctttcttaaacagcacggtaattacttgtggtgccaggtatttgccctatgaacacgtgatgccgatgagtgagaaaagagtggttttctccaatgaagatcacactgttgaaatggttcttggttcagacagcagacgtacaattttttggacaatgccgtttgagccgtttgccaaggttttataccgtggtgccgttgataaagacggtgatctttgctggctgcatttcgtggacaaagtcaagctggaaaaaggacagtgggaagaacttctgcaggagtttccgttagcggacgaagagaggaaagcaatcagaacaatttgcggaaagccgcgagatggtgtcttttcaattgcccgcatgggaagcgcaaagatcacgatttcatataaacaggaaagcagcacgaaggcgatgcagcgcgcttttgatgccggaaagtctcttgaaaacgggacgaagtagatgcggcatctgaccatttgtgagttcggaagttttctgggagtgacatcagaacgcctggtcgtcagaaactccgacggcactcagtgggagactcccttgtcgcgcctgcggacaatccgtattgccaagaccgggatttccctgtcgtcggatctgattcaggcgtgtgcctgcagaggtatcagactgtttttcacggattggcgcaatgttggtgttgccgcagtttccggcttgaatcagcacagtgttgttgcattgcgtcaggcgcagtttgactgtgtgaggtctgacagggcaaagctgctttcagaagaaattatccggacgaaggtcagaaatcagcgcgcggtgatcctctatttcagtaagtacctttcgaaagccaatccggagtcagctgatgtgttgcgcactgcggctgaggcgcttcttgttcaaagcaatatgatcggccagccgaccaaaagagattggcgtgagactttgctgggtaccgagggcatgagcgccaatatctactggggggcgctggccgagtcgggactcttaccggaatcgtttcaggggcgctccggccggggcgccacagagattgtcaatgcagcgttgaattacggttactcaatccttatgagttacgtttgggccgctttggacaatgccgggcttgagctttacgccggtatctttcacaaaaaccgcatcggccgtgcttctttggtcacggacttaatggaagagtatcgagcttgggttgtagaccgtaacatcatcaagctacgctcacttttgagccgcaagagccatcttgatacggaagtaaagaaggcaatatcgtcagccatagacgaaacgatgaccggccttattgcctggcgtggaaaaaagattcggttggaaaatgtgctgcagcgccaggtatatcgatttgcgggggcgattatggaagagaagcggtatacggggttgcgttttaagtggtgagatgatgtctcagtacacacggtatcttgtttgttacgacatccaggacagtaaggtgcggcgtcggttcttttccttcctgaaggatcttgggctggtgccgttgcaggagtcagtgttttacggtgacctgaagccggcagaagccagatcacttggcataagggccgcagaaatgctcgattccagtaccgataaatgcttttggtttccctgcagtttggatgtcgaccgaatgcggacttgtgtgggttataaacattttgtgtatgaggatcctgatggatacggattcctttagtgtgcctgtgtcgctgctgaggcagtatgcattttgtccaaggatcccgtttttttatctgatacggaacctgcacccaccttttcggccatgggtaaagcaggggttggggtttcatgagaaaacccaaatgctggccaagcgcagaaatttgagtcgctttggactgacaggagaatttaccctcgaagcagatgttgctttaacgagtgagacgctgcacttgcatggaatttgcgatgcagttcttacgctggcatccggccagatggttccgttggaattcaaaatgaaggaaaactgcaatctgttctatggatcagacttgcaattgacggcttatgccatgctcttggaagagctgagaggtcaacccgtaccttttggctttcttcttttcggaagtaagggcaagactttgcgaatcgaattttctgaagagatcagagagaaggtgagagttattactcagaaaattttgacggactgtgaggaggctttaatgccgtctactgctgcatctgataagcagtgcagtcaatgtgagtatttgaatttttgcaatgacaggttgtgatggaatttttgtgtgaagagtgcatcaaaagttggtttttggttttcgttaaactataaaagttaaacaagtgacacctgaaaatgattgaatttagaataaaaaacattaaaagtcaggcggtgttttttgcaaaagcattgagctttattcgggcaaatgagcatcgtgttgatctgggtggggctaatatttaaaaatttttccctcaaagttttctttgcgggtagcgggagtttcagtagctgagtttattactgtaagatttcaacgttgccacgctgcgaaggcgggcgagtagtcgcggtttcagtagctgagtttattactgtgagatttcaacttcggtccatcgcggcgcgttgatctcgcggattcatggtttcagtagctgagtttattactgtaagatttcaactcaagagcgcgttgccgcgaggtgagacaattaaacagcgaggggcaacatgggaaacatcaatgaaaagcgtgtcgcttaaaggctcaatagattggcggatgcagaagtccttcgcaatgttctttttgttgtgttgttgacaggaaccgctgtagtgtcaagcctgtaaccaagaacttcaagagcttcggcgattgtctcaaacttggtcggagctcggggagagaggattcttgaggcttcctgacgagtgatgtgcattgaggttgccaaatccacaggccgccaattcttctcaaccatcgcgttaatcaattggaccttgagagtttggagatgagaaaaggtcacgacttcctctttcccttttccagaaaggggagccggttctgggaatttttcgtggaattgaatgcaatctcctaggattagcaagagcaaatcttgcatttcctcttttgctttttgcaacgtgttcccttcggcgacagccgacggagaagaacacgacaacacgtagcgcccggtttccgagtcaatttcgcattcacatgggaacaagtagcgcatagcaaaacctttttcgatctgtcgaggcatgaattgagggacgggcgggagaccaccccgccctagctacttaagagtcagagatccctagagccttgagcgtctttttgacagtcaagtttgaatactcttgagttggatgacgcttgagagtggtcattttccctgcgtggtgaagtcttagatgacgcgtaccatccgcgatcttcacgcctttgctcttaagaagcttgatgagttggccatatttcatcgagctctcctttagtagctgactcggagtgtaaagcaatttgtctgcgttgtcaacaaaaaatattacacgcgtaatgattttggaggtgtcatgttgtacttgaagtgggcggcctttttgttgccgtcttttttaatggaaatcgtgggcaaggtcggtgcgccgattcttgccttttttgtgtgttcagacgggtggttgccgcattggctgtggtggtttcagacccccgacaacagttgcgacggggacgaaggccaccgtgcccgatggccgtgagacgggtggttttggacgtgggcgagacggacggcgtggttgttccgcaacacggcgtatggattccgtttcagtagctgagtttattactgtaagatttcaacaggagctaagagtttcgttctgcgcctgtgcgtttcgtttcagtagctgagtttattactgtaagatttcaactgcgcgtcaatgagacgatgcgaaacgacacaatgtttcagtagctgagtttattactgtaagatttcaacgcggtgaaaaacctcgccagtctcagggtcaataagtttcagtagctgagtttattactgtaagatttcaaccgagatagatcgcgtcggcgctgtcgtatgccatgtttcagtagctgagtttattactgtaagatttcaacaattatttcactagtgaaaacactaaggatcatggtttcagtagctgagtttattactgtaagatttcaactcgcattttggacttactggccgccattgctcttggtttcagtagctgagtttattactgtaagatttcaacaacattgctcggaagtaaaaacttgtcgatgagattgtttcagtagctgagtttattactgtaagatttcaacttgcagaggggcttaaggcgcttctggccaaggagtttcagtagctgagtttattactgtaagatttcaactaagaatgctcttggccaatttggtcagatgcttgggtttcagtagctgagtttattactgtaagatttcaacgatgacgtaattgcgcataaaggtcgcgtgctttctaagtttcagtagctgagtttattactgtaagatttcaacaagatttggggcgagcccataccgggctatgtttagtttcagtagctgagtttattactgtaagatttcaactcatttgtggtaacctcttttgtccttaagtgttcgctgtttcagtagctgagtttattactgtaagatttcaacagcctcagatttcattgtgaaatcaatgatgttgttgcctgggaagtagacctgctttcgaaactaacggagttgcagaaattcatggaatttttgcgaaagttcatataaaatccaactcgaaatcttacagtcatagactcagcgggaagacgtctctggacgtgctgaaatcccctaaagtcaagattgaatccgtcctctggtaacacatacggaataaaaaaacatcgataggcttgaaacctaccgatgttttttcttttgctgaagtcggaacgttacgctcgtcgcagtgttccgatatccgcaatcagttcttcaagcacttccggctttgtcgaccacgctgtacagaagcgcacgataagacgtccatcaccggttttgccgcaaagctcgtagcgatacttcttcgaaagcacgtcagcctgtgctttcgtgattcgcacaaactgctgattcgtgggggagctgccttccatctcgcacccggcctcaataaacgctttgcgaagccgcatggcgccctcaaccgcttgctttccaatctcaaaataaaggccgtccttcatcaaggcggcaaactgcactccgcccaaacggcccttcgcaagcagcgctccgcgctgacgcatcagcgcaggaaagtcgcgctttaacgcagggttcttgatcacgagcgcttcacacgcaagcgtcccgcacttggtaccgccgagataaaacgcgtcagccagtcgcgcaatgtcttttaacgtcacatcaggactggctgccaggccgtacgcgagacgtgcgccgtcaatgtaaaagaagagcccgtactcgcggcagaccgctgcgagttcttcgagttcagcgaggctgtaaatcgtgccggtttccgtcggaaaagagatgtagaggagtcccggctgcactaagagcaccttctcttcgttttcgaagtaatccgcgcacaggcgccgcagtgcttcagctgtcaccttgccgtcaacttcagggacggtcatcaccttgtggccggtcgattcgatggcgccagtttcgtgcgcttcgatgtggccgcttgaagcagataccactccctggtgggggcgcagcgccgcggcaatgagcgtgaggttggtctgcgtgccgcctgaaagaaaatgcacgtccgcatcaatgccgccgcacgcggcgcggatcatgtctgaagcttctttgcagaataagtcctcaccgtacccagggacttcttcgagatttgtttcgcacagcgcttttaaaacagcggggtggcaaccggcaatgtagtcgcactgaaactgatgcatgcagaagtcctctcaaagaaaatgtgcaattttctgattatgacgcaggaaggactgtgtctccaaatatttagcgacggtaaatgacgctctcagtattggaacgcacgggtgctgcttccctttgacggaaaacaagagaattccttgatgcctgggttaatacaggataaattcgaattgtcacaggcctttcagaggagaatccgccatggcaatacgaccgattgttttagcagcaactctcgctgttgcagcgttagggacaacaacagtcacggctcaggtctacaaggaaacagtttccggacataacggacccatgaccgtagaggtgacgatcgaaaagggcgcagtgaagaccgtcaaggtgctgaagcattccgagacggtcggtatcggatcggttgctgtggaaaagatcccggccgcaattgtcaaaagcaataaggcagatgtggcggctgtcaccggggcatcggtgacatcaaaggcgattgaacaggctgtggaagtcgcgcttgccaaggcgacaggtaagtctctgaaagcgaaatttaagcccggtacttacaagagtcaggcttacggcaacaatggttaccttaatgttgaggtcacggtaacaaaagacaagattaagtccatcaaggttccggccaatcaggaaacaccgttcatgggcggtatggccatcaagtccatctcagacgatatcgtcaggtatcagacactgaatgttgatgccgtctccggagcaaccgtcacaagcgcagcctttaagcaggcagtaggcgcggctctcacacaaagcggcgtgaatctggcggctctgcaaaaaccggtgcctcagaagatcaagaagttcaaaggaacccgttccgaaagttatgaccttgtgattgtgggtgcgggcggcgcgggtttgtcggccgccgtgacggccggacaggcaggaaagtaccgcgtcatcgtgcttgaaaagatgccggttatcgggggaaacacgctgcgctgcgccagtgctttcaatacagccgatcccgaacggcaaaagctcctgccgatgaccgacacgctgaaagatgctgttgttaaggccatcagcgaaaagcccgtaagtgaagagcatcgtaagctcatggctgatgtgaaggcaaagtacgaggcttatctggcttcgggctcaaagacactctttgactgcccggaatggcatgctctgcagacctataacggcggcgacaaagtgggccatattccgcttatccggacctatgccgccaacacgcttgatacgctgcactggatgcaaaagctcggtactcccgtgcttgaccgcgtgagtcagggtgcaggtgctctctggcagagaacgcatcaggtggatgctcctgcgggtaccggtcttgtagagccgctttataaggcagcggtcaaggaaggcaccaagatcgtgacgggcatgaaagcagagtccctgatcgtgaaaaacggccgtgtggtcggtgtccgggcaagtgacaaagtcggcaacaactatgcctttaacgcaaagtacggtgtgattcttgcaaccggcggctacagtcagaataaagtgcttcggcatcgctcggctccgcagcttaccgttgatatggtttcaacaaatcagccgggagccaccggtgacggcattgtgatggccaccaagatcggtgcctacaccacgggtatgaactacgtgcaggtttatccgcttgcaacgccgggtaccggtgctctgcagggacgtgcccgcaagatgtcggggcttgacgatgtgattgacgtcaacaagaacggcgaacggtttgtgaaggaagatgcccgtcgtgacgaattcgtggccgctattaaaaagcagcccggcgcagtctgctacgacatcaatgatgcgtcgatcgtgaaggaattcaattcctttaacgaaaatgtggaaaccttggtcaagctcgggcgtatctacaagtccgatacgcttgcggggcttgcaaagcagcttggaatgccggcggaaaacctggaaaagaccgtagccgagtacaacaagatggttgaagcaaagagcgacacgaagttcgggcgcaagcttttcgaccagaagattgagaaagccccgttctatgcaacgcccagagctccttcgattcaccacacgatgggcggcctggagatcaataccaaggcgcaggttgttgatgtgctcggcaatcccatcccggggctctatgctgccggtgaagtcacaggcggtatccatggttccaaccgcttgggcggcaacgccacggctgacgtgctgacgttcggacgtattgcggcgaagtctgcgctcggaatcaagtaaaagagcagagtagccggcagaggaggcttccgcaacgatcgcgggttctccgctaccgtgcccgatgatcagagggggtgttgataaagtcgtcagttgacgatgagacaacaccccttgttttatctagaaagtctcgaccgacgtatcgctaaacgagcgaagttttggggtacgtct

SEQ ID NO: 145 - DNA, 24269 bp, synthetic construct
  source 1..24269: mol_type = other DNA
  misc_feature 1..24269: note = Synthetic
gctggatgcggtgaactttgtctttatgctgatgcgggatgcctttccacagcagtttattaatgcctttcctacccaggatacccgggatcgggcacgcagcctttgggccaaaggtttggctgatctgcatccgcagcagatcaagaaagccgccatccgggctatcaaagagagcaagttcctgcccagcctgagtgagctgcgccgactctcttctacccatcgttacgaagatcttggtcttaaagacccgctgcaggcctattatgaagcctgcggtgccacgaaccgcacccgcgaaggtttctggagccatattgctgtctatcttgcagcgcgggaaaccggctggcagttattggaaggtgagccgcaaactgtggtttacccgatcttcgagcgaaactacgagattctctgcaaccgcctgatggcgggtgaaaacctggatgatggcattcataaggggctggaaaaccatgcccgccgtgatgcccagcgtcaggccgatatggcagcagagcaaaagttacgtcatgacatggtcgagcatggaatcaatccggacggtggtcgggctgaatttctgaagaccctgtcagacctgtagtgttttaaacgccttatgaacaatgtctgatcaggatgtaattacgacgatggctatttgttcccgagacagtgttgtcgctgcgctgcgtgaactccaggatccctggctggaagactcactgctgaaggtagcggagattgagtctctgaatattaccgatgatggcctgtggctgacactggctctccagtacgcctgcgatggtggtcaggagcagctggtgcgtctggttcaggacaagctgaaaacgctgaccggaccggcaccggttgctgtgacctttacaactcaggtggctccggcaccgcggcaaagtgatgagccgggcctgaaagcggtcaagaatattgtcgctgtggcttccggtaagggcggtgtaggtaagtccactactgcagtgaacctggccctggcactgtcggccgagggtgctcgcgttggtatcctggatgcggatatctatggcccaagcattggcaagatgctgggtgtggaagatggcgaacgtccgggtgtggacgaagtcggcggtcagcagtatttcaagccggttgaagcgctgggtcttcaggccaacagtatggcgttcctggtgacggaacagaccccggtcgtatggcgtggccctatggccagtggtgctctgctgcagatgctgaaccagaccctgtggggtgaactggattacctggtggtggatatgcctccgggtaccggtgatattcagctgactctggctcagaaagtaccagtcgctggcagtgtgattgtgactacgccgcaggatctggcattgttggatgcccgcaagggtatcgaaatgttcaataaggttaatgtgccggttctgggtgtggttgagaacatggctgtgcacgtgtgcagcaactgtggccactccgagcatctgttcggtgaaggcggcggcagtcgtatggcggatgaatacaagacaccgttgctgggtgctctgcctctttctatgtctatccgtcagcatgccgatgccggcctgccaacggtagcagcctttaagggggattctgcgaaagactctgcagaaacccagttgtatctggatatggcccgtcgtaccgctgctcagctggctgcccggaaccgggactcagctccggccccgaccataacaatatctgacgactgacaatcaccagggctgaccggggttgctcagatttccctgccccggtctgactctggggcgagggatactatgcgactgagtgatcgcgatattaaagcggctctggatagcggcaaaatcgtggtagacccacggcccggcaatgatcatatctccggtgtcagtctggatctgaccctgggtaacagcttccgggtttttaatgaccatgtggctccttatgtggatctttccggcaaccgggaagcgattgaaggcaccctgaactcgattatgagtaccgagattattctcgataagggcgatgcttttttccttcaccccggtgagctggcgctggctgttacccaggagtccattactctgccggatgatctggtgggctggctggacgggcgttcttccctggcgcgtttggggttgatggtgcacgtaacggcacaccggattgacccgggctggagtgggcagattgttctggagttcttcaatggcggcaaattgcctctcgctctgcggccgggaatgcagattggtgccattaactttgaaaccctgagcagcccttgtgagaagccctacaacaaacgtgataacgccaaatacaaaggccagaagagtgccgtagccagccgaattggtgaagactccacggcctgataccggctatcggtttggcagcacattccaacaggctttattgatgcgtatcaataaagcctgttttgcgttgggcatactggttaatacgtaactggttgttacgttatccgggacaacgcaaataattttatggctcccggtgagtgctttcctgaggagtttataatcatgcaaacagttactcctgatgcctctcttgttcctgcctcatcaggtcttgcccatcacccccataaccctgtctggcacaatctgaccgccggagatgttatgacccgtaaggtctataccgtgccgttggactggagtgtggagcagctgtcatcttttctgactgatcacgatatttccggcgcgcctgtcgttgatgagtccggcctgctatgtggcgtggtcagcgcgactgatattgttcatcacaccgctaacggtattctcgataccaaccagcgtgccttatacagccgtgagctgggtattggtctgcaggatagcccactgtctgctgacgagatgagtatgttccatgaagatattgatcaaacggccatggttgcagatattatgacgccggtagcattcagcgtggatgccagtatgcctctaagcaagattgccgatgccatggtgcgggctcatattcatcgtgttctggtgacagaagataaaagattgatcggcattatctcggtgctggatatgctgagcatttccatggaacaaccgttgagctgacagtttatctttgcttgggcacctgtagtgacgaagagtgagactgaactcccggatgggcgggaggaggtatcagcgaagactgtactggagcaggcctgtgctttctgttctcccccggagatgttctgggggatggtgtgggtgttttggtcagtgcaaactgactgaccgtgtcagctaggccattgctttcctctgaatccgtctgaagcctggcttttattgcactggcaagatcatgttgtctatcaaagcgatgcttctgggatcctctttccacgcgggctttacgcatcatctcggcatttttggtcagcgcgcgactgcgcttttgggtgagttcgacattattcacctctgcgaacagtttctcttgcactgatttttctatatcccaataaacttcctgagcttgtgatgccgaggctcctgcctctgcattttgagtggcatagatgtattccagccccagaaaggtcagtttggtcttaaacagttcatgagcgtcggcggtgatgtgtccggtgccttcaccaactgttaccgtatcaagcaactctgcggtaggttcgcttaaaaacagcagggatatttgtgagactggcgtatcggaggtaagccagtcattgatcagacctatggcatgtaggtgcttggaccagtctcccgagaactcggtcagcctgtggtaagcggttttggttttatcgtcagtcatggccagtgtggctgctgatcctgcaagatggctgagtctgagcttatcaaaggtcagtgattgatcgctggttgttgtggtcaggtgcggcaaagattcactgacctgcatgtactgacggtattttctatccgcagtcgcataatccttgccatgctcaacatacagcttatggtcgggggcagaggtggatgatcccgaaaacccaccagatgagcgtaccatttgaacggttagatctggagagctgaaccagtctggcttaagactgggatctttgcctggatggtaaagcgtaatgcgttccagttttaggttgacgctttcctcgggagtaagggatacagcaggctctgcctgaaccggcagggtatttgctcctgcctgcgatagtggagttgtatcagaatggatagtccccacgggttgtaagttgaacctgttacctttgctgtttttaagttccatgaccagtgtcgccagctgagcagcaagattttccgtatcgactcccccatgaacgacggttgcaggctgttgtgtgccggacggtcttacatattgctgcaggaggctggtggcggtgctgtttgctgtactttggctctgggtgaccttgtaacgctggaaggttgtcagttgtgactgagcccaaaggggaaagaaaaataatggggtgaataggtaaggtaggaatcgccagccgctaaatatactcatctgctttatctgtacgtttgtttcagtgcgccctcatatatagaccaactctcaaggataagaatttctacgcacatgtctgatttcgtcaaagaagtgtcaaatggtgtctttgtgcgggcaattgtaggaatttgaggcagtctggcatgaaaaactgtccgcagagggctttgtcggtataattcggagatatcaggacgatattattgttcgagaaaacggtctgtggagaggttaagtatgctgaacaatttacgtggctggctgggagcgggatgctttatgctggttgccgctggcgcctcagtacaggccagtgaagatgttgtgtcttacgacgatccttgggaaaaggtgaatcgtgccacttttgcttttaacgatacgctggatacctgggtgctgaagcctgtggccaaaggctacgataccgtcactcccaagccggttcaggggctggtaaccaatttcttccagaacctcggtgagattcgtaatgttgccaactctctgctgcagtttgagctgaaagaggccggtgtctcgaccggtcgctttctggtgaacagcactgtcggtatgctgggcatggtggatgtgggtaccgctgtgggcatggatcacaagtacaacgactttggcatgactctggcccgctggcatgtgccgtccggtccttacgtggtgttgccggtgcttggccctcgtaccgtgcgttcaacggctggtctgctgccggattctgccgcggaccctgtgacttatgtaacgccaagtcatgataaaacctggttgcaggtgactgataccgtgaacttccgggctgatttgctggataaggaaggactggttgtcggtgacaaatacacctttattcgtgatgcctatctgcagcgtcgcgctttcctgattaccggcgaagcgccgcgggatgatttctaaaattctcacaggaaagatcagaagggcacttggttgcccttctttcgtttctggccttcacttgctgccggttgcaggcagccttttgggggagtaaggtctgtgaaagttaacggaacagcagatttatgagcaaagccaacagtcagttgctggtgattgatgatgacgcgatagttcgtgacagcattgtggcctatttgcaggacagtggctttgaggtgctggaagctgaaaatggtgagcatggcctggaagtcttccagcagcacacgccggatctgattctctgcgatctgcgtatgccccgtctggatggactgggcgtgctgcgccgggttcgtgaagagtctccggatactccctttattgtggtgtccggtgccggggtgatggccgatgtggttgaagccctgcgtcttggtgccagtgattacatcattaagccgattgttgatctggaagtgcttgagcatgcggtcaaccgggcgctggataatgctgagctggtgcgtcagaaccagatctaccgtgaaagcctggaagatgccatcgcctcattgcgggaaagtctggatgttctccgggaagaccagaaggctggtcgtcaggttcagctgaagatgctccctccgcagccctttcttatgggcaactatttcatcgattacaagatctggccatcactctacctgagtggtgattttgttgattacttcgccattaatgaacacagctttggtttctatctggcggatgtttccgggcatggtgcctcttctgcctttgttacggttctgctgaagcatatgtcgctgtcgctgctgcaggagtttcaggcgggtgacatggatcggctggcccggccttccgtggtgctgtcagccattaataaaaatttactggccagcgaattgggtaagcatgtcaccgtctttggcggggtcgtggatacccgcaccaatcagctgacctattccgttggcgggcactttccccagcccatactgtctatgggagggcaatcccggtatcttgaagaccgggggttgccggtagggctgttccccgatgtggactacaccgacataaccattgacttgtccggtccgtttacattaactatcttctcagatggcattcttgaggtgttgcctcaggaaactctgaaagaaaaagaacagtacctgttatcagtcattaacgagcaagctgactcagcagatgcggttatgtccgggttgaacgtcaactctttgcgggaagcaccggacgatattgccttgctggtgttgggcggaaacgctggatgagttcaggaaaaattcagtacgccgaagcaaacggcgcatttattctcaaatttatcggtgatgtcaggctgacgctatgttcagctctcgacaaaaagctggaagccatactgggtcatgatggcatagagtcggtgattatcgacctgagtgacgcccagtgtatcgacagtacatcgcttgggctgttggctcgcctgtcgctgcagtcccgcagccttcttggttttgtgcctacgatcttgtccaccaatgaagatattaaccgggtgttgattaccatgggtttcgatcaggtttttgtgattgtcacagaagcggaagaggggcgtgatccggttgttctccatgaccttccctgctgtgaagaaagtaccgatcaggatgtgatggacaaggtgctttgtgcccataaaaccctgatggatatgaacgatcgtaaccgcctggagtttgaagatctggtgcagcagctggaaaagggccgtaaggccagctgaaccaaaaacaaacctacaaaaaaatgccgcacaatttatttcaaattgcgcggcattttttatggattgctcttcaagttaaagagctatcaggctttcgccagtgccgccagagtctgctccagagccacctgatctgcggcgaagttacggataccttctgccagcttctcggtactcatggcatcctggttcatatcccagcggaatgctgtttctgccagagagtgaccatcaacaaccggctgtgggttactggcatccagtttctggatcaccggatcattgctctgttccagttcttccagcagggccgggctgatggtcagacggtcacagccggccaattcgagaatctcaccggtattgcggaagctggcacccataacaacggtgttgtagttacgggacttgtagtagttaaagatctgggtcacggattcaacacctggatcttcatgcggtgcatagtcacgcccggtgctcttcttgtaccagtccagaatacggccaacaaacggggagatcaggtagacaccggcgtcggcacaggcagaagcctgggcaaagccgaacagcagggtcaggttggtctgaatgccctggcgttccagcttttcagctgccttgatgccttcccaggtggaggcgatcttgatcagaacccggtccttgctgatgccggattgttcataaagatcaatcaggcgcagagccttatcaaaggtgccacgggagctgaacgacaggcgggcatccacttctgtggatacacgacccgggatcagctgaagaatttcccggccaatcaggacggcaaatttatcagtggcgttgtggagcatgtcggtgttgccacggccgtgcacctttccataggtgattgcttcctgcaacaggtggctataggtcggcagcgaggctgccttgagcaacagtgttgggttggtggtcgcatcttccggctgatagcggcgaatcgcctcgatatctccggtgtcggcaacaactgttgtgtatttcttgagctgttcgagctggttactcatgtatcaatcctgaatcggcctactcgaccacgcaaaaagcactggcttcgcgaagaagctctgccatggcctcgggtttgtaggcgttttcgctcaaaagtcgacgaaagcgccgggctcccggcataccgttaaacagccccagcatatggcgggaaacatggctcaaagtgtgcttgtcgtggtcagcaatatgctgttgcacatagggtatcatcttttcaatcacatcgtggcgcgtttgtgaattggccgaaccgccaaatatgcgctgatcagcatccgcgaggatccatggattgttataggcctcccgaccaatcatgacaccgtccacgtgttgcaggtgctgttcggtttcatccagcgtcatcacgccaccgttcaggatgatttccagttccgggaaggtctgcttcagtttatagacccaatcatatttcagtggcggaatttcccggttttccttggggctcagaccttccagaatagcgatgcgggcatggacgacaaaggttttgcagccgatatcggcaatctggccaacaaagtcaaccagctcctgccagctctcatggccgttaactccgatacgatgcttgatagtagccgggatagagacggcatcctgcatggctttcatgcagtctgcgaccagagccggttctttcatcagacaggcaccaatccgaccattctgaacccggtcactcgggcagccgacattgaggttgacctcatcgtagccccattcttccgccattttgctgcactgggccagctcagcaggatcactgccacccagttgcagcgccagcggatgttcctccgggttgtactgcaggaaacgctcccggtcaccatggataagggcaccggtggtcaccatctcactgtaaagcagcgtgctgtgtgaaatctgacgcaggaagtagcggcagtgacggtcagtccagtccatcatcggggccacggaaaggcgacgactcagaggggcgggctgtagttggccggagttctgcatggggtgttcgtatgggtagctagtcaacaaaggcggatgacggtacgtgatccgctgtcaccgtgcaagagggatgtctctgctcataactttcggcagaccagagcttacttcaattaacgatctatttatccaccaatgccaatctatctgaaaattgttgagtatttgcaggtgtcagtatgtccaatctagagggcaccagatactcctgtaaagctgcttcgcttatcgcgacttttgattatttcgctgcatgtagattaattggcacagggttgccttaagacgttcaatttatacaacaaagcctgagactgttaatgattgcgttcatctcattcgagtggcgattgaaagtatgtaatataggaaaagttccacataggcagactttatagttcaaaagcgtgatagcggtatgcttttctccagaaaagactatctatcaggtttgtgtatggggggatctatggttacaaaactaatttgccctacgtaataacgataataatttggaatcccttacgattccttgaggtatgagcaatgagatacatttccccaatatcgattgattttggtgccaaatacactggcatccataacatgcactatctcgaaggtgaggatcccagggggagtgtacaaaacacgggctgtgtgctggtaatggatgatgataaccttcagttatctcaagttggccgcacccaaaaaaggcatcagtcccgcaattacaagcgccaagatctagcccgtcgcctacttatagttatcttgaaagactgctttgatcaggatgtctggcaatggccggtaaagaatcgcgaatttttatttgggctgattaaccgccggggttttaacagatttgatgatgatagtcttattgaaattgagttctgtgatctatctgtctttgagagcgtgctaccggatatcgctggctatgagggccttgaggaatggttgcaggctctggctgaaaatgctgcagaatgccgcttggctttacaaagacttggaagaactcgagagtttttgaaaacgcttcctgagatatggaaagaagaaaaaaaatctatcgaagccacccataaacatattattcatttccttgaaaccagcattaacgccagtgaggaaggacatcttcatcgtcgtaaatacctgcgcaatatcgcagccgatattatccttgagcaacatggacgtttggcgagtttattccaaacaaactctggcattacccccgatcaattcgccaaccttgttggccatatcagcaatctgcaactgcgtgtactcaggcgctacttcaatgatcaaaacgctaaaccgcaaaacggacagactgacgcctggcgtgaagatcatttcagcaagcagttctggcgttggatcaaatcctggcactgtgatgaacagacaaaaagccgctggcatgagctgatcaaattcaagaaaaagggcggaagcgtattcaagctgatgctaacggttcagcctgagttaaccattcccccttatgaagatcagaacaaccggcgaccaccgaaagataaaaccctgtttttaaaccctgttgccttgaataaggcttacccgctctggcgagaaattgtaaagcgccttgtcgcagcccatcccgagctggatagcgaccatgcttctaccattgctcacatggacgcagccttggatcaggattgcattcttcttcaacggatgctggatcgcacatcaggtcttgatctatacaaaatcagagctttggcaatgggaaggcccgatagaggcaaccagctgaaggttgccagtgagaatctgcgtctgcgactcaaccagcatgctgaaccgtttatacagagcattgcccgtccttattacctgcagattaatgaagcacggcagggtttatgggtagaagaagattccttacttctctgcctgaacaggacaccccagcgcaaagctcgacagctgcccaccttgcttggtcgaatagtcggtgaccttggcagtcatgggcaggagcatatccagtcgctcaagcaacagtggtcccaacgaggcgttatcaaaggggctcgcacaccaaaaggctggtgtaaatttgctgctgaggcacaaaaagactttggcaacgggctgaaagagacaattcgttcttaccgacaactacaggccagaatcaaagctggggatacggaagaaaagcttctaccagaggccaaaaaactgcttgcccttgaagctgctctgccagacgtagctcgttttatcgctcaagggctggggcttgctgcagaaaatagcgcacgcttcgccaatcccttctccctggcacaaatctataacctgctggagtccgacccttcaggctttagccatgtgtccaaaccctccgcccacgaaaacctctggcgtatgcagtatgagcagagcgttgatgggaaggactgcgcacgcgccagtgtcctgagcgcagacagcatccgtccatttgatggcatgctcagccgaattctggaaaaacaggcttattctattgccaaacgaaaactcaaacaaattgaaagccacgagatgacgagtgccaaagtaagggttccaatcctgattgaggagaaccgtttccagttcgctgaagacctgcaaacgatcaagaaaaacacccgtaaaaagaaggatgcccaaaagtcctgtgaaagtgatttcatacgctttgaagataaagagcaacgcatctgcaaggccagcaaggggatgtgtgcctataccggcgaagatctaggccggtatggggaattcgaccatattatccctcgttcctacacccagaaacgaaccggagcaatcttcaacagcgaagccaacctgatttttgttagcagtcgaggtaatcagcaaaagagagatcaactctacactctggcagagcttgatgatcgctatctcactagccagttcggcagcacaaacaggcagcagatcgcccaggctgtccaggatgctgtaacccccttcctgaccaaaggtgaactgatcggttttcataatctaggccttcaggaacagcgcatgatccgccacgctctgtttgttcccggactacgggaccaagtcttacaactgctggcaggtcagcgtaaggccaaagtgaatggcacccaggcatggttggccaagcggattatccatcatattcgacagggggccagcgcaacgattgaattcgatatcatcaaggttcctacagactctgtccgcttctgccgaggtgttctggcctcccgcttcccagccatggcgaagcaatcaccccaacccgtggccagccacgcgattgatgcagcactggtcagtggcagtttgttgatggagcccgcaattgctcgcagtctgtctttagcccccgtggataccaccacccaagccgaatggttgaaggggctgttgccagagacgattgatattcaaattttgcggaaaaaaccactctaccgtaaagatgccccggcaagctcaccactcttcaaagccggcctctatggtgaaagattcctgcctctgctggttatgaatgacgaattgcgggttggctttaccttgcccaacagtgccaaagtccttgatcacgccgacaatctctacgctttgctgcggcccgttctggtctgcaaggattctcacgagctgccctccacccttgcggagttacaggaaagtttggctttaggccaaaggcagattttaaatataaatcggcaaaaagcctttgcctacctgcatgagtttggtcagtcccccacacataatgacaactgtctcgcgattgaagccttactttattgtgtccagaaaaagaagattgatgcacatatctataataaggataaaaagaccttcaaaaaggatgaggatattctggccgacaagttctttatttttgaaacccataaaaataacagacctattttcccccgcactgttgcccgtattgagaaaaaggatcttactctacccttcaagcaagcgtgggtagaactttgtgatactgatgagttgaaaaattttctaggcaccaaacaaacgctgcctaataacttctggcgcaactttggcagctcgttatttccttccatccataacgaagaccaccaacacaagaagactagaaaggtctattcgttaccattaaaaatatcagagggcagctatagagttcggcgacatacacctgaaggagcttcggtctggcaaagaatgtcagtaggtgattttggggcggcgggcttcgcaaaaattgatggcaaaacccaatggaataaggttgttgaaatacctcactttgctaaaagcaaaaatctacatagccttaatcgttcactagaaaagaatcctcaaagcatcacatattttgatgagtggcgtagcttatgtgctttagcagatgctttgccgaatggggtcattaaggttgcatgtgcacctggaacagtaggtcgaccttacattcgatttgagatgttggaaagtcagtttatcaaaaagatcaatgcagcaagtggttcaaaatataagtctagctgggagttgcccatggaaattcctaatgtgcagttagctggttttgatatattttcatgcccattgttaccaaagcctcggactgaaacaaagaaaccaaacaaacacaaagcaaggtttctgcgtttaggaaaaacagttcttattgaatattttgcaagttcaaaggctaacaaagcattgcaacaagcctatgaacaaggcgaaccggaatgcatataactatttcggaatatggccaggcactgggtgtcaccagtgcccgcctcacagtgagcgaaaaaggccactgtatacaggaatatcctcttagccgaatcaaaaccatcagcgtggccaagggaggtgttagcatctccagcaatctgataacggcctgcgcattgaggggtatcaaactctttgttttggactggcgaccaagggggattgtctgtctgcaaggctcacaacaacatgccgttgtccggattcggcaaaagcagtttgagtatctggggcaaccagagaatcagctctccctctgcaagcagatgatcattgggaaaatcaaaaaccagcgaggcgtcctgaaatatttcggcaaatacagcgcccgtgatccggtagtgaaacagactatcgatgatggcgctctctcgctcgcaaggtataccgacgccgtaaaaaagctgggattggggcctcgtagcgactggcgtagccaacttatggggtatgaagggcagtccgcaaaaacctattggcagattttaagggagtgcagcttgctgcccgctagttttcctggacgactgggcaggagtgccccggatgttggcaacattatgctcaattatggctatgccattctgtcttcctatatctggcactgtgttatcaatgccgggctggagggattcgccgggggcctgcacactgagcggcccggcaaaccctctcttgtgctggatattatggaggagtaccggccctgggtggtggacagaaatgttatcaagcttcgagaccaggccagtgagaagcgcggcttcgacagtaaactcaaacgcaaactgggggcatccattcacgagactttccgcaaaaaatacccatacaagaataggaaagtttctctggaatcaattttacagcgccaggtttaccggttagccggtgaattttccgggcaaaaaacttataaaccttatctcttccggtggtgaattatggggacgcgggatgaaatgctcgcagcatacgatgtgaccaacaataagaaccgaaacaagctggtggatcagcttaaagatctggggctggtacccatacaaaagtcagtgatgtggggctatctcagtaaagcagaacaaagtgcagttatgcgtatttatgaggaactgttggagaaaacggaccgtgcatttctaatccgcgccaacctgaccaaacagctgaataagtttgcgggtactgttccgaccgatatcaaggagccacaagcctatgacatcctctaacagcctgccgatccgccacctgcggcagtttttgttctgcccacgcattccctggctgcaggaagtggcagccatgcaaccgctcagacctatctgggtgacacaggggcaaggttatcatgcccggcaggagtttttgtcgagaaggaggaagctatcccgctacagtacagaagatgccgaactactgtttgaccaacccgtaggatgcgaaaatccttcaatacatggacgaatagaccttgtactgaaaggaaaagatcgggtccagatagtggagtttaaactaggagaaggaaagccagtgcctggccagattcttcaggccgcagcctatgccattgcagcagagcagacctttgctctcccctgtccagaattctttgtagcaacgggtaaaaaggcaaaggttcatcattactacctgacggcagagagaagacaggaagtggcagacaaggtgactcagattcagcaaactcttgctgattctgtactcccagaaagctctgcgcaatcaaacacacagtgcagttcctgtgagtatctgaacacctgcaacgatagggactaattgtaaataaataccagcatggccattccagagggctccagatagtctggagagctggttcgcttatcgcgacttttggtgatttcagtgcataccaaacgaagtataaacattatgcagccttttccgaaaataaccaatgattttgtgcagactggctattttcggaaaactgccctccccactctggcaattctccattgcaaatcatgaggttagccgcagggaatcaaagcttacttcgtctgggtagcaactgaaagtgatcgattcccggggcttgcctgatggactggattgaatcaaagcttacttcgtctgggtagcaactgaaagagggtaaaacgctgccattggtgcccgtaccttcgaatcaaagcttacttcgtctgggtagcaactgaaagcttccggacggtaggcaaaacccagcgggccaccggaatcaaagcttacttcgtctgggtagcaactgaaagctcaacatgcttcgccctgttgcctgcgtgaatcagaatcaaagcttacttcgtctgggtagcaactgaaagtttgcatactgtcactaccaacaggattaagtttgaatcaaagcttacttcgtctgggtagcaactgaaagcgaaagtcttgttcaccataccgatcagcgtgtccaaggaatcaaagcttacttcgtctgggtagcaactgaaagcttctggctcatagcttctcggttggagtctcccaggaatcaaagcttacttcgtctgggtagcaactgaaagtcacctggttaatgcgtgtacgaaggcctttggccgaatcaaagcttacttcgtctgggtagcaactgaaagtcggtataccagccgaggaagtcgtcttcgttgccggaatcaaagcttacttcgtctgggtagcaactgaaagaactacccaggttatattcaggtcgaagccccggatgaatcaaagcttacttcgtctgggtagcaactgaaagacatccggcctataagaatcaaccaaagccttgagaatcaaagcttacttcgtctgggtagcaactgaaaggggtgatagccttgccaagaccccactgatttcgggaatcaaagcttacttcgtctgggtagcaactgaaagtttcccacaagcacgacacccagcttagagcagatttgcatagcgacatttctatttgtagcaactgaaagtttcccacaagcacgacacccagcccccgatctcggaatcaaagcttacttcgtctagataactcgtcagcgtcatcggaagacggtacgtgatccgctgtcaccgtgcaagtcggatatctcggctgataactttcgggaatatgccttttgcaggcgcaatcaaaaatcaccacctatattgtccccttattattctgcgtggatgtttgattcggctgtgtcgttctgtctggtgctgtcggttatggcagttgatgtggtttgccagcctgaatccttccctggtcttctatttctgtgagccatacccgccatgaagatccttagtagtttggttggaattctggtacttctgtttattgcctggttgttctctgagaatcgaagggcgatcaactggcgcacggtgggtggcgccttgctgattcagatggcgctggcaggctttgtactggcggtaccttttggccgggatgtgctcaacggcttatccggtgccgtgcagaacgtgatgaattacgccaacgacgggatcagctttctgtttggcaatctggcggacccatccaaggtgggctttatcttcggcattaaagtgttgccgatgattatcttcttctcagccctgatctcggtgctctaccacctgggcattatgcaggcggtgattcgctttattggtggtggcttgcagaagtttctggcaaccagtcgcaccgagtctatctctgcaacaggtaatatctttgtcggtcagactgaagcgccgcttctggtgcgaccttatattccaaccatgactcattctgaactgtttgccgtgatggtaggtggtctggcttcggtggctggttcggtactggccggttatgccagtcttggggttgatctggggtacctgattgcagccagctttatggcggcccctggtggcctgctgatggccaagattatcgttcccgaaaccgatacgccgcagaatgctattggtcctatggattccgctgagcatgccaatcttctggatgctgccgccacaggtgcttcttccggtcttaagctggcagtgaatgtcggcgccatgctgctggcgtttattgccctgatcgccttgttaaacggcattgttggctgggctggtggtctgtttggccagcaggagctcgatattcaggaaattctcgggtatctgttctcacctctggcctggctgctgggtattccctggagtgaagccaatattgccggcagcatgattggccagaagctgattgtgaatgagtttgtcgcgtttatagattttatcgacgtgaaaaacaccctgtcgcaacagactcaggctgttatcacctttgcgctgtgtggctttgccaacctgtcttccattgcgattctgttaggtggcttgggcgttatggcaccgaatcgtcgagccgatatcgctgggctcggcttgaaggctgtgttggccggtaccttatccaaccttatgagtggcgcgttggctggtctgtttatttaagaggttggttgcataaaactgggggcaggtatgtattggtatgatgtttttctggcaacagtgaccggcttttttattggcatactgtttagctggttaaagctgcctatacctgctccttctgctctggctggtgttatgggtatcgttgggttattccttggccgttacgcctatatggaaatcgctaccatgttgggaaggatgtaagttcaagaaggggaactgcggctgactttcagaaaagccattagcccctaaactaaaaacatcgtctgcctattaaacacagtggaagtgttatgactcaatcattgccggcacggtgtcttcctgttctttttcttctctctttaatcgggtcttttgccggggcgaatgatctggctcctcccggttactcctggcaagcctgtaaatccatcgaatgttattttctggtgccggatggctggcaactgaagcagcttgataatgccaaggtgctgaaatatcaactgatgccagaccagcacaatcgcaaggttccaccccagattcgcattaatattctgaccaatatggaagggcagactggtctttctgccgaacgccataccgagctgtttatgcaggagctaggccgtaacggcaaggtgctggatatctggaaccacaaatcgggagttttacgcagtactgcggccacatcactgcatgtggagcgggtaccggcggcactgcgtaaatttaatctgctgatccgcaatacccagaccggaactctctatgtgtttaccttcgagacccagtccgagtattgggataaggactggggggtggtcgaagctatttttacccgtctgcgcttggatgaaggggtttaaccgattcgggtaaagatcagtgatcctggtcggttggagagtggtaccagccgacgatcattgcgctgttggcgctccggcttattatccggatctctgggtttgatctggttaaaggccggcagctcttctccttcttcgagttgcataaacagtggcagaggcgcatttacctgccctggccagtccttacgaatctctgggttgttggccctaaggcgtttgatctcctctggccaggtcagattggctcgcaagtggggtactagtggccgcttgataaccacttcctgattctcaggcaggttctgcaaaatctgaatatcctcaaacaatccctgaccgggggtgtatttgctgcgcaggtggtcaatggcttttgttgccgtcagtcggacactgccatgggtggcattggcccagctaaagccaacccgttttggcggaatagggaatagctttaactgccggtagcactgcacaaaatgaatatgttgaatattcatgcggccgagaatagtttcccgtagctcccttgagctaaggtcggtcatctcaaaactgctaccaaactgttttcgataggcctggatggactctttgaacagcagtttgctggtgttgaggtcttcacccagcttcagtgttgaggcggagatgccaaccagaccggtcagcttttgggtttcctgcccgggctgatctggtgcataggtcagccgcaggcagatatccgcaacatgtcttcgcaaatctgcgttgcgggtatggccatcgccaccgccaccgtcatcgcagtgctcctccataagccagattggcagggattgatctgccagaagcgcttcccggaaatggtccttggcggaaatgagggcgataagctgatcgcgtatttgaatacgggccgcagtctgattatccattttatacaatcgtatctggtcgtgagttttgaccttacgccttttctcttcttgcggctagctcagaggctcaaggtaggaagtccatataaagagggcagtggtcggacaggtgacgctcacggtgcaggctggctggccaggtatattcaatcacctgaggggcagttttggatactgagctgagcaggatatggtcaatcaaccggccgggttttcttttagaggggcagtggctggtgatctgttccgttaacagttgcagattgtggtgtgattttgccgccgaggagagctgtttccagagggtatcctgcctggaaaggcgacggttaaagtcacccaggataacaacctggtcagtgtcttttgctgccgaactgagccagtttttcagtgccgggaactggcgcttcagtctcaggcagcctttcttgctgctgtccggtgagccctgccagcagccggaagccagatgaatagacaacaaatgcagacttccctgttttaacggcacttcaatatgaacaccccggcgcagcccttgatgacccagatccagattgagatcagggtggcgggtccaggctatagactttcgtatgagaaacccggcccgctggtcgttgtctctattttcaagaaccgtcgtatattggtcggggttgataattttccccaaaaaggtttcagaggaggcttcctgaatcgccaggatgtcgggctcgatctcatggataatcgcggccagcgcctgaaagtccttgtttgagcgtctttggggctgatcagggcgatagtcagggcgaaaccactccaggttccacgtaccgatgcgcagtgaatccggtttgtttgccgccttctggtgatctttgttcgcccagaccggcaggcagagggacagtaacagtaaccagatcagcagcttggctgactgccgctgtcttctgcagggaacttcttgatcgaacggcattctaatcctgtgagcgatttatggcttcagcctttccggttgacccgttacaagcttgtctctggactatagatcagacctgtgctggatgaagactggcagggataagggaagagtcagacgggtcggggagtcaggagtgctggaaggagctgtaacacatacaaggatcaagggagcgcagttatgactctgactattcgactaataaagacccggagggagaagcgtctgtctcagcaggcacttgccgatttgatcggggtctcaagaagtgctctggcgcagtgggaaaccgatatgagccgccccagcctggataatctccgtaagatggctgaagtgctggaagtctcttttgaatggctggcaacaggacgtggtaaccagtacatcaccaccaataatgatgaagtcagcgatgatgatctggatgatgaaatcaaccgcatgctgccccgcctcaacacccgccacaagaaagccctgctggacgttatcaaggttatgcactgatccgcagatcgctttggcacattgccgatatcaaaaagcagatacaaaaaaagagcatataaaatgctctttttttgtttttgttaacacgattaagcgttaacagcttccttcagcttggcaccggccttgaactgtggaacgcgagatgcagggatctcgatttcctgaccagtctgagggttacggcccttacgcgctgcacgctcagcaactgcgaaagtaccaaagccgatcagctgaacggattcaccgttcaccagtgcagtctgggttgcgctcaggaacgcattcacagcctgttcagctttgctctttggcagatcagcttgttcggcaactgcctcaatcagctctttcttgttcatgtcgagtcctgatgttactacacgaaaagttttgagggcgcgataatacacgaaagatagtggtgcgggtagcttccttaagggaaaaaaacagataaacagcggactgttaataagcttcggttatctatcactcggatagcagtccatggtcgcgggttaattcacgcagacgttgtttctccggcgtgtaatattgctgcgttgtggtgatcgcctcatggcctgcgaacagggccagatcttcgatatccatactgcgggccagatgggaaagcgtcgtatgccttagagagtgaaagcttttactgcgcaaccggctggccagttctgcgccatcttcatcggtctgttcggcacagtgctccataaattgggtaaaccacttacgcatctggcgcgagctcatcgcgcggaagctaccatcagatgcaaccggtcgcaggcagggcgccagtgggaaatcatcctgagcaaacggctccagtccgtgcagggagcgatagcggataatggtcttcaatacattgtcgttgactggaagctgtcgtagacgacggcctttaccgtgaatcaccagcaccagctggccggagctgtcacgctttatgtccttgcaggtgtgtccggtcatttccgactgtcgcagacccagcccataggcaatgccgagaatgtaggccagccgggctttctccagcttgtggcggggcttgtgatccgggtagtggctgatcgcctgggtgatcagctgccactcatcctcatagaagaagcgtgtttcgccatggcctcgtgcaaccttctctccacttttatcaaagccgtgtaccgggttgccggacaaataaccggtggcctgcagatagctgaaaaaactgttcagcacagtaatgatctggtcggtgctcttgccgggccggatggcgttggggaagaacaccttctcaggattgctctgatccatgccgggctgctgccagtgaggccaagggtggtgcaggaaattcacatacacttcgatatccgccactgtacaatcctgatagctcttcaggcgttcccggcgcaggaacagggtgaaacggaccagctcccgggtgtagcggcgcagggtttccgcagagcggcgtgaggcgcgacgtaaaaacagggcaagcgcatcccgatcgctggtgacccccagtttattggtgtgctggtggctcggagcgggtgaggactgcggcagggcagtgggagctggaagcgtgaaatcaggcagtgtcatagcgcgactataacactgccctttcaggggaagaatcttttctaaggtagaaaaggctccaatacctgatgcttatggttgaggaaaccggtcatcagttcattaaagcgagcatgctgatcagccacggtggcatggccggagttcttgacggtaatcatctccgccttgggaatggtgcggcacatggccatagcggaggcgaggctgaaactgtcatgctggccatggatgatcagggtttctgcccggatatcctcaagctgtggccagagatcggtgccagtcaggcagcccagaatatgcgccagtcgggtcgggttattctgctgccagtatttcagagcatggtgacgaacagccgcatgctttcggcccggcagcatatggcgcagcagggctctggccagaatgggcatggggataaaacccataatattacgcagaggcaagaggtaacgcatggaaggcaccagatcctgcaaagacggggc

SEQ ID NO: 146 - DNA, 15646 bp, synthetic construct
  misc_feature 1..15646: note = Synthetic
  source 1..15646: mol_type = other DNA
gaagttgcaaaagagttatcattacaattaggtgttcactttgagagatttgatatgagtgaatatatggaagctcatacaatttcaagacttattggtgcacctgctgggtatgttgggtttgagcaaggtggattattaacagaagctattagaaaacatcctcatactgtattgttactagatgaaattgaaaaagcacatcctgatttaatgtctgtactgcttcaagttatggataatgcagaattaactgataactcaggaaataaagcagattttcaaaatgtaatacttgtaatgacatcaaatttaggtgcaactgaagcaaatgttatgggatttgcaaaagatgataacctaaatgaaaataaagcaattgcaaaattctttgctcctgaatttagaaatagacttgatagtgttgtttcttttgaaagtttatctcttgatgttgtaacaaaagttgttgctaaatttatttctgatttagaagagcaattaagtgataaaaatatcaaaatcaatataagcactaaagctaaaaaagagcttgcaagtatcggttatgataaagctatgggagctagacctcttaatagagtaatttctgataaaattaaagatgtattaacagatgaaattttatttggaaaacttaaaaaaggtggagttgtaaatattgattttaaagacgaatttattttcaaatacgacgtttaaaatcacgatttatatacaattgtaaattaatataaataaactttaattactttcttaatgtaaaggaagtaaaattcaaaattatttaagaaaaggatcaaaagaaatgacaaagattttaataagttctgcagttgcagttttactattaacagggtgtggtgaagataaaaaagttacaacagaagtagcgaaagtagaagaacctgctaaaactgaaacagtaaaagcaatagaatctacaaaagctgttgtaaaagaagctagtgctgaagttaaagaaacagttacaaaagcggcaaatgaattaaaaactacagtaagcgaagctactacaaaagttgtaaataatactactgctgcagttactgctaaagctgttgaagttaaagatacagctaaagaagtagttgcaaacacagtagaaaaaacaaaagaagttgtatcaaatgctagtgaagctgctacaaataaagttgtaagtacagttgcagccgtaactgctacaaaagaaacaacaactgaaaaagcagaagctgttaaagctgaaacagttgcaaaagttgcagcagctgcaccttcaattaatgcaaaagcattatttggtgcatgtgcagcatgtcatggtcaaaatggtgaaaaagcagcattaggtaaatcacaaattattaaaggttgggataaagctaaagttatcgctgctttaaatggttataaagatggttcatatggtggagttatgaaaggtgttatgaaaggtcaagttgtgactaaatcagacgcagagattgatgcattagctggattcatttctaacttataaaataaaaagaacaagcattatttttattccaggataaagattcatttctttgtcctttaattataattagttataatattatttttaaataaggtaatattatgaataaattaactatttctattgatatgggtgcaaaaaataatggagtgtttattgtaaaaacacagaataaaaaagtactagataaaaaagctacttgtattatagtgaataaaggtagtataaacttttccaaaaaatcaagacgagaaaatcgtcataaagatagaaactacaaaagaagaaaactatcaaaaagacttatttcagaacttattgacctttcaaaatatgataataaacaaacagaacaaatttttggacttttaaataaccgtggttatacatttatttctacatcaacagagtttgaaaagttaaatgatattacaagtgaatttattaatatgtattttgaagatttaaaaggattaagttcaagagaagattttgaaaacaaaattagtgagtttgaagatttagaaaacttagaagactttattgaaaatataaatgaaaaggttgattttgaatgtaaaaagaaaaaagcagaattttataagaattatcaagattctttttcaaactttatcaaaaaagatttacaaaatataaaaaaactattttcttctattttaaatgaaatacaaataggttctaaacctagaaagaaatactttgatgaaataaaagatgaaattgaaaaggattttgattttatagaaaatttttcaaaagttgaattttttaatattatttcaaatatctcaaatctacaacttagagttttacgaaaatactttaataataaatatgatgatgttttagatactaaaaaacttgatataaaaataagagcttattttaaagcttttcattataaaagcgaaaaagaaagaactcaaagagtagaattatttgaagtattaaataaagaaaaagatattttaaatttcttaaaaaatacaaatcctatgcttactattccaccttatgaagatatgaataatcgtaatacttacaagtgtaattctatgcttataaaaccttctcttattacaaaagacttagaaaatacaattgatttacttctgaaaagtgattacttctctactcttttaattagtaatgatggagagtttaaaaaagaaagtttaatcaaaataaaaccagctacaaataatacatatattgatacagattttacatactcaaagtatcttcaaagaatcctagatactaaaatagatgatgataataaaatatatcatccaagagtagtatttaaaaacaaaaatccaaaagcaatagagttattcaaaaaactatttggtactaaaacttatgataatttacttgacattgcaacaagttattatgaagaagaaacaaaaatacacaatggaatatataaagaaaatacttcaatatttgaaaaatgtaatacaaatacatcatataaaaataatgtaaaagagttattattaaaaccattatattcacataattttacacatgatgaaacaaaagaatttatttcagaaattgaaaactatgaagaaaaaataaatagaactacacttttaggttttttgaaatttgttgaagaagagtataaaaagtaccaaaatagtttctatcatattattactcataattttgagttagaaaatataaaagatgtaaaagataaagatataaagaaactaatcttaggtctagattcttgtgtggattctttgaaaaatattttgaataaactaaatataaaaacatatttaaatgatataaaaaaagtagaaaaagaaaatctttcaaaagttctaaatattttaaagcaaacatataacatacttttttatgatttaagtggattttctaaaacttgtaaatcttgtacaaaagaaaatgctttaagaagtgatgaaaacttttctataggaaaacgacttttatctgatgtagcaaaaccaatagatggtatgcttgatatgatgatagatagattagcttatgagataacacaacaaataaataaaaaagatatagaaaactgtgaaagtttagaaatactgctagaacaaaatagatttgaatttgaagaaaatttaaatgaaattaaaagagcaaatgattcatcaataaaaagatataaaaatgatacaaaaaatatttgtccatatttagatactacttttgaaaaaggggagtatgaccatattttacctcaaagtaaagaagtctataactctaaagcaaatatgatttattgttctagtaaaggaaatagagaaaaatcaaataagatttataaactagaagatttaaatataaaacacttaaaagaaatttttggactagaagagttagaaaagattaaagagtttatttctaagtatataaaaactattaatgaaaaagattttaaaaactttgataatctaaaactaaatcaacaaaaagcttttagatatgcactatttatgcctactaattcagaagaatataaaaaggctttaaatttagtaaaaatagataaattaaaaactttttcaaatggtactcaaaaaagattagcacgatttatttatgaaaaattagtaaataaatacccaagagaatttaaaaataaacaaataaatatagatagtaaaacagttgatagtatgcttgtatctgcaactagaaaatcattatcttcttctaataaagagttggaaaaagaaaaataccaagaaagccactctcattgtattgatgcaatgattgtattttatttagcaaattcaaaaatagaaggtagagctgatagaaaaaaagataacttgactactttaattccaaggtataattttgaagatatttatttaaaagaatcaggtataaacaatctatcaaaaaatgtaacttttataaactctccaaaaaaagaagttggttcatacaaactttttgatgacactatttatgcagaaaactacaaacacataacaaaagaaagtcttaaaaaagatgagtttgagtgcttgatatatcatagtatactttttaaaaatcaaaagtcaaaaaaagtttttatcaataatatagaagaattaaaagatgaaagtatttataaaattgatgtacaaaaagtatcaaatcttatctatacattatttaatcaaagagataaatctacacttttaaagctaaaatttttagataaacttcaatactttacttcaagaaaagaaatagaaagtatattttttgatgaaaaaagaacaaaattaaaaaagtttaatgaaattaaaaatattccatattttagtgttaatctatataaagcagtttataaaaagctagaaaataaaagagatttatttattgttgaaaatgataaaagtgtattaaatagtaaagttttaaatgatttattaatagaaatgtttgaatcaaaacaaaaagatgaaaataaagaaaaaagaaaaagagctaagaaaagacataaatatactctaccaatattaggaagcccaaaatttaaaataaaaagagctaatacttggcaagtactaggaaataacgatattgcaactaaaaactatattataaatggtgatataaaacctatagcattttttggtaaaaatacttatcctgtaaaggtaaaagatttattagattgtttattagtgaatgaagatactaaaagtgtgtatcatgtacctataaatatatctgaaatatctaagtatgtttcaaaattagaatatttagttacggaagcaaaaagatgtacactacttgtaacttttaacaaaaatagttttaaagatataaactttaatgaaataaaagttttcgatggaacaaaagatgaaatatttaaacttttgattaacaattacatagataataaagatttaaatatatctaattatattggttctattagagatgggttaaaagctaaagctatgttaattgatagtaatagtacaacaataacattgcaatataaagcagctataaatgtaagtaaaaagaatatcattttagaaaatctaaaatgaaacatataatagtaaacaattttggtatgtttttaggattaaaatcccaaagactcaccatcaaaaaagacggatgtattgtaaatgaaatagcactaaatagaataaaaactattcaagttttatctcgtgggatttctctttcaagtgacttgataaattcttgttcacaaagaggtataaaaatattttttaatacctttaattcttttagtgctttacatacactgtatgaacacaaatcagtaatggtaagaaataatcaatttttatgttgtgatgaaaaaaaaggcttagaacttgctcgacaactaataataggaaaactcaaaaatcaaagagcaacacttttatatagtagtagaagtattacagatggaagaaaacaaaaagtaatagaaagctttgataaatctatctatcaacaaaaaaataaaaaagatttatcaaaagagtatattttaggtattgaaggtgttagtgctagttttttattttgagtacttaaaggctatggagttacttccttcaagttttgtatatagaactaaaagacattcagaagagatgactaacatcgcattaaattacggttatgcaatactcttcaattttatatacaagtcttgtataaatgcaggactagaaccatattatggagtacttcatagtgttagaagtgcaaaaccatctttgatacttgatattatggaagaataccgaagctttgtagttgatagaaatattataaaactaaaatcaaaactatcaaaagccaaagattttgacaaagtaaaaaaagatgttgcaagtgcaattttaaataccttatcaaaaaagtataaatacaatcatagaaaactaactttagaaagtataatacaaagacaaatttataaaatatcaggatatttttgtagtgaaaataaatacaaatcttatatttttaggtggtaatgatgtatagtcaaatattggtaagttatgatataagtgaaacaaaaaaacgaaataaattttttgatgaactaaaagacttagggcttaaatctattcaaaaatctgttttttggggatatgttcttcctagtgaaaaaagaataataaaagaattatttaaaaagtactgcgatattcaaactgacaaagcttttatcgtaaatgcaacactagataaagatttaaaagatagttttggttatgatgaagatgattttcctcatcctgaaaatttttagataatatgatacctattaatctaatcagacaatataagttttgtcctagaattgtatattataatttactcacaaatattaaacctttttatccaagacaagtaagcttaggtgtagaataccatgacttacaaaatgagctattaaattcaagaaaattcaaaaaatttcatattgattataaagagattataagtgataagtattttgaagatgaaaagttaggtatttgtggaaaagttgatttagcttttttaacttctaatgaaataatacccgtagagtttaaacatatagaaaagaaacctagttattctcatatattacaattagtaggatatggaatacttttaagtaaaaaatataataaagaatttaattgcgcttttattgtttattctaataatatgaaatttcataaaatagaaataacaaataaacatatagaagatttttataaagtaataaaaagcatacaaaagatactaaaaaatgatttattaccaaatagtgatgcaaacgaagcaaagtgtatacagtgtgagtatttaaatttttgtaatgatagattttaacgttaaaagtttttgggatgagtatgataaatcagtgactcatttcatttgtatttatcccacggtacttttaaaacctttaatgatttcaaccagaggttgtatctacttataatttgttagaagaaaagtatatcattttttccacaaatatacaacttttgacaagttttttataaatggaaaaatttataatttacaaactctataaaccccttaaataagggaataaaatttgctctaacaaattataactagacacaacttagtttgaaactaactcgcgctatagtctttagcatttccgttgtcctaacaaattataactagacacaacttagtttgaaacagtaatgcaaacgtgcaagtaagattaaacgaaaactaacaaattataactagacacaacttagtttgaaacccaatcttgctcggtcttataagggcataatttacctaacaaattataactagacacaacttagtttgaaacacagcaaaagcggtataaaaggagtatgagtatgccctaacaaattataactagacacaacttagtttgaaacagaattggtagttctaagatgggaaaagctttttttctaacaaattataactagacacaacttagtttgaaacttgacctatactcgcatctaaaatcttttcaattctaacaaattataactagacacaacttagtttgaaacaaattcatctaaagttaaagcccgtacagctcctttctaacaaattataactagacacaacttagtttgaaactttgggttctcatcttctatttgtgctgctgctaatagctaacaaattataactagacacaacttagtttgaaactaaaatagcagatattgtaaaacaagtagcttctagctaacaaattataactagacacaacttagtttgaaactccatatttgtaataatcccctcaccttccaataactaacaaattataactagacacaacttagtttgaaactgtgatactaatttgtcgtactctttattctttctaacaaattataactagacacaacttagtttgaaacgcatagaatcgcataaagccattattttggtagaaactaacaaattataactagacacaacttagtttgaaacatagcaatacaaacacttagtacaagtgcaatatctaacaaattataactagacacaacttagtttgaaactttgagttacggtacttgaactagcagtttttttactaacaaattataactagacacaacttagtttgaaacacaagctcagatttagaaaggttaaaaaatgagtactaacaaattataactagacacaacttagtttgaaactctaaagtcgcttgcaatgctgcgtgaccaataaaactaacaaattataactagacacaacttagtttgaaactagcccaattcttttgcttcatcatcacatgcagtctaacaaattataactagacacaacttagtttgaaacttaggttttatatctctatctttattctcaagtctttctaacaaattataactagacacaacttagtttgaaacattaaaagggaagttttgttcctataaagaaatagctaacaaattataactagacacaacttagtttgaaactacaatgatagaagtaatacaattgaagttacttctaacaaattataactagacacaacttagtttgaaacttgatgggtatagaaaattatgaggagtactacagcgactaacaaattataactagacacaacttagtttgaaactcaacatgctctataaacctatccgtaccacttgcactaacaaattataactagacacaacttagtttgaaacaaacatatgatgtatttaaatactaaaggcttatattttttagtatataacctttatagtaaaagctacctacaattcattatattataaacttttagatataatctttaaaaaataaggcttatatttggatgtctatcctttagataaaaactcatatatttttccaaatccaatttatgcagaagataaaggcttactagcttatggtggggatttaaatccatctagaattatgactgcatatttaaatggtatttttccttggtataacgaatctgacccaattttatggtggagtcccaatcctagatgtgtattaaattttgaagattttaaaatatctaaaagtcttcaaaaagttatagataaaaatatatttgaaataagatttgatactaattttactcaagttatgaaagaatgtaaaaatattaatagagaaaatcaaaagggaacttggatacaagacgagttaattgaagcttacactaaaatacatcaaatgggatttgctcactcttttgaagcttattataatggtgagttagttggtggtgggtatggaataaatgtaggaaatattttttgtggtgagtcaatgtttgctaaaaaaactgatgcttcaaaagttgctctttattttttgattcaaagattaaaagaaaaaggtttttcttttatagattgtcaaataccaactcctcatttattatcattgggtgcaagaacaatggatagaaaagagtttttattggaagtgaaaaaatcagctgagaacttaaaagagttctaaatttaaaaggaaaaatatggcaggaaataatgaaaacaatcccttacatggaataaaactagaaatgattctaaatgaattagtagatgagtttggatgggaagagttagataaaagaataaaaataaactgtttttataataatccatcaataaaatcttctttgaagtttttaagaagaactccatgggctaggactaaagttgaaaatttatatataaaaacttttaaaaaatcttaatatattaaaactaatgaaaattatactaagatatgtttccaaaaatttataggatatttaatatgataaaaaaaatagatacaaatagtgaagagttccaaacagaatttgaattaacaaagcaatttacagataaagttgttaaaaactttaactttgcatataatccaaatgatgaggtaaatgaatcaattcaaatgggacttgctagaaataaaatgatatatgggaaaaggtactgtccatgttttatggttattggtgagacaaaagaggaacaaaaagcagctgataatagattatgtccatgtaaacctgctttagaaaaagagatacctcaaacaggtaactgtcactgtggaattttctgtacacaagagtttgcttctcaagctgctaaagaagaagatttacatgatgcaattgcaactcattcaagaggtcttacaaaagaagagtgtgaagatttacttttaaaacaagaagtgaattctcaagaattagagtctttacttgaagctagagatttaggctttgttaaattcaatcttattgatacaagagagtggatggaatgggtaggaactcggattaaaggtacagattacttaattcctactacatcattttatcaagcacttgaaagagttgatgatcaaaaagatactcctgtaatcgtttattgtttaagtggaagtagatctgcatattgtcaaagaatcatgttagatttaggttataaatcagttgctaacttagactatggaatttctacttatcaaggtgaaagagaaagtggagaagagtaaactcttctagttaagcttgaaagggatgtatctttttaggattcatccttcttatcataataagacacattatctttgtagtcttccgtataagtttttaataaatgcataattgatatgaagaatgtcaccattgcagggcctataatcattccccaaaaaccaaatgttgaaagtccagctacaattgagaaaaatattagtatttcatgcacttttgtaggtgtttttacaactttttgatttatatattttataataacaggtttagcaaaagtatcagcaaatacagaaatcataagtattgaataagcagcaattacaattgcatttgtaattgaacctgtaattgcttcataaaccactaaaggaagccacataataactcctccaattactggaattaatgaagcaaagccatacattactcctaatagtaagccgtcatatctataaaaagttaaaaagaatccaaataaaaatccttcaaatatagctgtaattaatacagaatataaaacaactgtcattacatttgaagattcataaaaaagtgtaattgagtcatcttttttgattggtaatagctcttttacaaaagtagatattgttgtagaatatagtgtaaaaaagaaataaaagattagaattagaaccatatccatcataaaaccagcagaatttttaccaatagagccaccgattgttagtgtcttttgtgcaatttgtcctacatctatttttgttagtattaaacttaattgttcttttataaataagaaatcatcagaaagattttgtacccaaaatttgagatttgaaaattctttgattaatgcttgttggtcaagatgattaaaataatttgcgaatgcaaaaatacagtacattacaggaataaagaatattcctgcaagtgtaagagtcataataactgttgaagtaattctactttttaatctattttctaaatataatgttaaagaattagttgcaactgctaaaagtagagcaacaaatagtgcttttaaaaatggactaaataattccaccataaaaaacattgtaacagctgctataaaaatcaaaaagtaaactggtttcaaaataaactaccttcatcttctagcttgtcactattaggatatgaaagtctaaacatctcatatgtttttatacttgcaactcttcctcgtgctgttctttctataaaaccatttgcaagtaaatatggttcaattgcatcttcaattgttccttcatcttcacttagtgctgcggccattgttgaaagacccataggttttcctctatttgaaactaaaagttcaagaaggtttatatccatctcatcaaaaccactttcattaactccaagttcatctaaggcaaacttacatctagataaatttatactctcttcattttctacttcagcaaaatctcttacacgccttagaagtcttaatgcaacccttggagttcctctacttcttcttgaaatttcatctgctgcattgttttcacaatatttatttaatttttcagatgctatttgaataatctttgctaattcttgatgattataaaattgcattctaaaatgcatcccaaatctctcacgtaaaggatttgaaagcattccagctcttgttgttgcaccaattagagtaaatcttggaagatcaattttaacagtttgagcagcaggtccagaaccaataataatatctaatctatagtcttccattgcaggataaagtatctcttcaaccgcaggtgaaagtctatgtatttcatcaataaataaaatatcgccttcttcaaggtttgttaaaattgcagctaaatctccagatttttcaatcataggaccagctgtaatcttaatatttgtattcatttcattagaaattaaatatgaaatagttgtttttccaagtcctggaggtccataaaatagtatatggtctagggcttcatttctttttttactagcctcaataaaaacttttagatttctttttattttttcttgaccaatataatcatcccaagaagagggccttaaacttacttcattattatcttcttcaaaagatactgattcaacttctacaattctttccatcttttaatattcttcatcttttgaaggaaatgatgagtcttgaacatcacttctgtattgatttaccgactcttttacaagttgtgcaccatttaaatagtgtcttacaaatttgggtttaaactcttcaaagaaacctaacatatctgaccaaactaatacttgtccatctgttacatttcctgcaccaattccaattattggtatatttacagcttgtgtgatttttaaagcagtatcactcattactccttcaactacaatagcaaatgcacctgctttttctacagcaattgcatcttggattaactgttctgtatcttcttctgttttccctctaactttatatccaccttcacttcttacatattgtggcataagaccaatatgacccataactgcaattgaatttgaagttaaatgttttataatatctgctttatctgctccaccttcaattttaacagcagctgctagcgtttcttgataaacttttactgcgttttgtaaagcttggttttcatttatatatgtaccaaatggcatatctagaactacaaaggcttttggagcacctttacatactgcatttgtatgataaatcatttgatcaagtgttgctgaaagagtatctggcattccagcaaagctcatatttagactatcacctactaaaatcatatctgcaatttcatcaaaaagctttgcaaaaagtgcgtcatatgccgttatcatagtaagttttttattgtttttagaattttttatttttgaaatattcattttttcgaaatcgttttttataatactcattttatatctttcccataatttaacttaatagatattttatcacaaaaatcttttttataaataaataagcgcaataagaacttttataaagtcagattaaacatgagtttagatagtatataatctattaattaattaggatatattttaatgagtgagaatattgataaaaaacttgtaggctatataacagcttgctatccagataataattttacagttgatttaagtttaagtatgaaagaagcaggagttgatagtttagaactaggaattccattttcagatccagttgcagatggtcctgtaattgaaaaagctaatttaattgctttaaataagggttttaaattaaaagacctttttgaagtttcttcaaaaatagcacctcaaatggatactttatggatgggatatatgaatccattttatagatatggttttgaaaactttttacaaaaagcggaagaatacggaataagtggaactattattcctgaccttccttttgaaatggcagataatgttttacctttatatgaaaaatataataaagcaaatatctcttttgttgcaccaactgatagtgatgaaagaataaaagagattattactaatagtaaaaaattcatttatatggttgcatatgcaggaattacaggtagtggccaaagtgaagacttatctaaaattattgaaaatgtaagaaaatatactaaaactcctttatatattggttttggtgttgacgaaaatacatgtaaagagaaatcacaaggtgttgatggcgtaattgttggaagtgcttttgttaaacatatcattgatgattcattatctaataatgaaaaaatcacaaaaattactgcattagcaaaagaaataaaagaaaaaataaacgaataattatgcatattttaaacaaagatattgagtttttagaagagcaaagagattgctcatattttgaagataaaatatctgatattagatacaaatacatgttttcatgtccacctagttcttatcaagagatgctagagcgaggttggagacgttttggaaaaatgcattttgttccagagtgtagagcttgtacaaagtgtgtttcaatgagaattgatgttgcaaattataagttttcaaaatctgaaaatagagttataaagaaaaatagggatacaaaactttatattagacctccatcaatgactatggaacatttagagttatatgataaatatcatgaatttatgaataaaaagaaagattggccttattctccaattgaagctaatgaatattcaaaatcttatgttgatgcaaaagaagattatgcaaaagaatttttatatatgagagataatgagttaattggtgttgcattagttgatattttaccagatgcaatgtcttctatttattgttattatgaccatgattatgcggatttatctataggaaaattttcaattttagcgcagattaaaatagcaaaagagatgaatattccttatatatattta

SEQ ID NO: 147 - DNA, 24125 bp, synthetic construct
  source 1..24125: mol_type = other DNA
  misc_feature 1..24125: note = Synthetic
ccaggaaaatctggttgtaatagacgatccacaatccatcatcaaatgttccaataaagtatatcttgcggaattactaagcagccatcaaatcagaacacccgaaactctgttcatcagtaaatacgatcaagttctcccaaaaattgaattcccatgcgttttaaaaaaaccggacagtgccttttcgcatggcgtggtgaaaattgatgatgaaaaaagtttgatcaaatcgttaagccaattcttcaagacatctgatttggtggtagtccaaccctttattcctactgaattcgattggaggataggagtattggataataaagctttatttgcctgcagatatttcatggccaagggacattggcaaatctatgattggcatggtgcacaagagcaaaaagaaggggatcatgaaaccctgcccatccatgctgttcccgaagccatcctgaaaatcgccctgaaaagcacgcgtttgattggtgatggcttatatggtgttgatattaaaagtcatggcgacaaacattatgtaatcgaagtcaatgacaaccctaatgtagataacggcctcgaagatcaaattttaggtgaaaatttatatcaccagatcatgaacgtgtttcttcaacgcatccgcaggaagcatggctatgtctgatttctctattttttcagtattgggtatagaaattgaatacatgctggtggataaggacaccctgaatatccaacccaaaagcgacctgatattaagtactctggcaggtcatcaggctgatgaggttgaattaggtgatattgccatcagcaatgaactggtaatgcatgttcttgaattaaaaaataatggccccaaaccgcctgatacgccagtaacagagcacttccaaaagaccatactggaattacagccgctactcgatcaacacaatttattattattacctactggagcacatccctggatgaatccgcacacagagactgtacgctggccttatggtaataatgaaatatacagacaatttgatgctatatttgattgcaaaggtcatggctggtccaatttacagagcatgcatgtcaacctgccctacgcaaatcaggaagaattttatcagctgcataatctcattcgtttgattctgccgctattaccagccgttgctgcaagtacacctgttcttgatggaaaagccacaggattactggattcgagactgtatttttacagccgaaatcaacaaaggattccatcaatcagcggtgatgtcattcccgaatttataagttcagaagaagaatatcagcaaaaaattcttaacccgatgtatcaagacataagaccttatgatcccgaaggtattttgcagtatcaatggctcaattcaagagccgctattcccaaatttaattgcaaagcaatcgaaattcgtattctggacagtcaggaatgtgtagaggctgatatagccatcgctcacgcaataaacgctgttttaaagaactggcaagcttcatcacgttattatctggaaaatccctgcgacaccccaagattaaaacacatttttgatcgtgccatagaaacaggattgaatactcaggtagaagacatggagctgttaaaacaatggcaactccctgcacgatccatgacactcaatgaagtatggtctatgcttatagaacaggttagctctgaattgactgagaaacaacaatccgcgctggaattgattttgagtcaaggcaatttaagtcagcgcatcctgaaggcagtaggcaagaacaacaatagagactcattaaaaagagtgtacgcacaacttgcttatagtttgctcgctaatcaacaatttagaccctaatgaacactattgcgatagtaattagttgtgaacatgctgtagataccgtccccaaggaatacaccgcgttatttgcgccattcaaagaattattaaaaacacatcgaggaattgattttggtgctttagagatagctctgcatttaaaggatactctaccctgcgattttattcaggctcatacaactcgattattgattgattgcaacagaactctgaatcgcccatcttgtttttctgaagtcacccaaaacctgcctgatgaagaaataatgaacatcataaagctctattatcaaccttttcgggaagaagtgactaatattattcaaaaacacatcaatcaaaagctccaggtatggcacttttcaatccatagctttacccctgtaatgaatggccaaattcgctcaaccgatataggattactctataatcctcaacggccttcagaaaaaagtctttgtgaacgattacaaaatgaaatacaccaactaaatccaggcattagagtacgccgaaattatccctataagggcatcagtgatggatttactacattcttacgcaaaaaattcaacgatgcagaatacgttgggattgaaattgaatcaaatcaagcattaacgcaaaacgaccaatcgatagacactcttaaaaaattattatcagatagcttattaaaactaatatgttaatattaacttaataatgatcaactataataaaagcaattaacgtatttggtattttgatgatttcagaaaaaattcagttgatttcagaaaaaataaaactgttggagtcacttaaagaacatcagttttccaaatcaattgctgcaattcatacccgaattcttgataccttactaagtcaaaattttaatcctcgtatagctccctatctaagtaaaattaataaagaaggagagccttataccaattatgatctcaatcctgataatatttctcaaatcaagaaactgatcaacgcactatattatgcccgattggccttagaagatattgagcaaattgatttaaaaggcagaacctattccagtttaaagctactttatcaaaataccatccataaagcgtatcaggcatgttatctattaactcacctggatgttgatgtaagagaaatgttcagtgaagaattacagctgcttcttccattggctggaaaattaatggcctttgcagacagccactctgaagacacaaaaaaactggctgaatccctgagagaatatccactcagttataaaattggagaaatttccggcaccgcagtagatcaaatgcaacctaacagtgctgacctggactataaattcctgacccaatttggtgctgttttacccagttatattgatcaattcacccaatacatcaaggaatattcatctgaaatcattgaaaaagaaccctcactgaataatgaaaaactggaagagctacaaaccactgcattaaagctattaaatgatttggaaaatttaaagggaaatagcctgtttttatcatttaaagttttaaattacatacacatcatgcggaacattcttgcattgtccaaaagcactattgagcaaatggggcattttagccaatcgtctcaggatgtcatccgcagtaatctcgctcaattgaagtatgtcctattgccttccctgtttggttttgtcgataagattgaaaataataccatgttaaaacctggcactttatcaaatcccttaatggaaaagataaaaccactttatgccttgctcattcattacgcctcaaagccagttgattttcaggtaaaaggtgaggaattactcagtatagaggactctcgttttctggctttaaggctggaaaaatcctatggccgtattgatgcggctaataaagcgttatttaaaatccaaaaagctgaagacgcattaagcagcttctatgaaattcttgaaaacccactctataaaaacagtgcattaaatcaactgcctccggaaataaaaaatcaactgattacgcattataaactgattaaaccgtatatgatgcaaaaagattttgacttaaatagcaaaatcattgacagtcttaaaggccccgaaagctacttctccatggcgggtagaccattgcgctggctacgaaaacaattacccgcagatcacgtaagcttcataatcgaacataaaaatacattacaagatttaatatcaaaaaaacgagcgacccagatatttcacatcaatctgaatatggatttgattaattcggtcaataaacaaaccaatctggtattgtttccatacaataatcaaaccaacgtattttctgtagatgaatccgaagcagtgaagcagagtgatacctgcgctcttctcaggctaaccaatcaatacactctcaaatcaataccaaaaatccaatttgaaccccaaactctctatcttgaggaaaccctaaaaggcttaaaatacgatgtacttaatcctcaaggcaaacgcgtatctgccattattccctgggataagattagtgagtttcctcataatgtcagtgagatactggcagcaaaggacagattcttacccactctgttggaattaactgctgacgcagggcacacgaagccgaccgataaactcaacttgtgcgccatggagaaacacgaccctcaaactctctatattgaaacgactgataaaggattgaaatatgaggttatcaatcctgaaggtcaacttgaaacagcaatcatatcctggaaaaaattgaacaatgttcctcatgatgtttcattaatccttgcctcaaaagaacaatatttacccaggttgcaagaggtaacttctgcagcagggcataccttaaattctactgaattgaaatttgacgaaattaaaacattgctaaaaggcagaagtgccgtcattttgtttaataataaagaattgatttacgctgacccagtcaatcaaaccgtcagtgagttaaaacccagcgaaacaaacaaaaccagttttaatcaactaaaagctgtatgcacccaggcttaccaagttgcaggtgagaaagagcttgaattagttaccgatgtaaccggtcgccgtcatcttggttttaaagaagtcagaagacaacaggttcttagtaccccgaataacttaagtgcggatcaagctcttgatctgcatcaatggtatagaaacaaacgagataaattcaagattgcccaaaatgcctataatgaatttatcgctttgttaaaaaaacaagtagcagtacctggaatgacaggcagtggagctctttatatcagcaacatggataaaacggttaaggcacgctgccgtaatttatataacctgtttcagccttatttcattaatggggtaccctctgaattaaaagctgcagcactggaatttgataaatatctggtgcattcattttcaggtgatacagaacaaagccctgctccagcaactgatttgttccaccaactcgatgaacattttcaaatatattttactgatattgattcatcgtggagaacaaaaagcaatgcttatttaaagttggctcagaagaaatttgctgctgagaatgaagagtcctcattgacgcacgacgccactattggaaacagaggtcatcatttaataaaacatacaaattattcaaaatacgcacataatttcagaacagaactctataaagtcatattagcgctgaatcaatccatgcaagccgagttgcgtccacagaaagacggaattccctttcctgaactggaagatcccaaacaattggccgctcaatgcaaacaagttctggcgattaaacgaatctttaatagtctatttcatgttgaaggcatcattcttgagcttgaagaattagataaccgcagttatcaaaccaattatgtaagacatctgctcctcgcttatggacacatcaatgaaataatgaaactgaccaaggaccttataaatgatcctcattttagcctcattggtcgtgaattattagaaaaagctcaagggatgtacgcttccattcaggaacatagcgacccctatcaagtagctcatgcagaagtaaactatgataaacccgtccaattcaacgggctttggtatgcactcaacgctttcaatattagtccaaaacacatcagaagtttacgaaacaataattttctgactgtagaagaattaaatgaattacatgttagtgccaaacgctctgctgtccagattgaatccataataaacagtgccggttcctattttcaactattccttcaggttccgaatatgtttagcctgtacagcaatctgactagtaaactcaatgagtttatcagcaccgttcatgacaccgttattaataatctcgatcaatttggccctaaaatttttactcccatgctacttgaagccgatctttgggaggataaattaggattaattccaggtacattatctgggcctctaaaacaaatcatcgatgaattttataaagggttactgcgccccctggatttggatgcaaaaacccatgtagaccttatttgtgataaagcaactttggtaaaacgacttgaaataacacaacaaaaaattgatagcgcggaacagcacctggaaaaactggataaaaattacaagcacatcaataacttcttttcatattataaaaattaccaatctctgacaggcggattattacccgctgatccactctctctatcaattgccaaacaagaactgctcaaagcctataacaaagcacttcccaagctggtagtgctccagaacaaagtaaccttggatccggagaaaatcgatcctaatttcgataatctattaaattccggtcttaaagactatcagcctaaactatcgcaaattaaggaactgtttgaagcaagccaaaattactatcaaggcattaaagcaacctatcaaatgcagttaaacactgccagagaaaaattgacgtatcttactgagttaaacagagcacaggatcaagccaatctgctctttattcaagagtacactacagaatcctttaacaaacaaatggaggcgttctgcaatcgtcacatagggctgcaatataccgataaagaataccgtaataagcttagggaatatttgttgacctttaaagacaccattatcaatcaagcaaaaaccactgacgacattaatctgacggtaaaaaatttattaaaagaaaaaatcaaactgtttgaacaagacaattttgcaaaatacttccatctggatacagtacgtgttgcattggcccaattcaaaaattatttcagtatctctaccctggcgattgaacgcaattactctctttttgaaaatgaaaaaacacttggtgaaaaaacagagaaaattaataaattgcttgaatttgctgaaaatgaacacctaaccattgatgagcgcttttccaaaattgcattcgatgtcaaagatcccagttttggacgaataatacttgcccataaacaagaagatcattttagttttacttacttaatccactgcgtcgtatcgatactcgaagcgctgtctctgtatactccagcacgcaaaaggctgtacaactcgttgcaagaatcggtaaataataaacctcaaatcaatgagctcgcaaaacgatttggtttatttgcatcatctcaaacacctgcgcctcttccatcccgcgtccccgaagcgccaacggatggtgaagaaaataacgacgatgccgcaccaactataacagcctctatttaagttccattcccagccagactatcggctgtaatataatctcattaactccaaagctttttttaaaataggcattcgaggtttcgcgtttggaatgggttccccacgaacattggtaataagagcgccaccagaggttcgtaacgtagtctggcgatccggttctatcagagccatattgctgtaactcccggagatgacaaaaggtaaacgattgtgttcatccagcaaatcctgaccaatactgtagtcaataataggattctgacagtcaaaagctctttttaacagagtaggaacgacatcgtaactgcttgtttcatattgaataactcgtggcgattgttccggccaataaagaataaggggaacatgaacttgtacatcggtaaaattaccagcatgtccccaataattcagattgttgtcattaaattcctggccatgatctgatgtaaccaaaacaatactgttcttcagatacccttgctcctccagaagtgtgagtatttttgccaattcgccatcaataaagcgtaccgaattcaaataccgattataataaggaatcggatccacatcattggtcatggcgattcgtgaacattcgcttatagccggctgatagggagccgggaagctttgatctcgacaatatccatgtggtgcatcataaaacagattaagaaagaatggttgcttcaaatccttatccgataaaaattgaagtgcctcctcggtgacatatcgatctttatttcctatatcatcaccggaggcaccatacagatttatattagatattcccagataaatcgttttatcaaagggcggaatgaccatttcactagaccagactacccggagcatgtaactgtattttaatagcaattgaatcaatacaggcggaatgttttgctccagcgctgccgtccaataactgcttggaatagaataaaataaagaaaataaccccggttgagttgaattcccaccgcttaggtgcctcttgaattgccagctccgttctgcaaatgccattaaattgggcatatattgtggtttcaggctatcaaacctcagcgaatcaaccataatccaaataatatttggtggattttcaggccttgagcactgtaaaggatgaagaggataattcaagggatcatttgaaaatataggctgataaaaatgcccttctccgtatcgatcgagcaatgcttctgcgtttttatccgggattaaatagacgattagctgattataaaaaggtaaattgggcgtttgttgactgaataaattattatttcgatctacagattgcagcaaggtgaaataactgaacaaaaaaccgcctaaccaaaaaagagcaatggttcgtccacagagaaacttgtcggttactatgattttgttccaaacaaaataagcaataacaacttctataacccaaaccaggcataaaactatgatggacagtttcagttcacttcgggaaaaatcaaaaacatcatgccattgcccattaaaaaataaattaaaaatatccgtattcaaatgaaatttgaacatggaaaagacacagttattaatgattaaaaggataagacttaaggttgcgatgcacgcactcaagaaccagataaaacgtttagctggaataatataggcaaaaataccaataaagagagcgggaataaaggcaagcgccatcatataggttaagtaattaaccacggcaaaacaaacaaccagtatctttcctgaaaaagttgaataatccgccagaaaattagcgaaaagagtaggagaaagaagaattttttttaaataaagagatccaattacccaaaataagacgctgttgattaaaaaaaaccagccaacaaaacgtagaatcagtcgtttattttgaggagtattcataataatcagcagccttttatgataaatagtgatggaattagctcctaagcgtttctcacttgtcacacttcatcctcacgaaatcgggattagcctcaaaatgtattatcaagccacataattgcatggatagacgcgctcatgaagatgatgagcaaaatgaaggagcgtccaaatctccccccaagggatattaccttgatcattttgagcaatcaaatcctatacacatttgatcattcgaagttgttctgaattaactcccgacacaccatgaatttaatactcaaaaaagcatttacagtaagatgcgctatacttccaaaatcatactatttatttgttcctcctcctacgcaacaaggatgttattatggaatctacacagcaattatctcctataggaattgacttaggaggaaaatttacaggagtttgcctaactcaccttgagacttgtgaagaaatcccaaatcactcaaatacccaatattcagttatattaatggatcagaacaactttcaattatctcaggaaccaagaagaacaacacgacacagaatcaggaataaaaaaagaaatcaatttgtaaaacgtgttgcactacaattaattcaacatctgatctcaagagagatcaatgttaatgaagaaacggcgatcagacattatttaaataacagaggttatacctatctggatacggatctggatgaatatttaaaagacgaatccacaattaacctgctaaaacaattaacaggccacacctctgaatccacattcattgaccgctttctacaaaaaatggaatatttcgaatttagagacgagttacaatcaaaaatcgcccaactcccccccaataaagaatcaaaacaaactataaacaatattaaaaatttcattattggttttgaaaaaaacagcgttgaaggccatcgcaccagaaaacagtattttcaaaatatcaaatcagatatcgaaaatgactatcggcttgacgatataaaaaaaatactcccaacggaatacctctctaatataatggggcatttaagtaatttacaatggaaaaacctgcatcggtaccttgcaaaagagcaaaatcaattcaatgaaactgcttttttcaatgagtttatcagaatgctcaaagggttcagacattataaaggaagcagggaggcgattgtcactcatgaattaatccatcagtttgatacatctcaacctaacgaacatcttaatttattaaaaaacacttctcctgaattaactatcccaccctatgaagctagaaccaatacggggatggaaaaagatcaaactcttttactcaatcctgacgcactcaacagactctatccaaactggcggagcttaataccagggattctcaatgctcatccatttttagaccagtctctcgatcatcttaaattccgcgatcgtaagcgcttgcttgattcatcctgtcaggaggaaaaaagagatgcatacattttacatcggtatttagacatcaataaaaaactggatcagttcaaaattaaaaaccaactttcgtttctttgtcatgggaagcaattaccaacaaatttatttcaaatacatcagcaaatgattcaacattttacgccttccttaagcaaaaccctgattgaaatatcacgtgcttacagcaaagaaagagaagacgcagcgcaaggaatctggtttgaaaatatacataacttatgcgaactatcttatttaaaccctcctagaaaacaaaaagtattaccacttcttgtaggcgctgtccttggagtaaattttatcaataatcaacaaaaatggattaaatttaagttattttgggacagtcataaaataggacgaacgttattaaaaaataaatgtaaagaaattgaagagaacagaaagaaaacaggcaatttatttaaaattaagtacgaagagtcattacatcgacctgataaaacctcagacactaatcttgcctctataataaaaacgatacctgatattgtgcatgctttaaaaacggctcttgggcacgatgaacagcaatcatcaatttataacaatccctttagccttgctcagctctataccattcttgaaaccaagcgagatggttttcataaaaactgtgttgctgttacctgtgaaaattattggagaacccaaaaaacaaacgaaaatccagagatcgcctatgcctcaagactacccgctgacagcgcaaggccttttgatggcatattaacccgaatgcttcaacggctggcttatgagatcagcacactcaaatgggagcaaattaaaaatattcccaacaatacaaaccttatacttccaatatacattgagcagaatcgcttcgaattcgagcaatcacttaaaaaaattaaagggagcatagacaaatcgcttgaaagtactattgccaatcaaaacacccattgggaagaaaaataccagcgcattatcaatgcatcaaatgatatttgcccctatacaggcttatcgattggggagcaaggagaaatcgatcatatatactctcgttcactttcaaaaaaacattttggcatggtattcaatagcgaagccaatctcatatactgttcttcccaaggtaatcataaaaaacaagaacaacattatctattagaacacctaagcccaacctatttaaagcatcaatttggaacggagcacattaacgaaataaaagagtttatttaccacaatgtttcgagcatcaaagaattcatcagctttcacttgctttctcatgatcaacaaaaagcagccagacatgccctttttttagatacagaggatgaactattcaaagtcattaccagatttttgatgacacaacaaaaaacactggttaatgggacacaaaaattcttaggaaaaaaaattattgaattgctaggcaataaagcggaatcaaagaacttaaagctagaatgttctatcaaacaaataaggtccgaagaagtatataactaccgaaaatcactttcgcaacttgattcatgttttaagaaaaggactgagcagccatttccaagccatgtggtcgatgcgacgataaccatggggcttggacttaatgaatacccacaatttcatcatgaactcgataaatattggttcatccaacatctaatacccaacgaaattcatctaaaccaaattcaatctaaagagaaatacaacaaaacaaaaattaacagtagggaattatttaaagaatccatctatgcggagcattttattcctgtttggtttaaaggggatcaaacggcaattggattttcagaaaagtcgttatttgagataaagccatccaataaagaaaaattatttgctctaatcaaaaaatactcaaccaaaaacccgggcgattctttattggaattacagaactcttccaaaagcaagtgggcttattttccaataaacaaaactcttgcgctggggttcttgcacacttattttcataaagatatagtttcccctgatgataccgatgcgcttaatttcataaacactcttcgttactacacaataaaaaaaccatttactataaagattttaaaagaccctattcccgatctcagtgtgaattttaaatcgaccaaaggtgatgttttaggctcttttacccataaaattattttgcccgccgccaaagattgggaaaagctttataaacacccacgttttctctccctgaaagagaatccagatcaaaaagaattcaacctgtttatgcgtatgtattttctatcggagactaacccaagttcagaaaataaacataataaagaccccctaacattacaaaaacataatactgttcgaaaagtgttctcacttccaatagtcccgggaaacgcaggcacaatgatgcgtatccgtcgcaaaaataataaaggcgcgcctttatatcagcttcaaaccattgcaggtactccaagtaaaggtattcgaattaataatggcaaactaatcaataaagaaattctgatgaacgcttataagacaaaaaatgtatcaacgattaatggaatcaatgactccaacattcagcactatgctccatttaattattggctcaggctacctcttgcaggttcaaagttagatacaaaaataataaagctggaaatgaagccccactctaaaacaaggcgttatatacgaattactcaatctttaacccattttgctcaaacaatgacggacgctctaattattaaacccgattacctgaatttggatgacccattgaatatgcccaatgaaatagtatgtaaaaataagttatttgatagtgaattaagccctcgtgatggaaaaataaaaattacagccacaggccaatacgtaacttatgagtttgaatccaatccaacaccatcatggattcagcaaatctacgttactgaattaaagaaaaaatcatgaaacatctcacactctctgaacatggtagtttttgtaaattacaaggagaaagaatccttgtatttaataaagatcaaatgatctttgaatgcactctaaatcgtttaaaaacgataagcatcgtcaaacaaggcgtcacattaacctcaaatctcctcattgcctgcgcaatgagaggtatacaattattcatcatggattatacgggtaaagccgtttgcagcgtgcaaggaggccttcatcgcaccgccaaagtgagagaaaatcaatttaattacatcaactcaaacgcggcaaagaacactgcagttcaattcattttagccaaaattaaaaaccaggctgctgttcttaaatattttggaaaagccaaaaaccgccttgaatccgaaaaaatacacctgcatagcgcatcaaatcaaattggaactattgttacacatttaatcaataccaattggtcaaaacatcaggactggcgattcatactcttgggatttgaaggaagtgccgccaagatatattgggatgcagtaaaaaaatcaggattagtatgtgccgatttcgatggaagacgcccaagaaacaacaatgatataacgaactccatgttaaattatgcttatgcaattttatccagttggatttggcaagcaataaccaatgctgggctggagttatacgctggaattttacatacgtccaaaccaggtaagccatcactcgtattagacataatggaggaatttcgaccctggtgcgcagacaggatcatttttaaacttcatgcccgcgcccaaaaaaaccatgaactatcccctgcgttaaaaaaagtattaatcagtgcaatggcgcatctctatgccaaacctcttccataccataaacgaagaatatctctggaaagcattattcaaagacaaatttatcacttgtctgccgtgttttcaggagaaggaaaatacaaaggttatttatttaaatggtaaaaaaatgcaaattcgactctataaagaatacataatatcttacgatattggcgacaactcgatccgacgcacaatattcgaaaaactaaaagacatcggtttaacaccaattcaaaaatctgtcttttggggttatttaaatgaacctgagataaggtttatagctaattttcttaaaaaagaactcaatgagcctgattccgcatttattacaccttgcacactagcaaaagagtcggaagtaaacctcatcaatctgaaattagatgaacttaggaagccggatggacacatcattatttaagttgcctgtaaatatgatcagacagtactgcttttgtcctcgaattgtttactaccatcaagtaattgggcttaaagttacctatccaggctgggttcactatggtgaagaataccaaaaaaagcaacaaatacgagataaaagaagaacgctctcaaagtttaaaccacttactgagcgagccgtgttcactcataatgtaatgcttgagcatgcagcttatcctttctatggcatatgcgatggattaatagaagatgaacacgagataatacctattgaatttaaatcatttgcatcaaaaattaacttagggcaaaaattacaattgactgcttatggattgctcgccgaattaatttttgaaaaacaatgcactcgaggctatatcgttacaggtgaaaagggcaaacccaaattggttactataaatgaaaaatctaagtacaaattgcttgaaatttgtgataaaatcaagaaaataatagaaacagaatcgttaccatatagcactgcaaatggcttgcaatgcatacagtgtgagtttctaaatcattgtaatgataggttttaaatcgttatatgctcgttatgaatacgagcatagtcaaacgatccaatctttaattttgttgatttcagggtatcgaaatttagatgatttcacatttaattatggtctgttttttcgaaaaatcaaacataaattctacaatttgctctttttcgaaaatacacacctcccattctattcaattacatagattattcatagaattaggtgtgctctaataatccctcatctaaaaatccaaccgctgaaacgaatatgcaaacaattgcaaaacatgggaattactaataatccctcatctaaaaatccaaccgctgaaaccgtaaaattctactattttatttattctgctgtgctaataatccctcatctaaaaatccaaccgctgaaacttaaatattttatcttgctcaagcatcttaggatctaataatccctcatctaaaaatccaaccgctgaaacgtaattcggcagtacttctcttttggttttataactaataatccctcatctaaaaatccaaccgctgaaacaatattcgatcaactaccgatacatcaagtttatttctaataatccctcatctaaaaatccaaccgctgaaactttctgtggtgtaacccactctatggaataaccagctaataatccctcatctaaaaatccaaccgctgaaacaattatgttgaaactgatgatcccatagatgggactaataatccctcatctaaaaatccaaccgctgaaacttgatatagatgcttgaacgtttttatcttgtatctaataatccctcatctaaaaatccaaccgctgaaacagattatcctgagttatccttgagcaccctctcgcctaataatccctcatctaaaaatctcgacactgaaaccctggttaattaatattatagaacaggatacaataactaatggtttcagcgtctaaaaatcgaatcagctaggcttaaatgagctagctggctcagtagttgatgcgctattttgtaagtgttgtgcatcaaattttgccagtccttcctgcacgtgtttctcaacaagatcatttcttaccttaacaaagaaactacctgctttagctggagcaaaaattccattagtttcagctctcaatcgctgttcttctaataatcttagcttttcaattgatacagcttccggcttagttagattaaaatcattttttgtgcgcatctcgattctccacttaagtataaaaaccggacaatataatttaaaaacacggatgcatgcaaggaatttgtacttttttatagttgtgaaaaaaaattactttatctgaaaaacccaaacagcaaaaacaaattatgaattcataccccctggaatcaaggtaaaattgacgataactccccacgttcttaaccgaatctcccctcgcccctgcgcgcagcgtgggggagagggagactgaatgagttgccacgttgagcaaagatatcaatccagagaagtaccctaaccatgaaaaaatcctaaagaaccaatctctttataatcccctcatttattaaaggccattcgctggataatatactaaaaataaccgtatcagtaatggaaccattgtgatgaatcatatgttcacgaagcaccccctcctcctttgctcccaattttttaagattgttatatgagcgctcattcttgggatctgtagcaatttgaattcggttaaactgccattcttcaatcgcctgacgaaataacaaccacatgcactcaagactgattttctttccccaaacctcaggagtaagccaaccatagccaacctctaaacgcctgtgctgcatgtccatatcataataagaacgacaaccaacaacctgaccatcaacgtgacaacgaatcgcgtaggtaatttgtgtccccagcgtctgcttggttaaattttcataaaaccaatgatcaaaatactcgttataggccttcattggcatataagtccaaatccgttcatcatttgcagcacggcgcaatgattcataatgggtcttatccaatagttcgagatgaatggacgggccagagaggttttttagaactaacggatgattaagcatggtgcttttcttaataatgaattaaataaggtcaattcaagcttatcagctccaaccacaatagttcaacccatcagattttttatcactctaccatacagcaatttcagaaccaaaaaaaacaacatgattgtttaatatccaattcttccttataatccgcatcaataacaataacaataaggtaatttcatatgaaaaaatggatcttggcagcagcaagcagcatggttatgtttaatgcctctgcaaatgaaggtttttgtggatacaaagattttttccatttgagtgataaatcacatccaggaatatacgttgtcagtggttatagcgaatcggatgtcattttagaacgagtaggcccgcgcagttttataattagagacggttttgattgtcgctcaggttatgcccatgtaacagtagcctatgatactgaaaactggtgcgtactggacattaaagacggcccatttatgtacacaccaaccgttactgcatcatgcaaaggcatacgctatttaggcctgagctacgacagctttggaagctattcttactcaattaatttggactaagagctcattaacgctttttgatccccaacgcagacattagtgcgcgtgtcatatcgcgcacaagctgacgtacaatctggcgaaataatgtatttttcgtaacagcagtgataactgacggctcatttgtttcattactcaccttggtttttgtgttttgctgttgttctgatgtgctgttttgagcagccaaaatttctttcgctgagtttctctcctgacgttgacgataacgtggatataaagttgaagtagcaacaacctgatttaactcttgatcggttaaaactcccatccgcgattcaggtgctcgtatcatacattgaatcaaaggggtcggctgaccttttccatccaaactgctgaccaaagcttccccaatacgcaatgcagttaacaattgctccgtgtcataatgttcggatgggggaaaattctgagcgaccaatttcatcgcttttcgatcttttgctgtaaaagcgcgcaaagcgtgctgaactttcaaacccaactggcttaatacactttcaggaatatcattaggcgtttgagtacaaaatatgagtccgactcccttggagcgaattaatttcaccatagtatccagcaaactcagcagggctttactggcattactaaagataagatgcgcttcatcgataaatagaatgagcttgggtttgtccggatcgcctaattcaggcatagttctgtaaacgtctgataataatttcagcataaaggttgaaaacaatttaggcttatcctgcatatccaaaagccgtaaaattgaaataacgcccaaaccttgtgcattggttcgaaccaaatccaaaacattaaatgcaggctcaccaaaaaatctgtcacctccctgagattccaattcaatgattttacgcataatcgtacctaccgaggacgaagcaacactgccaaatcgcgcttcaattttattttttcctgtatcggtctgaacaaattgtaataaagctttcaaatcagccaactcaatgagcggcaattgctcttgcttggcgtattcaaacaataccgttacaaccccctcctgagtatcgttcacatcaagcatacgggcaaacaagacgggaccaaaatcagaaacagttgaacgtagcggtacaccaggatgagactcattcaaggtaagaaattcaacaggaaaaccacgaggattaaaatccagatgcaaggatttgcttcttgtgatcatggtctcggatgcatccccagccatagccagaccagaaacatcccctttaatatccataaccaggcttggtactcctgctaatgagagttgttcactcaaaacctgaatggttttagtttttccactgcctgtagctccagctatcaacccatgtcgattaaaggattttaacaccagatttactggagcatccgtaatgagttgattttcaacttcaataccacccaattgcaatgaaggtaagtttccggtttggtagggaatacgtaaatcttcatacataaaaagaatccttatcaatcaaatatcttaagtataatcttaaaaccctgatattgctttaatccagaatgaatcgtgcagcctgctctgcgatcatcatcaccggagcatttgtgttacccgatacgacttgcggcataatggacgcatcagcaataaccagtccggtaatgccatggacatgcagacgagaatccaccacggccatgtcgtcatgccccatgcggcaacttcccactggatggtagacggtatcagcacgttgccttattaactgaatgatttcttcgtctgaggttgcttgatacaaaggcctggctttaaaaggagaaaaaagctcatgctccatcagttccttggtcattttataagcgcgcaacagaatctctaaatcgtaatcatgagctaaaaaattaggatcaattgccggagcatggaatggatttgcggatttcaatcggattcgaccacgacttttaggacgaagcacacaaaaatgcagcgacattcctcgcgcgatatgaaacttatgacaatgcgcgtcaacaatgcccggaacaaaatgcaattgaatatcaggcctggcttgtcgtgcatcagtagaaataaatccacccgcctctgcaaaatttgtagtcatcatccctgttgcgttggttttatattcacgataggctttaaaaatatcccatagagcggtggggccaaagcctaaaagattggaatggttggctttgtatacatggacatagtctggatgatcatgaaaattttctcccacaccgggcaattcatgaatgcagttgactccatgacgtgataactcttctcgcggcccaactcccgacaccattaataaatgcggtgtattaatcgctccagcacttaatataacgttctttctggcgcgaaactctatgatgttccctttatggcgtacacttattccatgacaatgcgtactgcgaatcaataattttaaaacgcgcgcgcgggttaaaatcgtcaaattggctctagtcaatattgggtccaggaatgcatctgctgcgcaatggcgtttgcctgctttctgagtcacctgatataacccaattccagactgacttactccattaaaatcgggattatagccatacccacaagcttttcctgcctcaacaaacaattgcgatactggattaggacttagtaaatcatttacagccaactcaccttcttgtccatgatatgaatcattaattcggtagttgtgctcaatttttttaaaaagaggcaaaactgaatcataagaccagtcctttgatgtagtttgcgcccattcatcataatcttcgctttgccctctgatataaatcatggcattaatagcactggaaccacctagcgctttacctctaggctgatagccgcgtcgattataaagtcctggttgcggctcagtccaataatgccagttcttgagccaaaaaggcatggtcaaaacagtgagaaaaggaatttgaatcagaggagatttattactgccccctgcctcaacaagtagcacttgattcgccgggttttcacttaatcgggaagcaagtacgcaaccagcacttcctccacctacaataatgtaatcaaattccatgctcatgttatccattgattaaaaagcaggttttaataacgcggttgaattacaatgcttatttaagcatcacaactcaagtacactgtgagcaaataccatatatattcagcgcgtgatccgtcattttaaaatgtgctttttccgcaataactttctgtcgttgttcaatgatctcatcaacaaactcttctactcggccgcattttacacaaaccaaatgatcatgatgctcaccctgactcaattcaaaaacggaataacccccttcaaaattgtgacgggacactaatccggctgcttcgaactgggtaagaacccgatacacagtagccagaccaacatcttcacctgtttccaataaagccttatagacatcctcagcgcttaaatgatgattacgagattgttctaaaatttgcagtaccttcaagcgcggcagggtaatttttaatccggcttcttttaactgctgactctcttccacttgtgctccttaacagtaatgaatttgcacccgtttagtggtgtctttaaataaatggcatgttattatggcgaaatttttcacggtaggcaaaaaatatgcgaataataacccttatagtaacactcattttatcattaactttgactcaatgtgcatcctatgattttgccagacgcatcaatcagcaagggaacttgcttccccaatcaaaagttgagcgattaagagtaggaatgagcaaaaatgacgcggctattttaatgggaaccagcctaatgagccctacatttaataacgatcgctgggattatgcatatacctggcgtcgaggtatgggcagcatgaccatcaaaaccgttgttatttattttaaaggaaactcgataagtcgaattgaacacaaaccctaatcacaagcggcaccctggcaaatatcataatccaggatgcgctgtccttaagtcaggtttgttattccaaaacatccattcatacgtttggaagatgatttattgataagaaattgaaacatggggggcactgaatgccagcatacagtgccttaagctggtagttccttgctgtagagagaggagccaagaaaagacgggcatcgcgttaaaaagccgcctgatttattttcttaagcgggctttctgacgtcttttctctttaggatcacactgtaatggccgatataattcgacccgatcgccatctttaagtaccgtatccctggcaatctgcttcgcaaatatgcccacgggcaaatccctggtttctggatgagaatcaaagatccctgatgccgttaaagcatctgctacgcaggacccggggtttaatgctaaatcaaaatgcacaacagtgccttccttggcaatgtaaaccacctcaacttttaccatagataacctctgcccggtcacaaaatgcatcaaccattttatcggttacttgatcgaacacagggccaagaagcatggaaaatatttttccagaaaattcaaactctaggtcaaaggaaattttgcagccatcctctacctcatcgaaacgccaaaaaccttccaaatggctgaaaggaccatcaacaaggcgaatttcgatcattttgttaacttgcaaacgattgcgggtagtaaatgatttgctcattcccgcagcgccgataactaaggtagcctgtacttcatcgtcatctcgatgatgtacggtactttctgcgcaataaggaagaaattccgcataatggtcaacatcattaaccaaaccatacatttgttcacaagtataattgactattcgtgatctttttacaattggcattacacagctccttgaatctgcttattaagccaaagactcaggtctttgatttcttcataacaaatggaatgttccattgggtattgttgaaaagaaatatcattatatcctttattcaataaccaatctctactttgttgagtccataaaggtaaaacaaggggatcaaattgacccgagcccataaaaaagggagtacttttatccaatcgagggttactcgttccagccaggggcaaataggccgataatgcaatgacaccgcctaaagtatgttctgtatgaagcgcagtgtgcagcgccattgccccaccttgtgaaaacccagcaagatagagttgagaatattgaaaaccgtcatcgcactgagaattcattacttttcgaattatttcttctgattgctcaatgccttgtctgtcttccctgtccaacaatttcattccaacaatgtcataccatgcgggcatgaccat

SEQ ID NO: 148 - DNA, 24119 bp, synthetic construct
  source 1..24119: mol_type = other DNA
  misc_feature 1..24119: note = Synthetic
gaatttttgacccggaaatctcgataacttccaattcaattaacccatcattaatcagcagatgatcaccaatactgagttcactggccaaattaggataagcaactgatacgccatttatatcacccagggtatctggggccatacaatccaatgtaaaattttgcccatcaattaaagtgatggatttgttttgaaaacggccgactcttattttaggcccttgtaagtcagccatgactgcaaccgggtggtttaattcatctgcgattttacgaaccagcgcaattaattgcagcgcggaggaatcagcatgagaaaagttaattcgtactacgttgactccagcagccagcatggatcgcagaatttcaggttccttactggctgggcctaaagtggcaacaatcttagttcgtcttaacatgttttgcgcgctcctgcaaaatagcaacagcaggcaaggtttttccttccagacattccagaaatgccccacctcctgtggaaatataagaaatttgttgattcaaatcataaaggtcaacagcggccaaggtatcaccaccaccagcaatagaaaaggcatcactctcggcaatagctatggcgatggctcttgttccataagcaaactgcgggaattcgaatacgccaaccggaccattccagatgatggtattggcttcatggatgagatctacataatctcttatggtttctggtccaatgtcaagaatcatatcgtcctcagccacattagacagagacttgttgaaagcagggcaggtttcactaaatgttttgcctactacaacgtcggtgggtagaggaatttggcaacccttttctttggccagaataaggatatggcgagcctcatctaataaatcaggttcgtaaagggaaataccaatttcaaacccctgggctttcagaaaagtattggcgatacctccgccagggatgagaacatcgaccatacccactaattgtttcaataaactgagtttggatgagactttggctcccccaacaatggcgacgataggttttttgggggctttgagcacctggtttaacgcttcaagttccctgattagcagaggaccagcaacggcaactggagcatattgagcgacaccataggtagaagcttgtgccctgtgtgccgtgccaaaagcatccatgacaaagacatcacaaaggtttgccagtttttttgccaaagcttcgtcattggctttttcaccgggattaaatcggacattttcgcaaacgaccaattccccaggttttacatccacaccactcagataatctttgacgaagcggacgggatattccaggtttttccttaaataatcagcaacaggttccaaagagaattttttttcgtatttgccttcttccggacgcccaagatgggacaatacgattactgctgcgccattgtccaaagcggatttgattgtaggcagggccgcttgcaatctttgatcactggtaatcatgccgtctttgatcgggacatttaaatcctcacgaatcagaactcttttgccagacagatcaatgtcgctcattttaatcaggttcattggttatcctttagcagttcatcatttggtgtgcggtatcaatcatgcggttagagaaaccccattcattgtcataccaggctactactttgaccaaactgcctatcactttggtttctgttgtgtcgaaaatagcggaagcggggttgtgattgaagtcacaagaaactaaaggatcttcattaatttgtaaaattcggcttttagccttgcgcatgatgtcattgacttcttccacagaagttgcgcgctttgcctggaaagttaaatcaacaacggatacgtttaataccggtactcgcattgcaaatccgtccaatttccctgccagttcaggtaaaactaatccaacggctgcggcagcgccagttttggttggaatgatggactgcgttgcagagcgggcacgtcgtaaatctttatggcttccatccaaaagcatttgatcttttgtgtaagcatggacagtgttgactaagccggattcaattcctatagcatcatttaatactttaactactggcgccaggcagtttgttgtacaggaagcgttagatacaatgacatcagacgctttgatgaccgagtgattaactccatagaccactgtcgtatcaacgcctttggccggagcagatattaatacttttttggcgccggcattaatatgacccattgccgcatctctgctggtaaagaaaccggtgcattcaaagacgatatcaatgtccaattgtttccatggcagtttggccggatcacgctcagcaatcacttgaatgccatgcccatcaacaatcagcatgtttccttctatgctaacatctgagcgaaaaggaccgtgagttgaatcgtagcgagtcaggtgagcggtcacatcgatgccagataaatcgttaatggcaacgacttcaaactcattttgcctgttgtattcaaaaatcgatcttaaaatgcaacggccaatgcggccatagccattaatcgcgactcgtattgtcatactgcttctccaagttagggtaacctccatactcagttatactgaatacaggccttcttgaaatttcagaagggtatgggttacaccattgtttgtttggttaatgtatctagagtattgataattttttctactgtaattccaaggtaattaaaagcatctgtagcaggagctgataccccaaaacaatccagcccaatgacagcgccgtcaaagccaacaaattggtgccaataggcactgctagctgcttctatcgcaatacgtgtgcgtacctgaccaggtaatacctggtttttgtaagcatcactctgggcaaggaatcgctcagcgcagggcatggataccaccctgacctggagacctcttgcttttgccttttctgctgcggttatagccagttgaacctctgaaccagtggctatcaggatagcatcaggcttcccttcacaatctgcaataatatatccacctttcttaatcaagtcagccgcatcggtgccatgggctaaagcgggcagattttgtcgtgagagtaacaaagcagaaggtccgttatgatgttctaacgattgttgccatgcaacagcggtttccatcaaatcagcagggcgccagactgtcatgccaggggtcattcttaacatagcgatatgttctataggttggtgtgtcgggccatcttcccctaaaccgatagaatcatgagtcaatacgtatatcactctttgtttcattaaagcgcttaaacggatggcatttcttgcataatctgcgaaaacaaggaatgttccgccgtagggaatgaatcctccatgcacagcaagtccattcatgatggctgccatggcaaattccctcactccataataaaggtaatttccggaaaaattatgggccgtgatggctttgctgcctgaccagtcggtattattggaaccagtcaaatccgctgagccgccaaacatttccggtaatattggcgcgaaaaactctatgcattgctgcgatgctttacgcgttgctatggctttctcattgttcaggcattgttttaggaatccagccgatatttcttgccaatcatcgggcaggtcgccattggcacgacgcaaaaactcatcgtgttccgatggatattgtagccggtattcatgcaggagctgcagccattgttgctcttctttgtctccttgctctctatgatcccattgcttgtatatcgaatctggaatttcgaagggagcatgtttccaattaaaaaattcacggacattatttatgtcttgggcactcaatggagaaccgtgcgctttttcgctaccggctacagaggaacccagtcctatgacggttttacagataattaatgaaggttgagtcgtgttctcacgcgctgctgatatggcttgctcaatttgatctgcgtcgtggccatcgatgggccctatgacttgccagttgtaggctttaaagcgagacgtggtatcgtccgtaaaccaggattctaccttaccatcaatagatatcccattgtcgtcataaaatacaatgagttttcccaaaccaagagtgccagccagagaacatgcttcatgagaaatgccttccatcaggcatccatcgccggcaaaagtataagtataatgatcaacgaggttatagtgatcgtggttgaagtgactggccagtacacgctctgccaatgccatcccgactgaattggccaaaccttgacctaatggccctgttgttgtttcgacaccgggagtgtgcccatgttccggatgccctggtgtttttgagtgcaattggcggaaatttttaagctcgttaatatccaaattgtatccggtcaaatgcagtaacgaatagagaagcatggaaccatgtccattagataatacaaaacggtctctgttaaaccagtgcgggtttttggggttgaattttagaaattttttccataaaacggtggcaatatcagccatacccaagggcatgccagggtggcctgattgagcctggtttactgcatcgatgcttaacatgcgtactgcattagctaattctgtaaaactgttcatgcctactcttttgcatttaactgaggcactattgtcgctcagaaggcataaatcggcaagaagaccattcatttttagttgaaaataatgacaatattagagcaaaatgtaaatttaagtttaaatttttcctaatttttgacataatgatggagtttgattaatttttgcagcccagataaggtgacaggagcaaaaatttttgcaaagctggattagaaacacaatgatatgcggattatttatttcaaacaatcatgacaccgattattagtcatttattaaaaatatttccagagctgaatacgcaagttaaaactgattctttgaattggacttttagcacgcatctgaagcaattgggccctgatttttattcgaaaatagctcgtcttcatcccattctcaatatggaatacagcgtattgtgtcagcgcttaaggtataacctgtccgcgcctgattacagttctcctgagcaaatcaaggaacagctgattgatgcactcaaactggcagaacttttggaatatacctatcaacactacctggttgttccacgtgaagtagtgcgtttacgtcgccataaagccatatacagagaattattgacggaattgtccgggtattcttttgccttggataatccggagccggaatctctcaagacaagcttatcgttgacgcaggccattcgtgagaaaacggctcaatccaattggtatagaatttttatcagcagaagtaaacgagtcattaatcttttggataatttagacactggttcaaaggcatttcgtgattttgtcgtgctgcttgataaatacactaatccatttttggcttatttgggctggtgtttttttgcccccagattatttaccaatctctttttaattttaaagcacaccattccaggggaatggatgggcgaaaaagaaaaatcactggattggtccgatcgattttatgcccacctgcaacgacggtggtttgagctggccaatgatagcgtttggtttacagtcgggattctcaattgcttcgtgctggtgggcgctttggcacctctctctgtttatttgtctttgtttgcgtttgtctttgatgtcgccaacacaagcctgcgtgcttacatagagattggccgattacagcagttgcaaaaggaatatgccgaactcttcgaccaggaagaaaatgaagaccagaaaaagataattaaagagtatcaagactcaatcagttatcgcattaagtttgagattttgcgctcctttttatcggttggcggggcagtcgctgttgtgattgcaatggctttatcagttcctgctttgggtattataaatcctgtcatccccttgattggggcagtgcttttgctagcgctatggggcgtttcattatacttgaacaacaagttagatgaatacagacctgtcgataacattgaaaaacctgctccttccgttatcaataaattaagtttttttgcacccaaaaatgaaaaaaaagagagtctgcacctgtcttccaagccagaaaaggatcttgaggcagaggaattgattccaacgttcaccttttaattcattactgtactttgccatttcagcgccggcaaagtatagagactaattcaattgaatgttatgctttcaaaaaattacatgatggaaaggtataacatgtcgaccacagttggattgccacaatttagccatataaaaattgaacatttcaaatctcatcttgatgctttattaaaaaaccatcttgaggaaattgacaggctgcttaaggaaaatcaccactatacctgggataatttaatttatcctttagatagcctcgccgatgaactggagcgtttttggtctccttttgcacatatgcacgcagtgatggattctgaggcaatacgtgaatcctatgaaacgtgtttgccattgctgtctgcctatgatgctgcgattgggcataatcaagacttgtatgaggcgattaaatcgatagatcagcattcccttaaccctgcccagaaaaaaatcattgaagacagcatgcaggattttgagctatcgggagttgctttatccaaggcgaataaaaagcgctttgaagccattcaatcaagactggctgaattatccagcaaattcgaaaacaatgtgctggacgcaacccatgcctacactatccatattaccgaagcagaacgtgtggcaggattacctgagcatgcattaaatacggcaaaagagttggcgcatgagaaagggctggatggttttgttttaaccctcgaatacccttgttttcaggccgttattactcatgctgaagacagggctttacgtgaagaaatgtaccgtgcttacatcaccagagcttcagatcaaggccctaatgcaggaacctttgataatactccgctgattgatgaaattctgtccctgcgccatgaaaaagccgagcttttagggtttaataattttgctgagttatccctggctaccaagatggctgcctcgaccaatcaagtcactgaatttatctatgatttgatcagcagaactcgtgacaagggtaaagcggaatttaggcagcttgaagtgtttgcacaggataaatggaatctgagtccggtaaacccatgggacgttgcttatctgtctgaaaaaagaagacaggatttgtattccttatctcaagaggaattacggccttattttccacagcctaaagtgatgcaaggcttgttcgcgattgttaaaaagctctttggtatgagtatcgaggagattgagggcgtggatgtttggcataaggatgttcaatgctattgcatagtcgatgaatccaatcaaacgcgcgggtacatttacacggatttgtttgccagaccgcacaagcgcaatggtgcctggatggactccatgcaaagccgcagaaaactggaggatggcacagttcaattacccattgcgaccttgacttgcaattttgccaagccttctgcaaacagaccggccatgttatcgcacgatgaagtggtgactttatttcacgagtttggtcattgtctgcatcacgttttgactcaagtcgattaccttggcggctcagggattaatggcgtggaatgggatgcggtggaattacccagccaatttttcgaaaactggtgctgggatgagcacgcattgtctttactgacttcgcacgtggatacaggggaaaccttgccttccgcattgtacgagcgcttgattgccgctaaaaattttcaatccgccatggccatgttaagacaaatggaatttgccttgtttgattttcgcattcaccaggaatatcaaatcggtaaagcgtcctatgtcgcaaatattctggcggatgtacgttctaaaaccagtgttgtacccattgttccttataaccgctttcaacatagtttctcgcatatttttgggggtggttacgctgctggttattacagttacatgtgggcagaagtactatccagtgatgcctttgcgcgctttgaggaggaaggtattttcaaccccaaaactggacatgactttttgaaatccattttggaggcaggcggctcaagaaaagcagccgatgctttcgccgaattccgagggagacccgcgacgattgatgctttgctgcgccataacgggattttataaaaacaggacttgtgccccccaatcctctcggtaaaacattttttgccttgaccttgggattttttgtagatcctgaaaatatattcggtatgctggcgggattttgcttacacgccggcattttatgttataattaaagtgtacagaatggggggcgacctggcttcgacgtgggttgcaaaaccggaagtgcatgccgagaaggagatctctcgtaaataagactcaattaaatataaatgcaaacgatgaaaactttgctggtggggaagctatcgctgcctaataagcactttagttaaaccatcactgtgtactggccaataaacccagtatcccgttcgaccgagcccgcttatcggtatcgaatcaacggtcataagagataagctagcgtcctaatctatcccgggttatggcgcgaaactcagggaatcgctgtgtatcatcctgcccgtcggaggagccacagttaaattcaaaagacaaggctatgcatgtagagctaaaggcagaggacttgcggacgcgggttcgattcccgccgcctccaccaattatcaaaaccattcctgaccaccaaagaccatcataaacccttgtagaacaacgagttaaatccacttttctggttgatagggttgtcttttgtggttttctgttggctcaaaaatcacccaaaatatgcccaaaatttttgaaaaagtacccaatatctgcccaaaaagctagggcaagataatttaaaaaaacactaaaggacattacaaaatgaatgacaattatggtcaggtaatgaattacctgtgatgaatgatctggctaaaattctatcgttaaagaacttattaactaaaaacaatatcaatccatcagaaaattttgaaaatatttatagtcaaatcactgatgatggtttaaaaaaagaaatagagagtaggataatagattatttctcaaagctttcattaccagaacatgtaactatttacgatcaattgttattatcacttcgagaaaaagacgccatttcacattcaaatgggatctatttttatttgacgcatataaaagaaatagtgatattgtttcattgcctcagatatttttcttgcatggtaatgtaagaataggcgcttgtgaagcatgcgataaatggggagaaaaaaatacgtattgtcctgagtgtgatattagattcaaagatgtacctcttctttatccaattaaaaataagagttactttcagtcgagtaaatatactgccttaagttggaaaaaagcggagagttggttctctgaggcatttactataaccatatttggatatagtgctccaacctcagatatcgaggccgttagtcttttgaataaagtgtggcttcacatttcagaacgccaatttgaacatgttgaagtaattgatattcttatgtcgagctgaggtttttattaacaactgccccaatagagccaagttcactgctaaaaaacatgagccaaatttatttttagttatttttatcagtcctatttttgaaattccaaagtatcaagactatatttattttaacgaatcatacagctacaaggatgtagtaaatggaatcttctcagattttatcccctataggcatagatttgggcggcaaatttacaggggtttgcttatcccacctcgaagctttcgcagaactcccaaaccatgcaaatacaaaatactctgtcatcctgatagaccataacaactttcaattatcccaggcacaaagaagggcaacaaggcatagggtcagaaataaaaagaggaatcaatttgtaaaacgagttgccctgcaattattccaacacattctttcacgagatctaaatgcaaaggaagagacagcactctgtcactaccttaataaccgaggatacacttatgtagatacagatttggatgaatatataaaagacgagactacgattaatttattaaaggaattactgccctcagagtcagaacataatttcattgattggtttctgcaaaagatgcaatccagtgagtttaggaaaatattggtatctaaagtagaagaaaaaaaagatgataaagaattaaaaaatgctgtaaaaaacatcaaaaatttcattactggctttgaaaaaaacagtgttgaaggccatagacaccggaaagtgtattttgaaaacatcaaatcatacatcacaaaagataaccaacttgatagcataaaaaagaaaatcccttctgtttgtctctctaacctgcttggacacctaagtaacttgcagtggaaaaacctgcaccgctatctggcaaaaaaccccaaacaattcgatgaacaaacttttggtaatgaatttcttagaatgcttaaaaacttcagacatcttaaaggaagccaagaatctttagccgttcgcaacctaatacaacaacttgagcaatcccaagactatatatccattcttgaaaagacaccacctgaaattactattcccccctatgaggcccgaacaaacacaggtatggaaaaagaccaaagtctattacttaaccctgaaaaacttaataacctttatccaaactggcgcaatttaataccaggaatcattgatgcccaccctttccttgaaaaggacttagaacataccaaattgcgtgatagaaaacgcataattagcccgtctaaacaagatgagaaacgagactcttacattttacagcgatatttagacctcaataaaaaaatcgataaatttaaaattaaaaagcaactctcgtttcttggccaggggaaacaactaccagccaatttaatagaaacacagaaggaaatggaaactcatttcaactcttcattagtgagtgttcttatccaaatagccagtgcttataacaaagagagagaagatgctgcccaagggatttggtttgataatgcattcagtctttgtgagctatcgaatattaatccaccacgcaaacaaaaaatactaccacttcttgttggagcgatactcagcgaagatttcatcaacaacaaagataagtgggctaaattcaagattttttggaacacccataaaatcggacgcacttcattaaaaagcaaatgtaaggaaatcgaagaagcacgtaaaaactcaggtaacgcatttaaaattgattatgaagaagccctaaaccatcctgaacatagcaacaataaagctctcatcaagataattcaaacaataccagatatcattcaggccatacaaagtcatcttggacataatgactcgcaggccttgatatatcacaacccatttagtctttcgcagttgtatacaatccttgaaaccaagcgagatggttttcataaaaattgtgtagcggttacttgtgagaactattggagatctcaaaaaacagaaattgaccccgagatttcatatgcttcaaggttgcctgccgacagcgtaaggccttttgatggtgtactggccaggatgatgcaacgcctggcttatgaaattgcaatggccaaatgggaacaaataaaacacattcccgataactcaagccttttaattccgatctaccttgaacaaaaccgttttgaatttgaagagtccttcaaaaaaatcaaagggagcagcagtgataagactcttgaacaagccatcgaaaagcaaaacatccagtgggaagagaaatttcaacgcattattaatgcctccatgaatatttgtccatataagggcgcatcaataggcgggcaaggagaaattgaccatatttatccgcgctcgctttcaaaaaaacattttggagtaatttttaatagcgaagtcaatctcatttactgttcttcccaaggaaatcgagagaaaaaagaggaacattatcttcttgaacatctaagcccactttatttaaagcaccaatttggcactgataatgttagcgacatcaaaaattttatttctcaaaacgttgccaacattaaaaaatatattagttttcatttgcttacgcctgaacagcaaaaagcggctaggcatgccctctttctagattatgacgatgaagcattcaaaacgatcactaagtttttaatgtcccaacaaaaagcgcgtgtcaatggaacccaaaaatttttaggaaaacaaatcatggagtttcttagcaccttggcggattccaaacagctccaattggaattttccataaaacaaatcactgccgaagaagtacacgatcatcgtgagttattgtccaaacaggaaccaaaattagtcaaaagtcggcaacaatcgttcccaagccatgcgatagatgcaacgttgacaatgagcataggtcttaaagagttcccgcaatttagtcaggaacttgataattcctggttcatcaaccacctaatgcctgatgaggtacatttaaatcccgttcgatccaaagaaaaatacaacaaacccaacatcagcagcacaccgctgtttaaggattctctttatgccgaacgattcatccctgtttgggttaaaggcgaaacatttgctattggtttctcagaaaaagatttgtttgaaataaagccatccaataaggaaaaattgtttacccttcttaaaacctattccactaaaaatcctggcgaatcgttacaggaattacaggcaaaatccaaagccaagtggttgtatttccctataaataaaactcttgctcttgaattcttacatcattatttccataaagaaatagtcacaccagatgacacaaccgtttgccatttcataaatagcctacgttactacactaaaaaggaatccattactgtgaagatattaaaagagcctatgcctgttctgagcgtaaaattcgaatcttccaagaaaaatgttttaggctcttttaaacatacaattgctttgccagctaccaaagattgggagagactctttaaccatccaaactttcttgcactaaaagccaaccctgcccccaacccaaaagagtttaacgaatttatcaggaagtattttctttctgacaataacccaaattcggacattccaaacaatggacacaacattaagccacaaaagcacaaagccgttcgaaaagtattctcactgccagtaatacctggtaatgcaggcaccatgatgcgtataaggcgcaaagataataaaggacaacccttataccaactgcagaccattgatgacacccctagtatgggaattcaaattaacgaagacaggctagtcaaacaagaagtacttatggatgcttataaaaccagaaatttatcaacaattgacggaattaataactccgagggacaagcgtatgctactttcgataattggctaactctgcctgtttcaaccttcaaaccagaaattataaaactcgaaatgaagccccactccaaaaccaggcgctatatacgaattacccaatctttagctgattttattaaaaccattgacgaggctttaatgattaaaccctccgattcaattgatgatcccttaaacatgcccaatgaaattgtttgtaaaaacaaattattcggtaatgaattaaaaccacgtgatgggaaaatgaaaattgtatcaactggaaaaattgtgacttatgagtttgaatccgattccacaccccaatggatacagacactctatgtcactcaactgaaaaaacaaccatgaaacacctcacgctctctgaacaaggcagcttttgtaagttgcaaggcgaaagaatccttgtctttaataaagatcaaatggtttttgaaggaacgctcaaccgtttaaaaaccataagcatcgtcaagcaaggcgtcactttgacctcaaatcttcttgttgcctgcgcaatgagaggaatacaaattttcattctggattattcgggtaaagcagtttgtagccttcagggtggactccatcgcacagccaaagtacgggaaagccagttcaaatacatatacaccaaagaagcatccaacatggctgctcgattcattttagcaaaaattaaaaaacagtccgccgttctgaaatactttgcaaaagctaaaaaccggcctgaaaatgagaaaataattcttcatgcagcatcccagaaaatggcaggtattgttgccaatattacagagacaaattggataaaacttcaggattggcggttcacgctactcggatttgaaggaagtgctgccagaatatattgggaaacagttaaagaggtcaatttggtgtgcagtgatttcgaagggaggcgcccaagggtaaacaaagacattacaaattccatgttaaattatgcctactcgattttgtccagttgggtatggcaggccataactaacgctggattagagctatatgctggaattttacatacctccaaaccagggaaaccatcgttagtactcgatctcatggaagaatttcgaccctggtgcgccgatagaattatttttaaactccacgcccgtgcccaaaaacagaatgaactaacccccgctttgaaaaaaacgctaattggtgagatggcaaatttatacgcaaagccactgccataccacaaacgaagaatatcccttgaaagcatcattcaaagacaagtctatcacctatcagctgtattctcaggcgagggaaagtataaaggctacttatttaaatggtaatgaaaaatgcaaataagattatacaaggaatacatagtttcctacgacatcagggacaacagcatccgacgtacaatttacgaaaggcttaaagacattggcttaacccccgttcaaaaatcagtattttggggatatttaaacgaacctgaaaaaagatatttaacgaactttctaaaaaaagaacttgccaaacaagataccgcttttattacaccttgcaagctggctcaagaatacgaagtaaacctcattaatcttgaactggatgaacttaggaaaccggatggacacatcatcgtataaactgcctgtaaatatgataagacagtactgcttttgtccccgcattgtttactaccatatggtggttggcctgaaagtagcctaccctggctgggtgcaatacggtgaggaatatcaacacaagcaacaggtattagacaaaagaagaaccctttcaaaattcaagccaatttcagaacaagctgtactcagacaaaatactatgcttgagcacccatcttacccattttatgggatttgtgatggaatcattgaagatgagctggaaattatccctattgaattaaaatcttttgcatcaaaaattagtttaggtcaaaagatgcaactgaccgcctatggaatgctttccgaactgatttttgaaaaaccatgtaccagaggctatattattactggtgaaaaggccaaagccaaattaataaaaattgacgaaaaatcaaagttcaaagtgattgaaatttgtgctaaaataaagaaaatttttggcacagaaacattaccatacagcactgctaatggacttcaatgcattcagtgtgagtttctaaatcactgtaacgatagattttgaaatcgttatatgctcgctattaagacgagcatagaaaaacgattcaatctttaattttgttgatttcagggtatcgaaatttagatgatttctaatttaattattgccttctttttcgaaaaatcaagcctaaataatgcaatttgctatttttcgaagaaaaccacttttaattcctcgtgtttctttaaaataaacaaagagttaaaattgccccaataatccctcatctaaaaatccaaccactgaaactagatataaaaagattaaatcttctagcgcacatccaataatccctcatctaaaaatccaaccactgaaactcactactcctgaaggttataatttttgctataaccaataatccctcatctaaaaatccaaccactgaaacttcgaatacaatcctagtgtctctgtgtgaattaagccaataatccctcatctaaaaatccaaccactgaaaccaggcactggttcactagacactgtaacatctatccaataatccctcatctaaaaatccaaccactgaaacctaccagttaatcgtaactcaatctctttttcaaccaataatccctcatctaaaaatccaaccactgaaacatagaatacataagtgcaaattattaaatgttacccaataatccctcatctaaaaatccaaccactgaaactgaatgtagaaaccagatgccacgaattattagaccaataatccctcatctaaaaatccaaccactgaaactttgtataaacgttctgatatgacttaggtaatctccaataatccctcatctaaaaatccaaccactgaaacctaacctgattgctcaacaaataatgctattggcccaataatccctcatctaaaaatccaaccactgaaactcactttaggccaacgccgatcctccgcttcgaaccaataatccctcatctaaaaatccaaccactgaaacctcacatcttaccctcagggcggatattgtgaatcccaataatccctcatctaaaaatccaaccactgaaacattaataatattttagaagattggcacataataccaataatccctcatctaaaaatccaaccactgaaactgacgcaaaggatttattaaaaacgccttgtaatccaataatccctcatctaaaaatccaaccactgaaacattttaccttttaacacatattgataggcgtccaataatccctcatctaaaaatccaaccactgaaactccataactgaaacgtccttatgcctcaacataatgccaataatccctcatctaaaaatccaaccactgaaacctattgcaagctagtttgatcgtgttattataagaaccaataatccctcatctaaaaatccaaccactgaaactgacaaacgtttgttttttagacacaacactaaaagccaataatccctcatctaaaaatccaaccactgaaaccctgaaaacccgccacaacccgcgccagacttgaaccaataatccctcatctaaaaatccaaccactgaaacaccaagtcgaaacaacataccgagaccgtgttgaccaataatccctcatctaaaaatccaaccactgaaactacattgttacgttcatttcactcagtttttcataccaataatccctcatctaaaaatccaaccactgaaacagcaataacccaaagtttcgcgcgcgtgcgcgggccaataatccctcatctaaaaatccaaccactgaaacttataacatcgggatggcggtttattggttaagtaacccaataatccctcatctaaaaatccaaccactgaaacttcttttttcagatttcatttccttttccttgtgccaataatccctcatctaaaaatccaaccactgaaactttttatcgtaagcttgattaactagacatctactaccaataatccctcatctaaaaatccaaccactgaaacgttttaatttaatcattattgcttccttattaaccaataatccctcatctaaaaatccaaccactgaaactaagatattggtcgattgtttgcaagacgtcatcaaaccaataatccctcatctaaaaatccaaccactgaaacctaaatcagcagtcatcaaaacccatatgattgtccaataatccctcatctaaaaatccaaccactgaaacttctcagaatgggaacgttacacatcatattccaataatccctcatctaaaaatccaaccactgaaacttaagtatacgtttctttgggctattagttctaaccaataatccctcatctaaaaatccaaccactgaaacttctcatattttaaaacaatagagtaattcattttaccaataatccctcatctaaaaatccaaccactgaaacaatcttaatttatgcgccttaccttctgcttcatcccaataatccctcatctaaaaatccaaccactgaaactatacttagacaatatcatcatttcctatgtttcgaccaataatccctcatctaaaaatccaaccactgaaacgctattccagataggtagttgtttagagcattttgtccaataatccctcatctaaaaatccaaccactgaaacttcgatactccttagcggtacttgctaaagtagttccaataatccctcatctaaaaatccaaccactgaaacaaataattcttgtgactcacgtgccgccatttgaaccaataatccctcatctaaaaatccaaccactgaaactaggaattgattggggtaacgccatcgccatagaagccaataatccctcatctaaaaatccaaccactgaaacttacttcatgacccggacattttactaaaaaattcaataatccctcatctaaaaatccaaccactgaaactcctataccttgtcacaatttcctcatatggctcccaataatccctcatctaaaaatccaaccactgaaaccataattgggaattggtgtgaaatgctcaccgtccgccaataatccctcatctaaaaatccaaccactgaaacttaattgcgccagaaacagcaccatttatggttacagcccaataatccctcatctaaaaatttaactaatgaaatactccatactttattctctgtatactattatagtaaaaatccatggggtattattttatataattaaacagaatttaattttgttgtattttaatttcttcgacaaacatcagaaaatataatcggtcatttttaccaattatttgtaaatgttagatgcagttttaggggcacaataggtcatatttggttatatttgctttttttcatcttatttattttataattaacttgataattataaagtgctattttactctgttgctttttctgacaatacctgtctttacagattatctttgtaacaaattttcttaatttaacctcagctcgatataagaataaggttatgtgattgatgattcaaaagccaaaccgcaagtcaaattagtacgcggtcaacttcaaattattgcatcaaggaatatagaacatagacggcagctgttgtcagattggtataagcagaaagcttttgaagtttttagcaaaaggttagatcaacttctatcaacagccccttggataaaagaatgtccttcgataaatttaagagcgatgcgttcccggtggggtagctgtgcggttaatgggaaaataacacttaatactcaccttattaaagcaccgatagcatgtattgattacgtgatactccacgagctatgtcaccattttgaacataatcacagcgataagttttatcgtctattaaatcaggttagccccaactggaagcaggtaaaacaatatctcgataaagcggccaatttatatcttatgacttaactttgggagacttataacatctaagattctgaactaaaacaccgataatcttaacgttaatatcatcacttaccttaatatttggccaattatcatttagtgttaacagttcaaattctgaagaagtataagataattttttatactgacatatgatcgtttctggcttaccattgattttaactgctacaaaatcacccggttctggcaaaacagaaggctcaatcaccaagacatcgttgattctaatttcaggcatcatactgtcatctgttattttcaaggcaaatgcatccgtgcttaattctggttgtaaagacgtactcacagaaataaaaaccttatcgccagatgactccgcaccagtatgcaatgaagcctcacaagcctgccgataatccaaaagcggtattaactgactaggatttttcgcttccttgaactgcagctcatccgacaaacacatcaaataagcaggcgaaacatccagtgcccttgccagcgattttatctcttcaggccccggagtacgaacaccctgttcccaatttgttaggcgcgtttgtttcaaccccccagcaagctcgccaagagcctttaaagtcaaaccttttgccttccgtgcctcaagaatacgtttgccaatttcctttttgatattcagttcagtcaaatttacccctaaaaatgagagttaactattgcaatatcactcttggtgatataaattagttataaattcacatattgtgaataataatcttttatttttataaagatatcacattatggaaataaaaacgaggatgaatagggatattacccatgatggattttgtgattaatggtgatgagttagaggcaatgagtgggttaccccatttccagcaactaacttatttaagagggatacgaccttatatggacgttaaaaccggaatagtcggcatcaaaaggcgcatcagtcatcagtctatttctgagcagctttatgttgaaccgcatcaaggcataaaaagccagaatttttcgcgtgatcaggttcggcgttcggtttcaggattggttcgtgctggcttaatcgaagtgcaatccgaagggatgcatctgattttaaaatgtcttttggcttcatcgcattattctgcccaaaataaagccgccataaacccgccacagaaagccaccataaagccgcgcggggaatcccttgaaaatactgggctaaccgagtttgaggcactaaaagccgacacagtagaatcccaaaaagccgccatacctcataaagataattattatatttatttattatcgcaattcgaaaaattttggtcgctttatcccgagaaaaaatcaaagaacaacgcacaagccgtatttgaagagctaaagcctaatgctgaactgtgccataccatcatcaacgcactgacagcccaaattaattatcgtgacaccatgaaactacaaggcacttgggtgccaccttggaaatacccagcaaattggcttgctcaacgctgctgggaggatgaattacctacggatgcattacaggagaagaaccatgcagagcatacaaaaaatactcgtaaacgtcacgccacagaagacctgttctgcccaccctgtgatgtcaaagaccgagagcacaacaatgtcatccagctccaaagataccttcaaagctgagagacgtattgatttgctgttctccaaatttgctgccttttatggccatgtttggagaagtcagtttaaggatgaagtgtttttgaaatttgccaaaaaagaatggcaagaagcattggctgattttactgatatggtactgaccagggcaattttgaattgccgtgagttttatgaattaccgcctacgctgccgcaattgttgtattgctgcagacaaatcaggaaacaagagtcattttatgtggtcaaggatgtgtatcaacctgcaaacaaagccgttgtgagttcctgtttgcagaagtgcaaggaacttttagcaaaataactggagaacatcatgttggttttaacacgaaaagcagggcaacagattttaataggcaagggcttgattcaaatgaaggtattgaaagtagaaaacgacatcatcagcattgggataaaggccccatcgcacatcgatatcgacagagaggaaatttattttcgtaaactgcgacaagaacaagaagcagccaacgatgcggagatggcgatatgaaaacggacaaacaactgagcaaaagagcctttcaaaaaatcagaaccttgtattggggaactgtttgtttgtgcgcgccttccgtctcttctgcgcaaaacattgaaagcatcattaaccgaaccatcaattacttgcaaggaggccttgcacgaaccgttggcgttttttgcatcatcattgcaggttacctgtgtttggcacgtcaaaaatttcctaaagaatattttgtgatgattctggtaggaatggggatcatttttggcggctcttccctgtattcaacactcattggataggagattcttgtgagcgatttggaaataagccccatattcaatgcgctgacccgtccggcaatgacggctggtgtgacctttgaataccatatgttaaacctcattgtctcaatgtgcgcctttattggattctccccactgtacgggataatttttattccactgcatgtttttggatggctagtgtgtcgatacgacacccacttttttaccatctgcgcaaagcgtttcttattgccacaagctcccaatacgtcattatggagggttcgcgcttatgaacctttctaagacattaaagcacgtttatcaggaagcaaaagtgtctaatttgtttcctgtaacgcatcttaatagcccctgcatctttgagtcgcaatcaggcttggttgggtcggtgattaaggtgaatggtgcggcttttgaaatcgaagaagctgagactctaaatcaccaacgcttcttgctccatcaggcattagtgagtttggattcgcgtttcattatttatgtgaccacgcaccgacaaaaaatatcatgccctttgattggggaatttaagccaggatttgccaaggatctggatgagcgttatcaacaacgatttaaagataaaaacctgtataaaaataccctgtacattactgttgtacttaaaggggatgacaccagtaaaacaggatcttggttgcagtgggcaaaaagcctctcgatgaagggaaacagtgagcttgctgaacaccatagagaacaaaacatccaaatcctaaatcgtgctgttgagcaattgcatacgaacctcaactcttttggggcatcgatactcggcatgcaggatgaggaattaggttttagcgagctgcttcaattccttgggttggttgtcaatgcaggccaaacagcgtcattcaaacatcctgtgtacagcccaccaatagcgaactcgatccctcagaccttcaaacaagaggccaaataccccgaaggacacctcggccaatatttaagtagctgtcagcttttatttggagagtgcatccagtttcagggaaatactcaacaggattgtctatttggtgcgatgctgtcactcaaaaaataccccaccaacaccgccagtatcctcttggactccatgttatcgctggattgtgaatttattgccacccacacttttgcccccattggccgtgacagtgccttggatacgatttctaaaaaacgctccaaacttttaaatgccgaggacaaggcattaagccaaaccactgcactaaccgatttggaagatggaattgccagtgaaaccctgttgctaggtgcacatcatcacaccgtgatgttattggcaccaaacaagtcgttattggatgcagccatactggaagccaccaaacggtatggagctactggagttgttgtggtgaaagaaacactaggacaagagcccgctttctggagccaattgccgtgcaaccagcattttataacgcgagcctccctgattacctctcaaaattttgtggacttttgcccattacacaacactcaaacgagcttttccaatgagaactttttaggtggcgcggttaccttacttgaaaccccatcgaaaacaccagtctatttcaactaccatgcacgaggctctaaaaccaacccctccaaaggacacgccgccatt

SEQ ID NO: 149 - DNA, 17425 bp, synthetic construct
  misc_feature 1..17425: note = Synthetic
  variation 12903..13050: note = n is a, c, g, or t
  variation 15706..15838: note = n is a, c, g, or t
  source 1..17425: mol_type = other DNA
  variation 987..1127: note = n is a, c, g, or t
  variation 14445..14575: note = n is a, c, g, or t
cggaaatctcgataacttccaattcaattaacccatcattaatcagcagatgatcaccaatactgagttcactggccaaattaggataagcaactgatacgccatttatatcacccagggtatctggggccatacaatccaatgtaaaattttgcccatcaattaaagtgatggatttgttttgaaaacggccgactcttattttaggcccttgtaagtcagccatgactgcaaccgggtggtttaattcatctgcgattttacgaaccagcgcaattaattgcagcgcggaggaatcagcatgagaaaagttaattcgtactacgttgactccagcagccagcatggatcgcagaatttcaggttccttactggctgggcctaaagtggcaacaatcttagttcgtcttaacatgttttgcgcgctcctgcaaaatagcaacagcaggcaaggtttttccttccagacattccagaaatgccccacctcctgtggaaatataagaaatttgttgattcaaatcataaaggtcaacagcggccaaggtatcaccaccaccagcaatagaaaaggcatcactctcggcaatagctatggcgatggctcttgttccataagcaaactgcgggaattcgaatacgccaaccggaccattccagatgatggtattggcttcatggatgagatctacataatctcttatggtttctggtccaatgtcaagaatcatatcgtcctcagccacattagacagagacttgttgaaagcagggcaggtttcactaaatgttttgcctactacaacgtcggtgggtagaggaatttggcaacccttttctttggccagaataaggatatggcgagcctcatctaataaatcaggttcgtaaagggaaataccaatttcaaacccctgggctttcagaaaagtattggcgatacctccgccagggatgagaacatcgaccatacccactaattgtttnnnnnnnnnnnnnnnnnnnnnnnnnnnnnnnnnnnnnnnnnnnnnnnnnnnnnnnnnnnnnnnnnnnnnnnnnnnnnnnnnnnnnnnnnnnnnnnnnnnnnnnnnnnnnnnnnnnnnnnnnnnnnnnnnnnnnnnnnnnnnagcatattgagcgacaccataggtagaagcttgtgccctgtgtgccgtgccaaaagcatccatgacaaagacatcacaaaggtttgccagtttttttgccaaagcttcgtcattggctttttcaccgggattaaatcggacattttcgcaaacgaccaattccccaggttttacatccacaccactcagataatctttgacgaagcggacgggatattccaggtttttccttaaataatcagcaacaggttccaaagagaattttttttcgtatttgccttcttccggacgcccaagatgggacaatacgattactgctgcgccattgtccaaagcggatttgattgtaggcagggccgcttgcaatctttgatcactggtaatcatgccgtctttgatcgggacatttaaatcctcacgaatcagaactcttttgccagacagatcaatgtcgctcattttaatcaggttcattggttatcctttagcagttcatcatttggtgtgcggtatcaatcatgcggttagagaaaccccattcattgtcataccaggctactactttgaccaaactgcctatcactttggtttctgttgtgtcgaaaatagcggaagcggggttgtgattgaagtcacaagaaactaaaggatcttcattaatttgtaaaattcggcttttagccttgcgcatgatgtcattgacttcttccacagaagttgcgcgctttgcctggaaagttaaatcaacaacggatacgtttaataccggtactcgcattgcaaatccgtccaatttccctgccagttcaggtaaaactaatccaacggctgcggcagcgccagttttggttggaatgatggactgcgttgcagagcgggcacgtcgtaaatctttatggcttccatccaaaagcatttgatcttttgtgtaagcatggacagtgttgactaagccggattcaattcctatagcatcatttaatactttaactactggcgccaggcagtttgttgtacaggaagcgttagatacaatgacatcagacgctttgatgaccgagtgattaactccatagaccactgtcgtatcaacgcctttggccggagcagatattaatacttttttggcgccggcattaatatgacccattgccgcatctctgctggtaaagaaaccggtgcattcaaagacgatatcaatgtccaattgtttccatggcagtttggccggatcacgctcagcaatcacttgaatgccatgcccatcaacaatcagcatgtttccttctatgctaacatctgagcgaaaaggaccgtgagttgaatcgtagcgagtcaggtgagcggtcacatcgatgccagataaatcgttaatggcaacgacttcaaactcattttgcctgttgtattcaaaaatcgatcttaaaatgcaacggccaatgcggccatagccattaatcgcgactcgtattgtcatactgcttctccaagttagggtaacctccatactcagttatactgaatacaggccttcttgaaatttcagaagggtatgggttacaccattgtttgtttggttaatgtatctagagtattgataattttttctactgtaattccaaggtaattaaaagcatctgtagcaggagctgataccccaaaacaatccagcccaatgacagcgccgtcaaagccaacaaattggtgccaataggcactgctagctgcttctatcgcaatacgtgtgcgtacctgaccaggtaatacctggtttttgtaagcatcactctgggcaaggaatcgctcagcgcagggcatggataccaccctgacctggagacctcttgcttttgccttttctgctgcggttatagccagttgaacctctgaaccagtggctatcaggatagcatcaggcttcccttcacaatctgcaataatatatccacctttcttaatcaagtcagccgcatcggtgccatgggctaaagcgggcagattttgtcgtgagagtaacaaagcagaaggtccgttatgatgttctaacgattgttgccatgcaacagcggtttccatcaaatcagcagggcgccagactgtcatgccaggggtcattcttaacatagcgatatgttctataggttggtgtgtcgggccatcttcccctaaaccgatagaatcatgagtcaatacgtatatcactctttgtttcattaaagcgcttaaacggatggcatttcttgcataatctgcgaaaacaaggaatgttccgccgtagggaatgaatcctccatgcacagcaagtccattcatgatggctgccatggcaaattccctcactccataataaaggtaatttccggaaaaattatgggccgtgatggctttgctgcctgaccagtcggtattattggaaccagtcaaatccgctgagccgccaaacatttccggtaatattggcgcgaaaaactctatgcattgctgcgatgctttacgcgttgctatggctttctcattgttcaggcattgttttaggaatccagccgatatttcttgccaatcatcgggcaggtcgccattggcacgacgcaaaaactcatcgtgttccgatggatattgtagccggtattcatgcaggagctgcagccattgttgctcttctttgtctccttgctctctatgatcccattgcttgtatatcgaatctggaatttcgaagggagcatgtttccaattaaaaaattcacggacattatttatgtcttgggcactcaatggagaaccgtgcgctttttcgctaccggctacagaggaacccagtcctatgacggttttacagataattaatgaaggttgagtcgtgttctcacgcgctgctgatatggcttgctcaatttgatctgcgtcgtggccatcgatgggccctatgacttgccagttgtaggctttaaagcgagacgtggtatcgtccgtaaaccaggattctaccttaccatcaatagatatcccattgtcgtcataaaatacaatgagttttcccaaaccaagagtgccagccagagaacatgcttcatgagaaatgccttccatcaggcatccatcgccggcaaaagtataagtataatgatcaacgaggttatagtgatcgtggttgaagtgactggccagtacacgctctgccaatgccatcccgactgaattggccaaaccttgacctaatggccctgttgttgtttcgacaccgggagtgtgcccatgttccggatgccctggtgtttttgagtgcaattggcggaaatttttaagctcgttaatatccaaattgtatccggtcaaatgcagtaacgaatagagaagcatggaaccatgtccattagataatacaaaacggtctctgttaaaccagtgcgggtttttggggttgaattttagaaattttttccataaaacggtggcaatatcagccatacccaagggcatgccagggtggcctgattgagcctggtttactgcatcgatgcttaacatgcgtactgcattagctaattctgtaaaactgttcatgcctactcttttgcatttaactgaggcactattgtcgctcagaaggcataaatcggcaagaagaccattcatttttagttgaaaataatgacaatattagagcaaaatgtaaatttaagtttaaatttttcctaatttttgacataatgatggagtttgattaatttttgcagcccagataaggtgacaggagcaaaaatttttgcaaagctggattagaaacacaatgatatgcggattatttatttcaaacaatcatgacaccgattattagtcatttattaaaaatatttccagagctgaatacgcaagttaaaactgattctttgaattggacttttagcacgcatctgaagcaattgggccctgatttttattcgaaaatagctcgtcttcatcccattctcaatatggaatacagcgtattgtgtcagcgcttaaggtataacctgtccgcgcctgattacagttctcctgagcaaatcaaggaacagctgattgatgcactcaaactggcagaacttttggaatatacctatcaacactacctggttgttccacgtgaagtagtgcgtttacgtcgccataaagccatatacagagaattattgacggaattgtccgggtattcttttgccttggataatccggagccggaatctctcaagacaagcttatcgttgacgcaggccattcgtgagaaaacggctcaatccaattggtatagaatttttatcagcagaagtaaacgagtcattaatcttttggataatttagacactggttcaaaggcatttcgtgattttgtcgtgctgcttgataaatacactaatccatttttggcttatttgggctggtgtttttttgcccccagattatttaccaatctctttttaattttaaagcacaccattccaggggaatggatgggcgaaaaagaaaaatcactggattggtccgatcgattttatgcccacctgcaacgacggtggtttgagctggccaatgatagcgtttggtttacagtcgggattctcaattgcttcgtgctggtgggcgctttggcacctctctctgtttatttgtctttgtttgcgtttgtctttgatgtcgccaacacaagcctgcgtgcttacatagagattggccgattacagcagttgcaaaaggaatatgccgaactcttcgaccaggaagaaaatgaagaccagaaaaagataattaaagagtatcaagactcaatcagttatcgcattaagtttgagattttgcgctcctttttatcggttggcggggcagtcgctgttgtgattgcaatggctttatcagttcctgctttgggtattataaatcctgtcatccccttgattggggcagtgcttttgctagcgctatggggcgtttcattatacttgaacaacaagttagatgaatacagacctgtcgataacattgaaaaacctgctccttccgttatcaataaattaagtttttttgcacccaaaaatgaaaaaaaagagagtctgcacctgtcttccaagccagaaaaggatcttgaggcagaggaattgattccaacgttcaccttttaattcattactgtactttgccatttcagcgccggcaaagtatagagactaattcaattgaatgttatgctttcaaaaaattacatgatggaaaggtataacatgtcgaccacagttggattgccacaatttagccatataaaaattgaacatttcaaatctcatcttgatgctttattaaaaaaccatcttgaggaaattgacaggctgcttaaggaaaatcaccactatacctgggataatttaatttatcctttagatagcctcgccgatgaactggagcgtttttggtctccttttgcacatatgcacgcagtgatggattctgaggcaatacgtgaatcctatgaaacgtgtttgccattgctgtctgcctatgatgctgcgattgggcataatcaagacttgtatgaggcgattaaatcgatagatcagcattcccttaaccctgcccagaaaaaaatcattgaagacagcatgcaggattttgagctatcgggagttgctttatccaaggcgaataaaaagcgctttgaagccattcaatcaagactggctgaattatccagcaaattcgaaaacaatgtgctggacgcaacccatgcctacactatccatattaccgaagcagaacgtgtggcaggattacctgagcatgcattaaatacggcaaaagagttggcgcatgagaaagggctggatggttttgttttaaccctcgaatacccttgttttcaggccgttattactcatgctgaagacagggctttacgtgaagaaatgtaccgtgcttacatcaccagagcttcagatcaaggccctaatgcaggaacctttgataatactccgctgattgatgaaattctgtccctgcgccatgaaaaagccgagcttttagggtttaataattttgctgagttatccctggctaccaagatggctgcctcgaccaatcaagtcactgaatttatctatgatttgatcagcagaactcgtgacaagggtaaagcggaatttaggcagcttgaagtgtttgcacaggataaatggaatctgagtccggtaaacccatgggacgttgcttatctgtctgaaaaaagaagacaggatttgtattccttatctcaagaggaattacggccttattttccacagcctaaagtgatgcaaggcttgttcgcgattgttaaaaagctctttggtatgagtatcgaggagattgagggcgtggatgtttggcataaggatgttcaatgctattgcatagtcgatgaatccaatcaaacgcgcgggtacatttacacggatttgtttgccagaccgcacaagcgcaatggtgcctggatggactccatgcaaagccgcagaaaactggaggatggcacagttcaattacccattgcgaccttgacttgcaattttgccaagccttctgcaaacagaccggccatgttatcgcacgatgaagtggtgactttatttcacgagtttggtcattgtctgcatcacgttttgactcaagtcgattaccttggcggctcagggattaatggcgtggaatgggatgcggtggaattacccagccaatttttcgaaaactggtgctgggatgagcacgcattgtctttactgacttcgcacgtggatacaggggaaaccttgccttccgcattgtacgagcgcttgattgccgctaaaaattttcaatccgccatggccatgttaagacaaatggaatttgccttgtttgattttcgcattcaccaggaatatcaaatcggtaaagcgtcctatgtcgcaaatattctggcggatgtacgttctaaaaccagtgttgtacccattgttccttataaccgctttcaacatagtttctcgcatatttttgggggtggttacgctgctggttattacagttacatgtgggcagaagtactatccagtgatgcctttgcgcgctttgaggaggaaggtattttcaaccccaaaactggacatgactttttgaaatccattttggaggcaggcggctcaagaaaagcagccgatgctttcgccgaattccgagggagacccgcgacgattgatgctttgctgcgccataacgggattttataaaaacaggacttgtgccccccaatcctctcggtaaaacattttttgccttgaccttgggattttttgtagatcctgaaaatatattcggtatgctggcgggattttgcttacacgccggcattttatgttataattaaagtgtacagaatggggggcgacctggcttcgacgtgggttgcaaaaccggaagtgcatgccgagaaggagatctctcgtaaataagactcaattaaatataaatgcaaacgatgaaaactttgctggtggggaagctatcgctgcctaataagcactttagttaaaccatcactgtgtactggccaataaacccagtatcccgttcgaccgagcccgcttatcggtatcgaatcaacggtcataagagataagctagcgtcctaatctatcccgggttatggcgcgaaactcagggaatcgctgtgtatcatcctgcccgtcggaggagccacagttaaattcaaaagacaaggctatgcatgtagagctaaaggcagaggacttgcggacgcgggttcgattcccgccgcctccaccaattatcaaaaccattcctgaccaccaaagaccatcataaacccttgtagaacaacgagttaaatccacttttctggttgatagggttgtcttttgtggttttctgttggctcaaaaatcacccaaaatatgcccaaaatttttgaaaaagtacccaatatctgcccaaaaagctagggcaagataatttaaaaaaacactaaaggacattacaaaatgaatgacaattatggtcaggtaatgaattacctgtgatgaatgatctggctaaaattctatcgttaaagaacttattaactaaaaacaatatcaatccatcagaaaattttgaaaatatttatagtcaaatcactgatgatggtttaaaaaaagaaatagagagtaggataatagattatttctcaaagctttcattaccagaacatgtaactatttacgatcaattgttattatcacttcgagaaaaagacgccatttcacattcaaatgggatctatttttatttgacgcatataaaagaaatagtgatattgtttcattgcctcagatatttttcttgcatggtaatgtaagaataggcgcttgtgaagcatgcgataaatggggagaaaaaaatacgtattgtcctgagtgtgatattagattcaaagatgtacctcttctttatccaattaaaaataagagttactttcagtcgagtaaatatactgccttaagttggaaaaaagcggagagttggttctctgaggcatttactataaccatatttggatatagtgctccaacctcagatatcgaggccgttagtcttttgaataaagtgtggcttcacatttcagaacgccaatttgaacatgttgaagtaattgatattcttatgtcgagctgaggtttttattaacaactgccccaatagagccaagttcactgctaaaaaacatgagccaaatttatttttagttatttttatcagtcctatttttgaaattccaaagtatcaagactatatttattttaacgaatcatacagctacaaggatgtagtaaatggaatcttctcagattttatcccctataggcatagatttgggcggcaaatttacaggggtttgcttatcccacctcgaagctttcgcagaactcccaaaccatgcaaatacaaaatactctgtcatcctgatagaccataacaactttcaattatcccaggcacaaagaagggcaacaaggcatagggtcagaaataaaaagaggaatcaatttgtaaaacgagttgccctgcaattattccaacacattctttcacgagatctaaatgcaaaggaagagacagcactctgtcactaccttaataaccgaggatacacttatgtagatacagatttggatgaatatataaaagacgagactacgattaatttattaaaggaattactgccctcagagtcagaacataatttcattgattggtttctgcaaaagatgcaatccagtgagtttaggaaaatattggtatctaaagtagaagaaaaaaaagatgataaagaattaaaaaatgctgtaaaaaacatcaaaaatttcattactggctttgaaaaaaacagtgttgaaggccatagacaccggaaagtgtattttgaaaacatcaaatcagacatcacaaaagataaccaacttgatagcataaaaaagaaaatcccttctgtttgtctctctaacctgcttggacacctaagtaacttgcagtggaaaaacctgcaccgctatctggcaaaaaaccccaaacaattcgatgaacaaacttttggtaatgaatttcttagaatgcttaaaaacttcagacatcttaaaggaagccaagaatctttagccgttcgcaacctaatacaacaacttgagcaatcccaagactatatatccattcttgaaaagacaccacctgaaattactattcccccctatgaggcccgaacaaacacaggtatggaaaaagaccaaagtctattacttaaccctgaaaaacttaataacctttatccaaactggcgcaatttaataccaggaatcattgatgcccaccctttccttgaaaaggacttagaacataccaaattgcgtgatagaaaacgcataattagcccgtctaaacaagatgagaaacgagactcttacattttacagcgatatttagacctcaataaaaaaatcgataaatttaaaattaaaaagcaactctcgtttcttggccaggggaaacaactaccagccaatttaatagaaacacagaaggaaatggaaactcatttcaactcttcattagtgagtgttcttatccaaatagccagtgcttataacaaagagagagaagatgctgcccaagggatttggtttgataatgcattcagtctttgtgagctatcgaatattaatccaccacgcaaacaaaaaatactaccacttcttgttggagcgatactcagcgaagatttcatcaacaacaaagataagtgggctaaattcaagattttttggaacacccataaaatcggacgcacttcattaaaaagcaaatgtaaggaaatcgaagaagcacgtaaaaactcaggtaacgcatttaaaattgattatgaagaagccctaaaccatcctgaacatagcaacaataaagctctcatcaagataattcaaacaataccagatatcattcaggccatacaaagtcatcttggacataatgactcgcaggccttgatatatcacaacccatttagtctttcgcagttgtatacaatccttgaaaccaagcgagatggttttcataaaaattgtgtagcggttacttgtgagaactattggagatctcaaaaaacagaaattgaccccgagatttcatatgcttcaaggttgcctgccgacagcgtaaggccttttgatggtgtactggccaggatgatgcaacgcctggcttatgaaattgcaatggccaaatgggaacaaataaaacacattcccgataactcaagccttttaattccgatctaccttgaacaaaaccgttttgaatttgaagagtccttcaaaaaaatcaaagggagcagcagtgataagactcttgaacaagccatcgaaaagcaaaacatccagtgggaagagaaatttcaacgcattattaatgcctccatgaatatttgtccatataagggcgcatcaataggcgggcaaggagaaattgaccatatttatccgcgctcgctttcaaaaaaacattttggagtaatttttaatagcgaagtcaatctcatttactgttcttcccaaggaaatcgagagaaaaaagaggaacattatcttcttgaacatctaagcccactttatttaaagcaccaatttggcactgataatgttagcgacatcaaaaattttatttctcaaaacgttgccaacattaaaaaatatattagttttcatttgcttacgcctgaacagcaaaaagcggctaggcatgccctctttctagattatgacgatgaagcattcaaaacgatcactaagtttttaatgtcccaacaaaaagcgcgtgtcaatggaacccaaaaatttttaggaaaacaaatcatggagtttcttagcaccttggcggattccaaacagctccaattggaattttccataaaacaaatcactgccgaagaagtacacgatcatcgtgagttattgtccaaacaggaaccaaaattagtcaaaagtcggcaacaatcgttcccaagccatgcgatagatgcaacgttgacaatgagcataggtcttaaagagttcccgcaatttagtcaggaacttgataattcctggttcatcaaccacctaatgcctgatgaggtacatttaaatcccgttcgatccaaagaaaaatacaacaaacccaacatcagcagcacaccgctgtttaaggnnnnnnnnnnnnnnnnnnnnnnnnnnnnnnnnnnnnnnnnnnnnnnnnnnnnnnnnnnnnnnnnnnnnnnnnnnnnnnnnnnnnnnnnnnnnnnnnnnnnnnnnnnnnnnnnnnnnnnnnnnnnnnnnnnnnnnnnnnnnnnnnnnnnaaactcttgctcttgaattcttacatcattatttccataaagaaatagtcacaccagatgacacaaccgtttgccatttcataaatagcctacgttactacactaaaaaggaatccattactgtgaagatattaaaagagcctatgcctgttctgagcgtaaaattcgaatcttccaagaaaaatgttttaggctcttttaaacatacaattgctttgccagctaccaaagattgggagagactctttaaccatccaaactttcttgcactaaaagccaaccctgcccccaacccaaaagagtttaacgaatttatcaggaagtattttctttctgacaataacccaaattcggacattccaaacaatggacacaacattaagccacaaaagcacaaagccgttcgaaaagtattctcactgccagtaatacctggtaatgcaggcaccatgatgcgtataaggcgcaaagataataaaggacaacccttataccaactgcagaccattgatgacacccctagtatgggaattcaaattaacgaagacaggctagtcaaacaagaagtacttatggatgcttataaaaccagaaatttatcaacaattgacggaattaataactccgagggacaagcgtatgctactttcgataattggctaactctgcctgtttcaaccttcaaaccagaaattataaaactcgaaatgaagccccactccaaaaccaggcgctatatacgaattacccaatctttagctgattttattaaaaccattgacgaggctttaatgattaaaccctccgattcaattgatgatcccttaaacatgcccaatgaaattgtttgtaaaaacaaattattcggtaatgaattaaaaccacgtgatgggaaaatgaaaattgtatcaactggaaaaattgtgacttatgagtttgaatccgattccacaccccaatggatacagacactctatgtcactcaactgaaaaaacaaccatgaaacacctcacgctctctgaacaaggcagcttttgtaagttgcaaggcgaaagaatccttgtctttaataaagatcaaatggtttttgaaggaacgctcaaccgtttaaaaaccataagcatcgtcaagcaaggcgtcactttgacctcaaatcttcttgttgcctgcgcaatgagaggaatacaaattttcattctggattattcgggtaaagcagtttgtagccttcagggtggactccatcgcacagccaaagtacgggaaagccagttcaaatacatatacaccaaagaagcatccaacatggctgctcgattcattttagcaaaaattaaaaaacagtccgccgttctgaaatactttgcaaaagctaaaaaccggcctgaaaatgnnnnnnnnnnnnnnnnnnnnnnnnnnnnnnnnnnnnnnnnnnnnnnnnnnnnnnnnnnnnnnnnnnnnnnnnnnnnnnnnnnnnnnnnnnnnnnnnnnnnnnnnnnnnnnnnnnnnnnnnnnnnnnnnnnntgccagaatatattgggaaacagttaaagaggtcaatttggtgtgcagtgatttcgaagggaggcgcccaagggtaaacaaagacattacaaattccatgttaaattatgcctactcgattttgtccagttgggtatggcaggccataactaacgctggattagagctatatgctggaattttacatacctccaaaccagggaaaccatcgttagtactcgatctcatggaagaatttcgaccctggtgcgccgatagaattatttttaaactccacgcccgtgcccaaaaacagaatgaactaacccccgctttgaaaaaaacgctaattggtgagatggcaaatttatacgcaaagccactgccataccacaaacgaagaatatcccttgaaagcatcattcaaagacaagtctatcacctatcagctgtattctcaggcgagggaaagtataaaggctacttatttaaatggtaatgaaaaatgcaaataagattatacaaggaatacatagtttcctacgacatcagggacaacagcatccgacgtacaatttacgaaaggcttaaagacattggcttaacccccgttcaaaaatcagtattttggggatatttaaacgaacctgaaaaaagatatttaacgaactttctaaaaaaagaacttgccaaacaagataccgcttttattacaccttgcaagctggctcaagaatacgaagtaaacctcattaatcttgaactggatgaacttaggaaaccggatggacacatcatcgtataaactgcctgtaaatatgataagacagtactgcttttgtccccgcattgtttactaccatatggtggttggcctgaaagtagcctaccctggctgggtgcaatacggtgaggaatatcaacacaagcaacaggtattagacaaaagaagaaccctttcaaaattcaagccaatttcagaacaagctgtactcagacaaaatactatgcttgagcacccatcttacccattttatgggatttgtgatggaatcattgaagatgagctggaaattatccctattgaattaaaatcttttgcatcaaaaattagtttaggtcaaaagatgcaactgaccgcctatggaatgnnnnnnnnnnnnnnnnnnnnnnnnnnnnnnnnnnnnnnnnnnnnnnnnnnnnnnnnnnnnnnnnnnnnnnnnnnnnnnnnnnnnnnnnnnnnnnnnnnnnnnnnnnnnnnnnnnnnnnnnnnnnnnnnnnnnntttggcacagaaacattaccatacagcactgctaatggacttcaatgcattcagtgtgagtttctaaatcactgtaacgatagattttgaaatcgttatatgctcgctattaagacgagcatagaaaaacgattcaatctttaattttgttgatttcagggtatcgaaatttagatgatttctaatttaattattgccttctttttcgaaaaatcaagcctaaataatgcaatttgctatttttcgaagaaaaccacttttaattcctcgtgtttctttaaaataaacaaagagttaaaattgccccaataatccctcatctaaaaatccaaccactgaaactagatataaaaagattaaatcttctagcgcacatccaataatccctcatctaaaaatccaaccactgaaactcactactcctgaaggttataatttttgctataaccaataatccctcatctaaaaatccaaccactgaaacttcgaatacaatcctagtgtctctgtgtgaattaagccaataatccctcatctaaaaatccaaccactgaaaccaggcactggttcactagacactgtaacatctatccaataatccctcatctaaaaatccaaccactgaaaccaataacaagcgagccttttgtactagaaggtttaccaataatccctcatctaaaaatccaaccactgaaacctaccagttaatcgtaactcaatctctttttcaaccaataatccctcatctaaaaatccaaccactgaaacatagaatacataagtgcaaattattaaatgttacccaataatccctcatctaaaaatccaaccactgaaactgaatgtagaaaccagatgccacgaattattagaccaataatccctcatctaaaaatccaaccactgaaactttgtataaacgttctgatatgacttaggtaatctccaataatccctcatctaaaaatccaaccactgaaacctaacctgattgctcaacaaataatgctattggcccaataatccctcatctaaaaatccaaccactgaaactcactttaggccaacgccgatcctccgcttcgaaccaataatccctcatctaaaaatccaaccactgaaacctcacatcttaccctcagggcggatattgtgaatcccaataatccctcatctaaaaatccaaccactgaaacattaataatattttagaagattggcacataataccaataatccctcatctaaaaatccaaccactgaaactgacgcaaaggatttattaaaaacgccttgtaatccaataatccctcatctaaaaatccaaccactgaaacattttaccttttaacacatattgataggcgtccaataatccctcatctaaaaatccaaccactgaaactccataactgaaacgtccttatgcctcaacataatgccaataatccctcatctaaaaatccaaccactgaaacgaatttgtcggccgcatagaccgcttttatcaaaccaataatccctcatctaaaaatccaaccactgaaacctattgcaagctagtttgatcgtgttattataaga

SEQ ID NO: 150 - DNA, 16401 bp, synthetic construct
  source 1..16401: mol_type = other DNA
  misc_feature 1..16401: note = Synthetic
ttttcaccgggattaaatcggacattttcgcaaacgaccaattccccaggttttacatccacaccactcagataatctttgacgaagcggacgggatattccaggtttttccttaaataatcagcaacaggttccaaagagaattttttttcgtatttgccttcttccggacgcccaagatgggacaatacgattactgctgcgccattgtccaaagcggatttgattgtaggcagggccgcttgcaatctttgatcactggtaatcatgccgtctttgatcgggacatttaaatcctcacgaatcagaactcttttgccagacagatcaatgtcgctcattttaatcaggttcattggttatcctttagcagttcatcatttggtgtgcggtatcaatcatgcggttagagaaaccccattcattgtcataccaggctactactttgaccaaactgcctatcactttggtttctgttgtgtcgaaaatagcggaagcggggttgtgattgaagtcacaagaaactaaaggatcttcattaatttgtaaaattcggcttttagccttgcgcatgatgtcattgacttcttccacagaagttgcgcgctttgcctggaaagttaaatcaacaacggatacgtttaataccggtactcgcattgcaaatccgtccaatttccctgccagttcaggtaaaactaatccaacggctgcggcagcgccagttttggttggaatgatggactgcgttgcagagcgggcacgtcgtaaatctttatggcttccatccaaaagcatttgatcttttgtgtaagcatggacagtgttgactaagccggattcaattcctatagcatcatttaatactttaactactggcgccaggcagtttgttgtacaggaagcgttagatacaatgacatcagacgctttgatgaccgagtgattaactccatagaccactgtcgtatcaacgcctttggccggagcagatattaatacttttttggcgccggcattaatatgacccattgccgcatctctgctggtaaagaaaccggtgcattcaaagacgatatcaatgtccaattgtttccatggcagtttggccggatcacgctcagcaatcacttgaatgccatgcccatcaacaatcagcatgtttccttctatgctaacatctgagcgaaaaggaccgtgagttgaatcgtagcgagtcaggtgagcggtcacatcgatgccagataaatcgttaatggcaacgacttcaaactcattttgcctgttgtattcaaaaatcgatcttaaaatgcaacggccaatgcggccatagccattaatcgcgactcgtattgtcatactgcttctccaagttagggtaacctccatactcagttatactgaatacaggccttcttgaaatttcagaagggtatgggttacaccattgtttgtttggttaatgtatctagagtattgataattttttctactgtaattccaaggtaattaaaagcatctgtagcaggagctgataccccaaaacaatccagcccaatgacagcgccgtcaaagccaacaaattggtgccaataggcactgctagctgcttctatcgcaatacgtgtgcgtacctgaccaggtaatacctggtttttgtaagcatcactctgggcaaggaatcgctcagcgcagggcatggataccaccctgacctggagacctcttgcttttgccttttctgctgcggttatagccagttgaacctctgaaccagtggctatcaggatagcatcaggcttcccttcacaatctgcaataatatatccacctttcttaatcaagtcagccgcatcggtgccatgggctaaagcgggcagattttgtcgtgagagtaacaaagcagaaggtccgttatgatgttctaacgattgttgccatgcaacagcggtttccatcaaatcagcagggcgccagactgtcatgccaggggtcattcttaacatagcgatatgttctataggttggtgtgtcgggccatcttcccctaaaccgatagaatcatgagtcaatacgtatatcactctttgtttcattaaagcgcttaaacggatggcatttcttgcataatctgcgaaaacaaggaatgttccgccgtagggaatgaatcctccatgcacagcaagtccattcatgatggctgccatggcaaattccctcactccataataaaggtaatttccggaaaaattatgggccgtgatggctttgctgcctgaccagtcggtattattggaaccagtcaaatccgctgagccgccaaacatttccggtaatattggcgcgaaaaactctatgcattgctgcgatgctttacgcgttgctatggctttctcattgttcaggcattgttttaggaatccagccgatatttcttgccaatcatcgggcaggtcgccattggcacgacgcaaaaactcatcgtgttccgatggatattgtagccggtattcatgcaggagctgcagccattgttgctcttctttgtctccttgctctctatgatcccattgcttgtatatcgaatctggaatttcgaagggagcatgtttccaattaaaaaattcacggacattatttatgtcttgggcactcaatggagaaccgtgcgctttttcgctaccggctacagaggaacccagtcctatgacggttttacagataattaatgaaggttgagtcgtgttctcacgcgctgctgatatggcttgctcaatttgatctgcgtcgtggccatcgatgggccctatgacttgccagttgtaggctttaaagcgagacgtggtatcgtccgtaaaccaggattctaccttaccatcaatagatatcccattgtcgtcataaaatacaatgagttttcccaaaccaagagtgccagccagagaacatgcttcatgagaaatgccttccatcaggcatccatcgccggcaaaagtataagtataatgatcaacgaggttatagtgatcgtggttgaagtgactggccagtacacgctctgccaatgccatcccgactgaattggccaaaccttgacctaatggccctgttgttgtttcgacaccgggagtgtgcccatgttccggatgccctggtgtttttgagtgcaattggcggaaatttttaagctcgttaatatccaaattgtatccggtcaaatgcagtaacgaatagagaagcatggaaccatgtccattagataatacaaaacggtctctgttaaaccagtgcgggtttttggggttgaattttagaaattttttccataaaacggtggcaatatcagccatacccaagggcatgccagggtggcctgattgagcctggtttactgcatcgatgcttaacatgcgtactgcattagctaattctgtaaaactgttcatgcctactcttttgcatttaactgaggcactattgtcgctcagaaggcataaatcggcaagaagaccattcatttttagttgaaaataatgacaatattagagcaaaatgtaaatttaagtttaaatttttcctaatttttgacataatgatggagtttgattaatttttgcagcccagataaggtgacaggagcaaaaatttttgcaaagctggattagaaacacaatgatatgcggattatttatttcaaacaatcatgacaccgattattagtcatttattaaaaatatttccagagctgaatacgcaagttaaaactgattctttgaattggacttttagcacgcatctgaagcaattgggccctgatttttattcgaaaatagctcgtcttcatcccattctcaatatggaatacagcgtattgtgtcagcgcttaaggtataacctgtccgcgcctgattacagttctcctgagcaaatcaaggaacagctgattgatgcactcaaactggcagaacttttggaatatacctatcaacactacctggttgttccacgtgaagtagtgcgtttacgtcgccataaagccatatacagagaattattgacggaattgtccgggtattcttttgccttggataatccggagccggaatctctcaagacaagcttatcgttgacgcaggccattcgtgagaaaacggctcaatccaattggtatagaatttttatcagcagaagtaaacgagtcattaatcttttggataatttagacactggttcaaaggcatttcgtgattttgtcgtgctgcttgataaatacactaatccatttttggcttatttgggctggtgtttttttgcccccagattatttaccaatctctttttaattttaaagcacaccattccaggggaatggatgggcgaaaaagaaaaatcactggattggtccgatcgattttatgcccacctgcaacgacggtggtttgagctggccaatgatagcgtttggtttacagtcgggattctcaattgcttcgtgctggtgggcgctttggcacctctctctgtttatttgtctttgtttgcgtttgtctttgatgtcgccaacacaagcctgcgtgcttacatagagattggccgattacagcagttgcaaaaggaatatgccgaactcttcgaccaggaagaaaatgaagaccagaaaaagataattaaagagtatcaagactcaatcagttatcgcattaagtttgagattttgcgctcctttttatcggttggcggggcagtcgctgttgtgattgcaatggctttatcagttcctgctttgggtattataaatcctgtcatccccttgattggggcagtgcttttgctagcgctatggggcgtttcattatacttgaacaacaagttagatgaatacagacctgtcgataacattgaaaaacctgctccttccgttatcaataaattaagtttttttgcacccaaaaatgaaaaaaaagagagtctgcacctgtcttccaagccagaaaaggatcttgaggcagaggaattgattccaacgttcaccttttaattcattactgtactttgccatttcagcgccggcaaagtatagagactaattcaattgaatgttatgctttcaaaaaattacatgatggaaaggtataacatgtcgaccacagttggattgccacaatttagccatataaaaattgaacatttcaaatctcatcttgatgctttattaaaaaaccatcttgaggaaattgacaggctgcttaaggaaaatcaccactatacctgggataatttaatttatcctttagatagcctcgccgatgaactggagcgtttttggtctccttttgcacatatgcacgcagtgatggattctgaggcaatacgtgaatcctatgaaacgtgtttgccattgctgtctgcctatgatgctgcgattgggcataatcaagacttgtatgaggcgattaaatcgatagatcagcattcccttaaccctgcccagaaaaaaatcattgaagacagcatgcaggattttgagctatcgggagttgctttatccaaggcgaataaaaagcgctttgaagccattcaatcaagactggctgaattatccagcaaattcgaaaacaatgtgctggacgcaacccatgcctacactatccatattaccgaagcagaacgtgtggcaggattacctgagcatgcattaaatacggcaaaagagttggcgcatgagaaagggctggatggttttgttttaaccctcgaatacccttgttttcaggccgttattactcatgctgaagacagggctttacgtgaagaaatgtaccgtgcttacatcaccagagcttcagatcaaggccctaatgcaggaacctttgataatactccgctgattgatgaaattctgtccctgcgccatgaaaaagccgagcttttagggtttaataattttgctgagttatccctggctaccaagatggctgcctcgaccaatcaagtcactgaatttatctatgatttgatcagcagaactcgtgacaagggtaaagcggaatttaggcagcttgaagtgtttgcacaggataaatggaatctgagtccggtaaacccatgggacgttgcttatctgtctgaaaaaagaagacaggatttgtattccttatctcaagaggaattacggccttattttccacagcctaaagtgatgcaaggcttgttcgcgattgttaaaaagctctttggtatgagtatcgaggagattgagggcgtggatgtttggcataaggatgttcaatgctattgcatagtcgatgaatccaatcaaacgcgcgggtacatttacacggatttgtttgccagaccgcacaagcgcaatggtgcctggatggactccatgcaaagccgcagaaaactggaggatggcacagttcaattacccattgcgaccttgacttgcaattttgccaagccttctgcaaacagaccggccatgttatcgcacgatgaagtggtgactttatttcacgagtttggtcattgtctgcatcacgttttgactcaagtcgattaccttgcggctcagggattaatggcgtggaatgggatgcggtggaattacccagccaatttttcgaaaactggtgctgggatgagcacgcattgtctttactgacttcgcacgtggatacaggggaaaccttgccttccgcattgtacgagcgcttgattgccgctaaaaattttcaatccgccatggccatgttaagacaaatggaatttgccttgtttgattttcgcattcaccaggaatatcaaatcggtaaagcgtcctatgtcgcaaatattctggcggatgtacgttctaaaaccagtgttgtacccattgttccttataaccgctttcaacatagtttctcgcatatttttgggggtggttacgctgctggttattacagttacatgtgggcagaagtactatccagtgatgcctttgcgcgctttgaggaggaaggtattttcaaccccaaaactggacatgactttttgaaatccattttggaggcaggcggctcaagaaaagcagccgatgctttcgccgaattccgagggagacccgcgacgattgatgctttgctgcgccataacgggattttataaaaacaggacttgtgccccccaatcctctcggtaaaacattttttgccttgaccttgggattttttgtagatcctgaaaatatattcggtatgctggcgggattttgcttacacgccggcattttatgttataattaaagtgtacagaatggggggcgacctggcttcgacgtgggttgcaaaaccggaagtgcatgccgagaaggagatctctcgtaaataagactcaattaaatataaatgcaaacgatgaaaactttgctggtggggaagctatcgctgcctaataagcactttagttaaaccatcactgtgtactggccaataaacccagtatcccgttcgaccgagcccgcttatcggtatcgaatcaacggtcataagagataagctagcgtcctaatctatcccgggttatggcgcgaaactcagggaatcgctgtgtatcatcctgcccgtcggaggagccacagttaaattcaaaagacaaggctatgcatgtagagctaaaggcagaggacttgcggacgcgggttcgattcccgccgcctccaccaattatcaaaaccattcctgaccaccaaagaccatcataaacccttgtagaacaacgagttaaatccacttttctggttgatagggttgtcttttgtggttttctgttggctcaaaaatcacccaaaatatgcccaaaatttttgaaaaagtacccaatatctgcccaaaaagctagggcaagataatttaaaaaaacactaaaggacattacaaaatgaatgacaattatggtcaggtaatgaattacctgtgatgaatgatctggctaaaattctatcgttaaagaacttattaactaaaaacaatatcaatccatcagaaaattttgaaaatatttatagtcaaatcactgatgatggtttaaaaaaagaaatagagagtaggataatagattatttctcaaagctttcattaccagaacatgtaactatttacgatcaattgttattatcacttcgagaaaaagacgccatttcacattcaaatgggatctatttttatttgacgcatataaaagaaatagtgatattgtttcattgcctcagatatttttcttgcatggtaatgtaagaataggcgcttgtgaagcatgcgataaatggggagaaaaaaatacgtattgtcctgagtgtgatattagattcaaagatgtacctcttctttatccaattaaaaataagagttactttcagtcgagtaaatatactgccttaagttggaaaaaagcggagagttggttctctgaggcatttactataaccatatttggatatagtgctccaacctcagatatcgaggccgttagtcttttgaataaagtgtggcttcacatttcagaacgccaatttgaacatgttgaagtaattgatattcttatgtcgagctgaggtttttattaacaactgccccaatagagccaagttcactgctaaaaaacatgagccaaatttatttttagttatttttatcagtcctatttttgaaattccaaagtatcaagactatatttattttaacgaatcatacagctacaaggatgtagtaaatggaatcttctcagattttatcccctataggcatagatttgggcggcaaatttacaggggtttgcttatcccacctcgaagctttcgcagaactcccaaaccatgcaaatacaaaatactctgtcatcctgatagaccataacaactttcaattatcccaggcacaaagaagggcaacaaggcatagggtcagaaataaaaagaggaatcaatttgtaaaacgagttgccctgcaattattccaacacattctttcacgagatctaaatgcaaaggaagagacagcactctgtcactaccttaataaccgaggatacacttatgtagatacagatttggatgaatatataaaagacgagactacgattaatttattaaaggaattactgccctcagagtcagaacataatttcattgattggtttctgcaaaagatgcaatccagtgagtttaggaaaatattggtatctaaagtagaagaaaaaaaagatgataaagaattaaaaaatgctgtaaaaaacatcaaaaatttcattactggctttgaaaaaaacagtgttgaaggccatagacaccggaaagtgtattttgaaaacatcaaatcagacatcacaaaagataaccaacttgatagcataaaaaagaaaatcccttctgtttgtctctctaacctgcttggacacctaagtaacttgcagtggaaaaacctgcaccgctatctggcaaaaaaccccaaacaattcgatgaacaaacttttggtaatgaatttcttagaatgcttaaaaacttcagacatcttaaaggaagccaagaatctttagccgttcgcaacctaatacaacaacttgagcaatcccaagactatatatccattcttgaaaagacaccacctgaaattactattcccccctatgaggcccgaacaaacacaggtatggaaaaagaccaaagtctattacttaaccctgaaaaacttaataacctttatccaaactggcgcaatttaataccaggaatcattgatgcccaccctttccttgaaaaggacttagaacataccaaattgcgtgatagaaaacgcataattagcccgtctaaacaagatgagaaacgagactcttacattttacagcgatatttagacctcaataaaaaaaatcgataaatttaaaattaaaaagcaactctcgtttcttggccaggggaaacaactaccagccaatttaatagaaacacagaaggaaatggaaactcatttcaactcttcattagtgagtgttcttatccaaatagccagtgcttataacaaagagagagaagatgctgcccaagggatttggtttgataatgcattcagtctttgtgagctatcgaatattaatccaccacgcaaacaaaaaatactaccacttcttgttggagcgatactcagcgaagatttcatcaacaacaaagataagtgggctaaattcaagattttttggaacacccataaaatcggacgcacttcattaaaaagcaaatgtaaggaaatcgaagaagcacgtaaaaactcaggtaacgcatttaaaattgattatgaagaagccctaaaccatcctgaacatagcaacaataaagctctcatcaagataattcaaacaataccagatatcattcaggccatacaaagtcatcttggacataatgactcgcaggccttgatatatcacaacccatttagtctttcgcagttgtatacaatccttgaaaccaagcgagatggttttcataaaaattgtgtagcggttacttgtgagaactattggagatctcaaaaaacagaaattgaccccgagatttcatatgcttcaaggttgcctgccgacagcgtaaggccttttgatggtgtactggccaggatgatgcaacgcctggcttatgaaattgcaatggccaaatgggaacaaataaaacacattcccgataactcaagccttttaattccgatctaccttgaacaaaaccgttttgaatttgaagagtccttcaaaaaaatcaaagggagcagcagtgataagactcttgaacaagccatcgaaaagcaaaacatccagtgggaagagaaatttcaacgcattattaatgcctccatgaatatttgtccatataagggcgcatcaataggcgggcaaggagaaattgaccatatttatccgcgctcgctttcaaaaaaacattttggagtaatttttaatagcgaagtcaatctcatttactgttcttcccaaggaaatcgagagaaaaaagaggaacattatcttcttgaacatctaagcccactttatttaaagcaccaatttggcactgataatgttagcgacatcaaaaattttatttctcaaaacgttgccaacattaaaaaatatattagttttcatttgcttacgcctgaacagcaaaaagcggctaggcatgccctctttctagattatgacgatgaagcattcaaaacgatcactaagtttttaatgtcccaacaaaaagcgcgtgtcaatggaacccaaaaatttttaggaaaacaaatcatggagtttcttagcaccttggcggattccaaacagctccaattggaattttccataaaacaaatcactgccgaagaagtacacgatcatcgtgagttattgtccaaacaggaaccaaaattagtcaaaagtcggcaacaatcgttcccaagccatgcgatagatgcaacgttgacaatgagcataggtcttaaagagttcccgcaatttagtcaggaacttgataattcctggttcatcaaccacctaatgcctgatgaggtacatttaaatcccgttcgatccaaagaaaaatacaacaaacccaacatcagcagcacaccgctgtttaaggattctctttatgccgaacgattcatccctgtttgggttaaaggcgaaacatttgctattggtttctcagaaaaagatttgtttgaaataaagccatccaataaggaaaaattgtttacccttcttaaaacctattccactaaaaatcctggcgaatcgttacaggaattacaggcaaaatccaaagccaagtggttgtatttccctataaataaaactcttgctcttgaattcttacatcattatttccataaagaaatagtcacaccagatgacacaaccgtttgccatttcataaatagcctacgttactacactaaaaaggaatccattactgtgaagatattaaaagagcctatgcctgttctgagcgtaaaattcgaatcttccaagaaaaatgttttaggctcttttaaacatacaattgctttgccagctaccaaagattgggagagactctttaaccatccaaactttcttgcactaaaagccaaccctgcccccaacccaaaagagtttaacgaatttatcaggaagtattttctttctgacaataacccaaattcggacattccaaacaatggacacaacattaagccacaaaagcacaaagccgttcgaaaagtattctcactgccagtaatacctggtaatgcaggcaccatgatgcgtataaggcgcaaagataataaaggacaacccttataccaactgcagaccattgatgacacccctagtatgggaattcaaattaacgaagacaggctagtcaaacaagaagtacttatggatgcttataaaaccagaaatttatcaacaattgacggaattaataactccgagggacaagcgtatgctactttcgataattggctaactctgcctgtttcaaccttcaaaccagaaattataaaactcgaaatgaagccccactccaaaaccaggcgctatatacgaattacccaatctttagctgattttattaaaaccattgacgaggctttaatgattaaaccctccgattcaattgatgatcccttaaacatgcccaatgaaattgtttgtaaaaacaaattattcggtaatgaattaaaaccacgtgatgggaaaatgaaaattgtatcaactggaaaaattgtgacttatgagtttgaatccgattccacaccccaatggatacagacactctatgtcactcaactgaaaaaacaaccatgaaacacctcacgctctctgaacaaggcagcttttgtaagttgcaaggcgaaagaatccttgtctttaataaagatcaaatggtttttgaaggaacgctcaaccgtttaaaaaccataagcatcgtcaagcaaggcgtcactttgacctcaaatcttcttgttgcctgcgcaatgagaggaatacaaattttcattctggattattcgggtaaagcagtttgtagccttcagggtggactccatcgcacagccaaagtacgggaaagccagttcaaatacatatacaccaaagaagcatccaacatggctgctcgattcattttagcaaaaattaaaaaacagtccgccgttctgaaatactttgcaaaagctaaaaaccggcctgaaaatgagaaaataattcttcatgcagcatcccagaaaatggcaggtattgttgccaatattacagagacaaattggataaaacttcaggattggcggttcacgctactcggatttgaaggaagtgctgccagaatatattgggaaacagttaaagaggtcaatttggtgtgcagtgatttcgaagggaggcgcccaagggtaaacaaagacattacaaattccatgttaaattatgcctactcgattttgtccagttgggtatggcaggccataactaacgctggattagagctatatgctggaattttacatacctccaaaccagggaaaccatcgttagtactcgatctcatggaagaatttcgaccctggtgcgccgatagaattatttttaaactccacgcccgtgcccaaaaacagaatgaactaacccccgctttgaaaaaaacgctaattggtgagatggcaaatttatacgcaaagccactgccataccacaaacgaagaatatcccttgaaagcatcattcaaagacaagtctatcacctatcagctgtattctcaggcgagggaaagtataaaggctacttatttaaatggtaatgaaaaatgcaaataagattatacaaggaatacatagtttcctacgacatcagggacaacagcatccgacgtacaatttacgaaaggcttaaagacattggcttaacccccgttcaaaaatcagtattttggggatatttaaacgaacctgaaaaaagatatttaacgaactttctaaaaaaagaacttgccaaacaagataccgcttttattacaccttgcaagctggctcaagaatacgaagtaaacctcattaatcttgaactggatgaacttaggaaaccggatggacacatcatcgtataaactgcctgtaaatatgataagacagtactgcttttgtccccgcattgtttactaccatatggtggttggcctgaaagtagcctaccctggctgggtgcaatacggtgaggaatatcaacacaagcaacaggtattagacaaaagaagaaccctttcaaaattcaagccaatttcagaacaagctgtactcagacaaaatactatgcttgagcacccatcttacccattttatgggatttgtgatggaatcattgaagatgagctggaaattatccctattgaattaaaatcttttgcatcaaaaattagtttaggtcaaaagatgcaactgaccgcctatggaatgctttccgaactgatttttgaaaaaccatgtaccagaggctatattattactggtgaaaaggccaaagccaaattaataaaaattgacgaaaaatcaaagttcaaagtgattgaaatttgtgctaaaataaagaaaatttttggcacagaaacattaccatacagcactgctaatggacttcaatgcattcagtgtgagtttctaaatcactgtaacgatagattttgaaatcgttatatgctcgctattaagacgagcatagaaaaacgattcaatctttaattttgttgatttcagggtatcgaaatttagatgatttctaatttaattattgccttctttttcgaaaaatcaagcctaaataatgcaatttgctatttttcgaagaaaaccacttttaattcctcgtgtttctttaaaataaacaaagagttaaaattgccccaataatccctcatctaaaaatccaaccactgaaactagatataaaaagattaaatcttctagcgcacatccaataatccctcatctaaaaatccaaccactgaaactcactactcctgaaggttataatttttgctataaccaataatccctcatctaaaaatccaaccactgaaacttcgaatacaatcctagtgtctctgtgtgaattaagccaataatccctcatctaaaaatccaaccactgaaaccaggcactggttcactagacactgtaacatctatccaataatccctcatctaaaaatccaaccactgaaaccaataacaagcgagccttttgtactagaaggtttaccaataatccctcatctaaaaatccaaccactgaaacctaccagtaatcgtaactcaatctctttttcaaccaataatccctcatctaaaaatccaaccactgaaacatagaatacataagtgcaaattattaaatgttacccaataatccctcatctaaaaatccaaccactgaaactgaatgtagaaaccagatgccacgaattattagaccaataatccctcatctaaaaatccaaccactgaaactttgtataaacgttctgatatgacttaggtaatctccaataatccctcatctaaaaatccaaccactgaaacctaacctgattgctcaacaaataatgctattggcccaataatccctcatctaaaaatccaaccactgaaactcactttaggccaacgccgatcctccgcttcgaaccaataatccctcatctaaaaatccaaccactgaaacctcacatcttaccctcagggcggatattgtgaatcccaataatccctcatctaaaaatccaaccactgaaacattaataatattttagaagattggcacataataccaataatccctcatctaaaaatccaaccactgaaactgacgcaaaggatttattaaaaacgccttgtaatccaataatccctcatctaaaaatccaaccactgaaacattttaccttttaacacatattgataggcgtccaataatccctcatctaaaaatccaaccactgaaactccataactgaaacgtccttatgcctcaacataatgccaataatccctcatctaaaaatccaaccactgaaacgaatttgtcggccgcatagaccgcttttatcaaaccaataatccctcatctaaaaatccaaccactgaaacctattgcaagctagtttgatcgtgttattataagaaccaataatccctcatctaaaaatccaaccactgaaactgacaaacgtttgttttttagacacaacactaaaagccaataatccctcatctaaaaatccaaccactgaaaccctgaaaacccgccacaacccgcgccagacttgaaccaataatccctcatc

SEQ ID NO: 151 - DNA, 24410 bp, synthetic construct
  source 1..24410: mol_type = other DNA
  misc_feature 1..24410: note = Synthetic
gttccgtttccttccgctaacgattccagtgcaaaagtttcggcccgttctctcgttagcggatccaaatcgtccagaatcatgatccgttccaggtcggactttgcctccttggattccggttctttcttcagtctggcaaaagaacgaagatacaggtactcggtggaagaggggaagcgattcaacagtcgatttaggagttcttccgcatcggaataacgaccggcatagagccttgtcttggcgagctgccttaaagcgtcctcttcgtcgggataaagggaaatcgaacgttcgaatttttccgcggcttcttggatcttggattctcttttggaaccggaaagtttttccgcccaaaggagcaggaattttccggattctaaaaataccgacggatcgtcggaggtttccgcttccaattggttccggagagtttgggctttggagaagtttccacctagggcagcgctcctagcttccaacattcggatttccctgtttttggggagacgcgaaagagccgagttcaattcgaaggccgctttttccacgtttccttgggccagatgaacttctactaagaccgggaaaagatccggatcgtatttgtcctcgtccaaaaaagggcgaactacggataatgcttcctcatacttgcccagtctcgctagagtatcggcctttaacctcactgcagccttatttttcggttccagctccaataccttattcaaggagcgcagcgcttccttttccttgtgaaggcgaagagccgcctcggaaaggcctaggtgggagcgcacggactgagggtttttttggatcgcctctcggaaagaatcgtatgcgttcggatagtttcttgcctttagaaacgactctccttctttgatccattctatcgtctctttcgcgatttgcggaccggggaaaacaagaagagttcctaagagaaggagtagaagagcaggggatgtataaaagactttcatggagtaaagaaacccgtctccgccattccattagaatttctgaatatagcttccacgaccaccggtatataaacgtctccgccagaagagtctattctacttttgaaggaaagaagatatctgcgatcttttttggcttcgatccaattcctgaggttcttttccgctccacctcccggtatgagtaggaattttcctccggttttttccgcgatctccctatatacggaagtggatccgccttcttctcccaagcaaaaaaagaaaacgggaatatcgtgcgcgaccgcaaagcgtatgattttcgtgggaggaaattgggtaaagcccgcccgcaattcctttccggaaacgatggcaagcacggcgcggggcccgatgctatccaggaggtcggtgattcccctctgcaaggatttgccgatttgggattcttcttccggaacgaaggctcgaacggatttcaggatgtcgtacatactttttccgaagggataggccacctgagtgtcctttccggagcgtagcaattgcagtttgtcctcggctctgagttcggataggaaaggtcgtaaggatttttcgatcagagggtaggaatccgtgatcagcctggaattttccgcaacgatggaaacgctgatccgatgatcgtactttctcatgtcggtcagtccgatcaaaggggaaaggttttccatttcgtagaccctaaaggaatttctatggatcgcttttgccgcgactccgtgacgatccttggcttggacgaccagggagatttccggataatcagaactgatcactctttctatcaacagatccaagttggaagcgagttgtcctttgggtgaaaagatgtccaaccgatgtctgttgaaatccgtgacgaacatggttccggtataatcgaaacagacggagaaaggttggtcgaagttccggacgttgtttttggaatcccggaaactttggaaatcggaccaatttttggagacggagtcgtagacgaataagccggagccctcgtccgcgatgtatatcttatcctcgcggatcgtgagattgcggggttttttgaaggaaggatgggaaatttccttcagataatttccttccttatcaaagaccacgatccttcggtttcccttatcggctacgtagatttcgcctctcgtattgacttttagaccggccggttgtcttagaatcccttttccgatttcctgcaggaagtccccgtttttggaaagtttttggacccgatcgtttcccatatccgaaacgaataagtaaccttctctcgtgaggaaaatgccggaaggtccgtgaaaacttccattctgctttcccgtatttccgaaacgattcacgtagcttccgcgcgtgtcgaattcgtagatcttatctccggaataatccgcgacgaaaatcgattttccacggatcgtaatcgcggtgggcccgtccatgttcctcccgaaggagcctttgaaattgtccacagggtttccgttcgcgtcgaatttgacgatattcgcggtttcgaagctcgcgacgtagagatacccctcctcgtccacggctatatcggtcgggttcctgaatctgaagcgacggaggtcgtccccatttatggatttataatattctaatgtatctttcctgttcccgcctccgagttggaatctaagggcgtccaatctgttctttcggatgagtccgagcttgccggaggattccaactgttccagttcggcgagactttcctgccagtctccgctgagataataggtctcggataggaagaacttggcgtgggtaaagtccggttttaaggaaagggatttgaggaagttttcccttgcggcggcgaattctcccttgttataataagccaaccctcttttaaaaaaggttttggcttccttttcctttaaggcgaaaaacgggaggggttccgaaggaagggaggcgacgagggtaagacctaataggaagaacaaaaagagtctaggtggcagttttctccccatttgattccccggtatttccgattgaatccatttagagacataatttcaaccccttttttcaaggaagtcctagggcaaaaaggaggagggggaagtcagggaagtctgttgcggtattttacggagacgatttcccgcaattgccggttttcttcgctcggatagagccaaaccttcttccaattgcggttccattccgaccattcgttcctggccgcgcggttttcctggagttcctcttccacttctctcaaaagtctgtccaacaggattacataattccgaaagcgatgagccaggtccgattggggagaaaactcctgcatattcctcctatcggcgaagtttcgagcgagggcgggcatttttttgaaagcctattccgctaaaaccgcgatatgagcttccacgctctccgccagagcttgcaaatcgtaccctccttccaagaaggaaagaatgggagctccggattgggaggccgttttccgagtcatttccgtaaatctggcaaaggcttccgttgaaagcgccattccgcctaagggatcccttttgtgggcatcgaatccagcggaaattaggaggaagtccggtcggaacgattcgatggaaggaagtactttttcctcgaattcccggagatattctttttctcccgaattttccgggagagggatattgagagtgaagccctttccttctccgcttcctgtctcgtttgcggagccggaacccggatagaaaggatattggtggagagaagtaaagaatacccggtccgacccgtaaaagatttcctgggtgccgttgccgtggtgaacgtcccaatccaggatgtacactttctttcccatgcccgatagatagccggcggtgatcgcgatattattcaaaaggcaaaatcccatggcttttccggtttccgcatggtgaccggggggacgaaccaaggcaattccgccttccaaggttccagcaagtaattggtcgactaggacgactccgcttccggcggcgaggagggccgcttcgtggcttttcggagaaaaaggggtgtctgcgtcaaagctgccttgctttccttcgatggaaagaaaacggtcccggtgagtccgatcgtgcgcagaaagaatcagttcgggcggtattttttgggaaggaattcggaggagagatccgaaataggaagtctttcccagtcgctccaaaacggcttccaacctttcgggtcgttccggatggaacttgccggtatcgtgttttagaaaaacgtcctcgtacacatatccgaatttcatttggttcctcccgtttttttcccccgttcaaaacttcgaggaaagatcggagcgactcgtttcgatacttattactagaccggagaggaaacttgcgcaaatcgttttccattttacccttatttcttttttccttcttcccgctttccgtttgtgcggaattcacccttccgtttccggaaaacacgaggaaaaaggaaatttcttctcccttccgatcggcggaaaaagaggaacagacccgaacaaagggaagattcgcagaaaccacgaatcgttcttccttatccaatgcggctccagtgcggacggaaaaggagaagaagcagccatcggaagaacttcccaaaacgaaaccgattcctagaaaagcgatccattccgacagcaaaccccccaaattttatcggggaatctatgtgcataattccttggttgtaaatcgctcccatcgaaaaaaatgggaaacacttctcgtggaggctgcggacgccggagtgaacgtgcttgtgatcgatctgcaggctagtactccttctcgtgcggagatcgatcgggttcggaaattaggtttttacccgatcggtagactcgtgaattttgctggagggttgaagacggaattcccggctccgtcccgcatgaattccattctgcaaaccgttcgaaatgcgtgcgagtccggctttcccgagatccaactggattatattcgctatgcggacgagtcggagctcaagattccggtaaagaagaaataccaaaatatcggatccgttatctccaagatccggagcgaggccaatacatgcgaggatccgccttacttgggggccgatatcttcggtagaattccctttaacaaggacgatacgatcggacagaaggtggaagtcttcgcgcagcttgtggacgttctctaccccatgttgtatccttcccatttttacggtcatccggaacggatctcgaatccgtacaaaaccatcttcgacggattgaccaatgccaagaatagagccttgcctgaaacgagggtcgtgggttatatccagggcttttccatgaagatctcgtattccaaaaagaatttaaaggattacgtcaaggctcagatagaggcaagcgtggccagcaaaagcgacggcttcgtagtatggaatgcctggagcgactatagggagacattcaaagcgatgaaggaatcggttcgagaaggtaaattagatatttctgattgacttcagacggggaacgtcgatcggatcgaaaaagtggccgggttttccggtcacttttttgcgggttatcagaatcctttgaagataggctttctcttttcctcgatggatttgatcgtttcccgaaaatctttggaaagaaaattgcgagcttgcgattccgcttccaaacgtaaggctgcgtttagggcttcccgattgtaagtgttcctcttgagttccgaaagcgccaagggagcgctttcgctgagagaaatcgcgatttcggtagcccgttttagcacttcctctttcggaacggaatcgtaacagattccggccttgaagcattcagtgccgttcagagattccgctaaaaagagaagcctgttggacagagaagttccgaaaagttcacggaccagataacttgatcccatgccgggatggatacccaatttcacgaaattgaattggtattttccttcgtttgcaaagacacgtatgtcgcaagcgaacgtgatggaaagtccggctcctactgcatggccgttggccgcgcaaatgactgggacttccagatcgcgtacggagaggaaaagattataaaattcgaacatttcccgcttattcgtttcgaagtccttggcggcaaaggacttcaggagctcgaaatttccaccggcggaaaagatgtcgttcttgccggtaataacgacgacgcgaggagaacttttttttagacgatctatatgggccttgaattcgaggcccatatccgtagtcatcgaattcttagtctcgggattgttcaggtagaggatctctatcctggaatcgcgggacaattcgactgtttcggcatctaccaacgccatcagacggcttctcgttttagttcgaagctttcgtaccaaattctgtcggagatggccaaaggtttttctcccaatcccatctgctcgaaataatccagaagaatctccaagtgaacgctctcttcgtcttccaacgtccaaaagctggaatcgacggatctagaaatgatggcttggccgcggacggaatccgtaaagtaatccggtttgccggaaaaaatcaggtgcgcggaaatcagatcgaagcggatcgtatctacgattttagagaagtcggagtcagatttatcaaagaaacgtgatgccacttccgtctgaaaataatctccccagctcagaatatccggttccacgcccgttctttccttgatttccgcgagcttttcgggttcgaggaaaggcttgtgggcgaatttatccaccaattctttcagcgaaatcaaagcgagaattttggccgccgaaagtttgccttggcgcatcatatcgaagagttcgggattgagttcggacttattctgttccatgctatttctttcggcaggagtttcgaaaacctattgaacaatttccttccagtatttttgcgaatatgtcccataattttttccgtaaaaagaagggatcggaaaagaaacaaaactcttcggctggattcggcttttgcaaaagtcgaaaatgttagatagggtcgttttcttttttcggttttatggcagtcggcaggtcggatagtctacaggagttaatcacgattctcgaaacgatgttcggagaaacgatcatcgggtcggatatcaacctcgtaaaacacctgttttacagtttaaaggcggatcagagggaatttcctttcgactatgaaggagaaaaactcagcgcggtcgtagaagagatctccgaagataccctaatcctcttggtgccgtacgtccagtccaagggaattcttcgggcaaaaattagtttcgaaatattgaatatactttatcagttcgaagtcgtgatcctacagttttgggaggaccacgtacgtatcaagatccctgcggagcttcaggccgcggcgttccgaaagaatcttagggtcgccgtcgacgacctgtttatgaattacgtcattctataccgttctttgagcggaggtgaaagggaactcggaaagaacctttatgtggagcaaaggttcttccatttaatgaaagagatcaagaaagataatccgagcttgaagttgatcaatcttatggcgacggattatatcatgaccgtgtcgcgggattatgagatcgtcttttacggatccggtcgggacggcggttttatcggcaggtttatgaaagagcataactgtacggtttatattccggattgctccttgatcatgaactatataggggaggagaaggaggagtcgctcgaaaatttccgcgaggcgtatcttggaatggttcaggcccagggccaggcaaaggccgacgcttttttccgggatatgcagaaagacgaagtgaggaatttcatgatttcgtacgtggcgacacctgtgcgtttattcaacgacgttatcgggcatattcgggtgtattccaccgctatggataagttttccatagcaagacagcaggctctttacatccaggaattgggtgagattctgacgtatgcgttcactaaggtgtatatacgtcaggaaaactacaagatggcgaaggcggctacgaaaatactggatatcagtatgaacggtcttctgttcgagatagaggagaagaggacgttcgaatatttaaaaaagcataatatcataaaaatgttcgtaccgattgcggaaagggatttgattctacgcggagaggtggtccgatttagggagatatccgagggtaggtatcatctcggggtgaattttttcgattcgaatccggacgatatggtctttttgcaagattatattttcagcaagaaattgaaaattttgtcggaatagaaatcccttcccccgaatcccaaccgatcgccctacggtagctcccgatcggggggagaagagatccctactccgacaagaatcttcaccttcaccaaccgaatccaccaacgtatctaatccgaatacgtgagtgttcttaagaaaagcgaactcatccaaatataactgtgaatacttgggtctgatatatccgtaagaagagaatgctgtttttaaaagcctgtgatttccttccgcgacttggttgtggactccattcttgctccatcgatttcttgcccaccgaaacctgttatccttggaatgagcagagtggtttacacttctatggtttctatacactccccaaagccaagggtaaccttgatcggtgaaaagtggagtagttgtaggcaaatgttctctgatgagaggtcctaaggtctccgctttttgattaggaacagaagtaaagaatacaggaccatttttaatagcgattgtttggactaaagtcccgatctgctttcccaccaagtttctctgaaaggtagatagaagaggtttgtcctctatgactgtatcgtttccttccctgactcgctctttccccagcagagtataatacagcagtgtctacgcatacgtaggggcgtttttccatgatcttggtaatgtctttattctcattgggaggtaaaaggaagtctttgaactggtggcttagggattcgtaggtaagggacttaaacttaggtagttgatcagaacaaaataactggaatcttctttttaatagagaagcagaattagttccgattcttaattttttactgatctcggttgaggtgattaccttgggatattgaagaagggactcgtagaatacatatccgaacatccaaagtggtagcttacaatggtgaaggggagtgtaggagattcgggaagttaggtatctacatttagagcaacggatgagttctggatgagtagagatttctttttctaagggtttatttttacattccggattcggacaggtcttaggatagaagtcctttaggattttctttgtaagagctgtgaagaattgggtgtttaggttcggagggttatttctgagagtatgaggattcggtttataagaaggatctgatggctggttttctgaggagttttctatagtagcgtgaggttggattcgggggaagggaagggctcggttggcattcgaagggggagatatagcgatttcggtccaatttgaggggattgcgtaggaatcgttaggcggaatagatttagaaaaaatagttgcaggatatttaatgttattatttatcatggaaatccctctgtagtcgttcatttcgggaaatggggtttagtcgagtaaaaaattagaagatggggaatttcctttccggtgttgtcttttttacgagcgtttacagttaattttgggaagaaatttagagaaaattaacaattcactaaaacgatctgagaatttgtccgtagccgtgtttatagtatagctacgtagaaaagtgttttttgcattgtttttcaagatttaaggaaagtgctacatgatattaaaatcacctattgcaattgatttaggagctaaaaatacaggagtcgtttacacgacttaccccccgcattcaaaacctcagggaattcatggagctaccctaattttagataacttgaaattatctcaggtggataggagagcgaaaagacaccaaagaagaaattattcccgaatgagacttgctcgcaggctcgtttatttaatcgtccgttctcattataaagttcccgaaaacgatctaactccagaagtaaaagtcgagctacaatcgcttctgactagaaggggatatacttttcagtcagtcgttacggaatcgaatgaacacggacagactgcttgggccgagatagaggactactttcccaagatgcagattcaggacaagtctctaccgatccaaactatcttggactctttcttctcatcagaaaatataagactcgaatatctagagcctattaaagaggccgaaacaaaagatgataaaaatcatcttaaaatgattagggagcaaaaggaagcttttgaagctgaacaaaataacggagcaagacatagaattcgatattttgaagagattgaggaagaccttccaagaaagataaaattactagaatgtttgaaaaagaataaaattgatgaaaagagatttttaaatctgatccaaaacatctctaacctacaaatcaaacctctccgagattattttaacgataaaaatatgaaggaaaaggaaatatgggatccaaagaaattgcatagctcgattgctggatggattcgtgtctggcatgcggattcgaaagacgctgaaaaaaggaatattgcaaagaaattgctttctcttctagaaaatggaagattgaaagccattcgaggtaattcaacttattctacactcaagcatatcataaattttctagaggaagttgatcccaaagatacgattccaccgtatgaagaccaaaacaatagaaaacctccaaaatgccaaaatttgtggttagaccccggtattctggataggtattttccgggttggagcggttcattacaaaaacttctagcaaaagaagaagacagtccattcgagcaattagttacgaaagattttcagatcaacgaaacaacagaggaaggaaaatcccttttaacgctaatcaaattgtatagccgagcccattcggataaagaattggatgttcgagccattatacttcaaaggtttttggatcgttcggctaatctagatccctggtctattcgtttgcagcgaaaagcaagcaaggaaatcaaaattactggatctcttaccaagcaagagcttaaaaaagcctctgatgcgtatgaaagaatgaaagagactataggagagacggatgcaaagcaattcttggatctctccggccactattaccgggaagtagaagatattaagaagggaatgtggttctccccagattccgataaaaaacataaagaaatccctaagtcaattgttcatgaagagaatgatgaagtatcacttttttataagtgtgatactaagaccggttcgaaacagaagaacctatccagccttgtgggaaacgtcttgaatgtcagattttcggcggaactatttcgatcttttcttacgttctggacggaaaaattcgatggacgatcttccttaaactcattagcaaaatcgatagaggaggctcggttaagcacagatgaatttggagtggaatactctatattacttaaaaaaatcgagaaaggagagatcgatcggaagagcgacatctttaaggcatatcaaaatacgacaaaatcatccggaaggttggagcaaattctgaaagaagaattaggattccaagctatttccaaaagttactttgacaacccctttagtattgctcaactctataacataatttctgtagaccgatcaggattttcaaaagtttgcaggtcctgccaggaagaaaatcattggagatctactttaatcgatacagatcgaggcttacgggcttgggcttccaagcaggtttctgacactggaagaccattcgatggacagattgcaatgcttctggacagaatcgctttagaagttgtaagactgaagaaagccgaaatagaacaataccttaaatccaatccatcaaaaatagaatcagttgagattcctcttcttattgaggaaaattcgttcagttttcgctatgagctggccgagctaaagaaacttgcaaaaaagaaaagagagcaactcggaaaatcggtcgaagagttcgacaaaaggttgaatactaaacaagatcgaatcaaagaagcatctcgggagatctgtccttatacaggcaaaagaatttccaagggtgaaatagatcatattttacctcgttctcaaacccaaaagcaattcgggaccgttttcaatgcagaggtaaatctgatttacgtttcgcgagaaggaaaccaggccaaaggtaagcgagattatagtctcgatgatctggacgaaaaatacttaaagaaaatttttggcaccaaagatctgactttcattaagaaaactatatcggagacggtcgatcgtttagtttcaagtaggaaaaattcaatacttgtatttgatcgattatctatggaggagcaagattgtttacggcacgctcttttcgaaaagcccttgcgcccaaaagtatttgagcttttatcgggccaacttaaggccagggttaacgggacccagttatatttagctaaaaagattcgaaatctgcttcgtaaagatcaggatcttcctaaaatcaagtttcctcagttttcctttttcgaaccaaggggaattgacttgccatatatgaggagagagcttgctcaaaaattcccaaatcttgagaagcaaaacccccaacctacggggagccatattgtagatgcggcgatggtgatggcttacgcggtagagacagactccggaagtttatcctatggttctaagagcggatctgaaagatttgattcagagttgttgtctaagtatctgcctaatgacattcgattcttacgaattaaatctaaggagaaaactaattcgaggtatcctcataagaagccactttttaaagacggagtttttggagagagatttcttccgattcttgttcttgagaacggcttgagacttggttacactttggagaattctttagaattgtcacctcaggattcaaaaaaattttttgaggtgctccgatcagtcttattattcaaaaggaaaccagtttcacacgattaccctgcactctcctcctttgcgaagaaagataaaaggaaatatattgttctacctgtcaacaaagcgaaggcgttagaggtggtttctcaaaaggaacatagcctactcgcatccatactaaaaagtatttcatatacagtatttcgcactcctgttgttagtttcttatttgatcagaagaaagaattaataccaaagattcgaggaaagaaagtcgattggggagagaagatagaaaaagaatttagaattaaaatagaggtcaagcttggtgacgtaaaaattacctccggttttattcaatatccaggtaaatcagaatgggaaaaattactcttgtccgattcattaagaggggcgatcaaaaacaaaagcctgactttaaagtggttcgatagccgggaaaacttgtccaagttggatggattcttcaaagatacaagtgaacctaaggcgaagcataaaagaagaagcaatcattatgctctttcagtcccaaaatcgccttccggtaggtttaggatcagaagaaattcctttgacgattataaaatttatcaattatattctgtagaaggaaatgcatttaacgcttttgaaataaatactgaaactaaagaaaatcctatattattagatgtgtataaaaattcaaattcagttacgtatgctgacaaagattatatttatcctacttcaggagagactatcgcgttttcagagtatagggagattgtatttaagccagaagaaaggaaaaacttattatcgaccggaataattagtttgcatattgcgccggggactgcagaccgtcgctatatccgaatcgttattagtaaggactttttctccaaaattttcaaggtaaaagattcattctgggaacttgctttaaatgaatctattcctaaggaaaatattgagaaattatctttaatattagataaaattccttcagaaaaacgtccaggaatgcctcgatcagacgcaccgaaacttaatgtgacaaagatagcagtgaactcggtagaactaagctatacttctccaagttggaaatcctggttatcgtcctataatgactctatatagctctaaaaaatattcgtgatttaagatttatagcaggagttccgatgtaccgcttaacgtaacatggttaagcacattgcaatacaatcgtacgggtccagtatttccataactggagcaaggctcttcgtatctataaagggcgaagagggggtcgaaatcccattaaatcgcttgaaaagtctgaaattatcgggtaggggagcgattataagctcgaatgcgatttccgaatgcgcaaagcgagggataccgatctatatctgtgattggaatgggaggtacatctcccaattatctggatctcatgagcatgccgtcgttcaattaagaaaaaggcaattagaatatgtagataggctttcgagtagagacctcgcaaagttgatcctttatgggaaggtaaaaaatcaaaaagctgtactgcaatatttcgccaagtaccaaaggaaaaagggagtttccgtcgactggttagagtcagctcttaattctttggatagtattgttaaatcgatccttgccttttcgggagaaattgagtggcgttcatcattactcggttttgaggggagcgcggcatctatttattggaatgcccttaagaatgacatttatttcggagattcctttaagggaagggttggtagaggagcaggagactcgattaaccaggctttaaatcttggatattcaattttggagacgtatatttggaatgctattcatttggccggtcttgaaccgtatgctggtgtaatccataccgatcgacctggaaagccagctttgattttggacctaatggaagagtatcgaccctggatggtcgatcgaatcgttctcagtttaaagagccatttgcttggaacagaaagaatttcggaggaagcaaggaagcttgttatatccggagttcaaaaagcttttgaaagtattcatccttatagaggaaaaaaattgcacatagaggttatactccagaggcaagtttatagattatgtggagttttttatcagaaatcctcgtataaaccgattctattcaaatggtaaatttcgatgaaaaattttatagagatcttagtatgctacgatatcgaatcaaataggattcggaaaaaagtctccgatatgctgaaggacttcggcttagtatccatccaaaaatccgtatattggggatgggtcattccagccgagaagaaagcgattcttcataatattcataataagtacgatttgcaaatttcagacagagtactcgtaatggatgtgaatttggcatcaaatgcgaaatctattctcattggatactcggatatcgaactaaagcgattcgaagatgatgtccagttggtcatttaagatgaacgcagaaattccaattaatatgtttaggcagtttgccttttgtcctagggtcgttttttttcgagagttaaaacatattaatcctgtctatcctctctgggtagaacagggcacggagaagcatgagaaaagaaatgccacacttaaaaagaaactccctaaaattcttagatatttaaatgggaagctggatgttgaagttccggtgagatcgaatttcggatttttcggagtcttggatggagtaataagaacagaagaagaattaatcccaatagagtttaaatcttctacctctaaaccaggaaagagcgcacttcttcaattatcggcttacgcagtttgcttagaagaaatggaaggtaaagaggtcaaaaggtcttttctattatacggagatagagttaaagtttgggagattcatctatctaaggatttgagaaaaatggtgcgagagacctatcaaaacataaatgaagtaatgtctactcctatcctgccgtatgtagccacctcgccaaccaaatgcgttcaatgcgaatacttgaattattgcaacgacagaaatatataaaaaaagccggttggaaaatccagctcggctcatttttaccaaagacaagaaaactaactgagacataggaataaaaattcgtagaggtccagccggctttcgccacatttgattgttttcagtgcttaaggtatccttaacatcgactaaagcagtttttcggcaataaattttattaaatctcaggtaaaattctggtagaatcaatatagttctcgattctgtggccttgccaatttataacttttagctgcggagaccggatttatggtttcgaaaattttgccggtttttagctccaatttacttttcgaaaaaacaaaaaaaataagctctcaaattaccggaagaatcggcattttgagagcttttggaccgctccagcatagctggaagtttcaccttagcaactgaaacaagtccaaatgacttgcaaaacaagcgctttcctccagcatagctggaagtttcaccttagcaactgaaactgcttaggactcacacggacgcaactggatacttttccagcatagctggaagtttcaccttagcaactgaaaccaggagcgttcgactttgcattcgcggatttggccagcatagctggaagtttcaccttagcaactgaaactgagaagattgtcgataagttcttcatggtattgccagcatagctggaagtttcaccttagcaactgaaacgtaatacgggctgctgaccgctaccctgccccaaccagcatagctggaagtttcaccttagcaactgaaacacatgttatcgagaacttcgcgaggagcgtggaccagcatagctggaagtttcaccttagcaactgaaactaaaacttcaataggtaaagataaacttcttcttttccagcatagctggaagtttcaccttagcaactgaaactcaacgtgcgtatacggtcggtgcaatcgtaacgccagcatagctggaagtttcaccttagcaactgaaaccccatgaaggaagactgcacgattggaatgttacccagcatagctggaagtttcaccttagcaactgaaactagaatcttccgttctctccattccgtttaagtcccagcatagctggaagtttcaccttagcaactgaaactaataacctggaacgtatcctccaactagagcatccagcatagctggaagtttcaccttagcaactgaaactgtcagtgaatgatctttctaaaagtccccatttcccagcatagctggaagtttcaccttagcaactgaaacctcgcggaagctgcgattacttgatcacggaaatccagcatagctggaagtttcaccttagcaactgaaaccaagtgcggtgggagtcacggtcgcggttcccgttccagcatagctggaagtttcactgaataagagcaaccacctcaagtagctattatattatatcggtaaatggggatatcaattttaataacaaaaatcttcaaatatcgaacaaatccttcgcctttacttgtaggtttcgggttaggcgatggatagttctaagatttgggttggaccttccgctttctatattctaaatagttcttacaggaatcccatcatctccaaagtccatatcttcctgggcaagtcctttctacagcctcaaatccctaattctacgaccgacttttcggcgaaaggtaagataatgtccagaatatttcacatattatgtaatgcgggcataccgattaagatcgtttaacttaaaataagaagattatagtcataatcgcagaaatctctatttcttcttcgaatcttccttcatctttgcatattcagaaatcagatccccccacgtgttcacttctttagcggagaaattaatcagattctttacgatgtccttaatacctttcgaattccgaatttggttccataaagttttgtcatcatccataagagacgccttatctccagttttctggagatagaagatcggatgaacgggcttcgaatcattcaagaaccaatttaagtctatgccgtaggcagctacaatcgcgtctaaaaatgactttgaaggagattccaatcttcctttgattatattgtttaaaccagccttcgtttgctttagcttaggagcagtacttgtttggttatctccggtcgcttcaatgacggctaaggtctttttaccgattaggctctcatctcgtttatcagtcatctgaaatacatcaaaactgtataaagccttcaatttacaaggaagcttaaatagagtccctgctggacctttatctgtgaagcagaaaaaggggtttagtgggactcgaattacctgcgttacgggagtttctctgaggtattttatgaaatcaaaaggaacggcttatattatgtggctatgtgggttctttggagtattggggttacatcgcttttacttaggtaagataggaactggctttctctagctattttttttcggaatatttggtgttggtgattttatagacctattaacgctcggcgggcaagtagacgcgataaatataaaaaggaattgaaagaaattcgaaccgctactctcgcgaatacctctaggcagaaagaagagaagaatttcgtagaaattgcgtatttcaaattatcttaaaatttcctgctctcataaaaattaaagaattctcatttggcccgaattcgtttcgggctttgtttttaaagatgtttaaactatttacagttctacttctattgcctgagtttcttttctcggaaactatttctgggtgagtggagatttctttttctaagattctattctcacacttcggattcggacaggtcttaggatagaagtccttcaggattttcttcgtaaggacggtgaagaattgggtttttaggttcggagggttatttctgagagtataaggatccggtttaggagaaggatctaagggttggttttgtgaggggtttctatagtagcgtgaggttgggttcgaaggaagggaaaagctcggttgggattcgaagggggagaagaaaggagcacgttcttgggtttttagactaaatcgaattagttgccagcagaaataaagatgtcgtctcgattgtccttaaaaccggtgaattacaagatgctttatatagagggtaaattgtagaaagggatttaaaaagagaggcattacgagcgggattttatttagaaattattttgtataataaaacatcagaattaattattgcagatgtcttaagatgtacccgaaatttcaaacataactgaagtaaaaactatagaaaaatttcgcaattacttcaatgatcacaacgaaaaatagaagatatctcctttattttatttgtatcctttctcgttgatccattcggtcatttaaacttaatccttaacttcgcagataaatcgaaaagatcggaatggcaacaagcagtaaaaaggtcgcaacctgttttaattataaatctattagcatttattttttgtttatttctattttcttccaaggcatataattaataacataaaacactactaattatcttccattgactgtatttccaatgtcctataagggatagctgggactcattttgacgaattaaaattggttaacgatttatttatggagaaattttttgctatgacacagccatattttgaaactttatagatgaagattgtgaaaaaactaacgttatcaattctatttttgacatttatatataaatgtaatactacttatgataaactgaacattccgaattacgatcgttctattttgaatggaaaatgcaggatcggagccgcctatgaatttgaaaatgaatatcgagagtatagagtttataacggaacgataaaaaaaatttctactgcggacgatggggctttggtatttaattcaattaagagttctatcctgcaacattcagaagggcaaaatgccttgctttccgggaatacaggtaatcgtaagtcattgacagtgctggtcaagattgaaactgattattattttgaagtttctttttggggattctggataagtgcgctatctttagggttcatgccgagcagactggataatgcatttagggcagttacgattaaggcaattgatgaaaatggagtaagattactaagcaaagtttatttcattcaaacacgggagttgagtagtaatattaatattattttaggtctttttttctttgttggtgattacctaaaagagaatgtagggtattatatttccgattttgaaaatgatttctatcatacctatggtagaaaatattgccaatagtttagaacgatggacgtccttaaagtgtccaaggccaacatctttccccagcggtccaaacttagggccaaccatattccccattaaaaataaaaaaagatcagctacattgacctaaaaaaggtccaggcaaatcactcaaatcgctgatccgcgcaagaatataagattataggaacctaatagaagaggttttgtttcagttaactgcggacggaattgttagcggttagattggaactgagagggaatatgctgaccctggacacttaaagttttccacaattctaatttcaagaatggcttcaaacggatccacctgtcagttttgagatttctgacttttccgtttcttgtttcataggtgaaaccgcgatcgagtcaaatagtcattaatattagggttgattcctcgttcgggaaaataactcggtccttctctttattttaaacataactttgaaatatcctctttgagttttttcgaatacgtttctatataaacgaacagagcatcttacggaccggattcctgaaaatcgttacgcgaatcgttgatttcttcgatcgtaaacttttaaaatttagctattttagtaaaatatttgcttgaatattgttaaaatataatagtaaatggattaagaaaatgtgacaattttagttctaagtcgatcgtggccgatttgtctccgataggttttggggatgtcgcattgattatttattcaatagctatataaaaggtttatttcttaaaattcaaagcatgaaaaacgccgatcgttatggatagccctatctgtcggagtttgttcgttcgattaagatgcaaatacagttcgtaatttctttgtcggaatttctgagagatcagaaaataaaatttcgaaagtatttcatgtacgggttttttacgcgaaacttccccaatatttaccaaggaaggctaatgaaggattcgatagaatgagattgtaccaaatattgcgctttatatttccggagcttcaactttatgatttcgttaaacaaaatggcttagtagcaaagaaaagaaatgcagttcaatttgcaaacggtagtttgaatcgcatcagaccgacttcttttgcttccgtaaatggaatttcaaatatatctaatcgaaacgaaactccgaaagctctggcgagaaagttaaagattcttgcagcgaaatcgggtgatgctgacaaattggacgataagttctccgttgttctcgaaaagcttaccaatattatgttagagcaggacgaattcctgcgttcccttgttagtacatttaagttgccatatctgaccggcgagcaagggaaacttttgaatatcatcctacttgctggtcctccaggtactggtaagaaacgagctttgaattacttggttcattttttagatgaacaagacctttttccgtttgaaaaaacgattgagattgatctcggccagtattccgaacgagacattgatataaattttatcgcggatgtttcaggcgcattttccgagggtcaagggatcgtttgtttttcgaggtgggaaaaaacccacactagaatacaagaatatatcgcggaattattggctaacggtttttttagaacagagcaaggagttaaaattcaggccgaaaattactttattatcctgtatatggataaagtccctaaagagtcggggccttacgaaacaatacctcaatcgattctggaggacatccccgtttcctttcggcattgcattcgatcctttgctatttctgccccgctcagcaaagactctttaaagagaatttttcaatttaagctggatgagaagggatcggaatttgctacccgattacaaattcacacaaagtacgaatcgcctttcattgatgatatggttctttatttagaaaaggaaaatcgtgcgggggaagcgatagaggagtggatagatcggtcttatgttgaaaaaattcagtctttggttgcagaagacaagattcgaaaaggttccgaaatatcattactaatgaaagatgggcagcctgccgttcgcagtgaaagtaaaggttggtttttaaagccgagtacatcgattcaaaaagaatcggtagaagacgttcttaccgaattgaacaaattcatcggattagaatcagtaaaacaagaaatcaatcgattggccaatttaatttcgcagcgacgtgaacgtgaagcgctcggtcaggatataggtccattgactcttcatctttcctttactggaaatcccgggacgggaaagactacggttgcgaggttgatcggcagactttataaggcaatggggctattaaaagaaggtcatacgatcgaatgttcccggcaggatttggttgccggatacgtaggacatacggctccgcaaaccatgtcgaaagtcaaggaagcgatcggaggagttcttttcatagacgaagcctatacgttagttcagaataaacaagactctttcggtaaagaagcactggatactttactaaaagctatggaagacaatcggagcgatttggcggttatcgtcgctggatacacaaacgaaatgaaggatttcttcaatgcgaatcctggaatgagttccaggattccgaatgcgatagaatttccagattacgctccgactgaaatgctttccatcttgcgacttctttgcggaaaggatttccagattcctgttgaagctgaccaggggcttatggatgttttcgaaatgcggcagatacccggtcgaaacgattcggggaacgggcgactcgttcgaaatattttggacgaagcgaagaagcgacaaggagatcgattatcaaaaactccttcagctcttgcggacgatttcaagacgcttttacccgaggatttcggaatcggtcaaaaagagacttttaatttggaatccgcatttgctgggattgttggattggataaagtgaaaaccttcattcaatcattagaaaaccagattagactcgaaaaaatccggaaagatgcgggcctagcgggagacaccggccagagactcaatatggttttttccggaaatccgggaacagggaagacgacggtggctcgcctgatcgcaaagatgttaagggaaatcggagtattaaagaaaggtcatttagtagaagtaacacgaaaagatctagttgcagaatatataggtcagacggcgcggaaaactgcagacgtagttaaagaggcgataggcggtgtcttatttattgatgaagcgtatcaacttgctgagggtggcgtctccgattttggaaaggaagctatcgacactttgatccgagagatcgagaataataaggataatctagtcgtaattcttgccggatatacgaatgaaatggactctttgatcaaaatgaatccaggcctccgatccagaataccaatcaatatcgaatttttagactatacgccggaagagatggttcttatctccgaaattaatgcaaagcggaaaggttttaccattgagaaggaagtgatttcccaattgccgaaatacttcgccggacggcaagtgctcggaaaaaacgaatcgggtaacggcaggctcgtcgataacctgatcgattcggcgagacgaaaacaatcagagaggatcatggcctcgtggttgcaggagggaaaaaaaggggattccttaacggaac

SEQ ID NO: 152 - DNA, 4489 bp, synthetic construct
  source 1..4489: mol_type = other DNA
  misc_feature 1..4489: note = Synthetic
gtcggacatatactcgcagactcttcggatcacgaaatatcattcctatttcccttgtatcgttatgtttatttctacactccggcttatttttatttccacacctttactcgcctctaaacttcctaagtttattggcacgagccttttctcagagcctgccgttttcactttctctttgctatgacgaagccaataacctaacgtgcttacgctgattcccgactcttcgcagtaagccttctggctcaagccgctttcttgatattctgctatatattcttcccgactctttcttgctttgctcatctcataagtttaacacgattcgatcgatagcttaccctggggttaattgagcgcttacgatcggtcggccaatttggatccttggtccttacgactgcaaggaaaggccaagaaagaaatcaaaaccaccgaatcactatctaaaaccgatctacaaaaagcttcggatgcatacgagaaaattaaagagatcctgagtgaatcagatacagaccaatttataaaactggcaaaccgttattatcttgaagtagctgatattaaaaaaggaatgtggctcccaacggcccctgaaagaaagcataaagaaattccgaaatcaatcgcgcatgaagaaaatcaagatatatctctttttcacaaatgcaacaccaagacaggttctaaaaaaaagaatctctcaagtctcgttggaaatgttttaaacgtcaaattttctcaagacgcatttcaaaatttcttaatactttggactgaaaagtttgatggtcgctcctctctgaattcattggcaaaatcaattgaagaaattcgatcgattcagaatgagtttgtagtagaatattcaatattactcaaaaaaatcaaaaaaggagaaatcgataaaaagaacgatgtatataaagtatatcaaaacactataaaatcatctgaaagacttgaacaagtcctaaaagaaaggttagggtttcaaaacgtatcaaagagttactttaataatccttatagtattgctcaactctataatttaatctccgtggataggtcaggattctcgaaagtctgtagatcttgtcaggaagaaaatcattggagatccactttaattgatacagaccgaggccctcaagctcaagcatccaaacaagtatcggatacaggtcgcccctttgatggacaattagcgatgcttctagacaggatcgcttttgaaatcgttaaactaaaaaggatagaaattgaaaggcttctgtctaataaaaattcttcaaaaatcgaggtagtcgaaattccgcttttgattgaagagaattcatttaattttcgttacgaactcgcggagctaaagaagctttcaaagaagaaaaaagaccaactaaagaaatctgtcgaagagtttgacacaaaactaaactcaaagcaggaaagaatcaaagcagcttctcgggaactttgcccatatactggtaagaaaatttcaaaaggcgaaatagatcatatcttgcctcgttcctggactcaaaaacaattcggaacagctttaaatgcagaggcaaatttgatttatgcttcccgagaaggaaaccagtccaaaggcaatcgggaatatggcctcaacgatttggacgaaaaatatttaaacataatatttggaaccaaagaagttgattcaatccaaagaaatatatcagatacgattgatcgcctggatatagaaagaggcaccactagaattgtatttgatagattggctccaaatgagcgggactgcctacgccatgctctttttataaaatctctacgacccaaagttttcgagcttttgtccggccaattaaaagctcgagtaaatgggacccaattgtatttagctaaaaggatccgtagtttgctcctcaaaaatcaggattttattaccaaatccttgataatcaaggttccttctttctctttttatgaacctagaacggttgaccttccatatatgcgaaaagaacttgctgaaaaatttccgaatcttggtaagcagaaccctcaaccaacaggaagtcatattatagatgcagctatggtgatggcttacgcagtcgaaacagattctgggaatttatcatttggttcaaaagataaatccgaaggatttgattccgaatccttatctagatttttaccgagtaatattcaatttttgtctatcaaatcgaaagacaaaaccgattcaaaatatccatacaagaaaccactttttaaagacggagtctttggggaaagatttctccctatacttattgctgagaaaggcctacgggttggttatacgctagaaaattctctcgaagtcaattctgaaaatccagaggaattttttaacgtgctaaagccgtatctgctatttaaaagaaagccgatcgagagtaactatcaaacacttgttgcttttgcccaaaaagataaaagaggttatatagtattaccagtaaacaaaccaaaggcattagaatcaatttcgcaaagaaaaagtgatccgcatacttccatactaaagaacattttatatacagtttctcgagaatccatccctagtctaatttttgataagaatactttaattccagaaattaaatccaacaaagtaaattggggagataagttagaaaagaaattcagaatcaaaatagaaattaaactatacggtaagaaaatagctgatggtttcatccgatatccagggaagacggaatgggaaaagttactcttaacagaaccgctgaaaggattagtcaaaaacaaaactcttacaccaaagtggtttgacagtttggaaaacttagccggattagatgatcattttaaagatacaagtaatcctgaagcaaaacacaaacgaaaaagcaatcactacgctctccccgtccccaaaggaccttcaggcggcttccgaatccgaagaaattcctttgatggatacaaagtttatcaactatattccgtagatggaaattcttttcacgctttcaagattgaaaatggatggactgggaaaaccttgcttttggatatatatcagaatagcggcaacttacattctcttgattacgattacgaaaataccgatatttcccaaactgctctcttttccaaattttataaaatagaattctcaaaagaggaaacacaaaagataaactcgaaaggaataaagtcactttatgtggccccaggcagctcctcaagacagtatattagagtgatatttgataaacaaacattcagcaaatttattaaattccaatcaaaattttgggaatttgacttaatcactcctctacccaaagacaaagccaaagatctaatagaaagcatattaaaaattttcccagaagacttacggcctaaaaagccacgaaatgatattcacatacagaacattagtcatgattctgtgcaggttgaatacattgcggatggaaaaacccaaggattcggacaatattttatcaaccaaaactaaagactgccagcgtaggaccgataattgtaatggtgtctaacgctatacttggttacttctatggtaaaacatgttgcgatacaatcctatggctctagtgtttcaatctcaggagcaaggcttttcgtttctattaaaggcgaacaagaatttgaaattcccttaaaccgcttaaaaagcctaaaagtatcgggtagaggggcaattataagttcgaatgcaatatccgaatgctccaaaagatagtgtccttaaagtttcgcacaatttaaattttaagcaaggctctgaataccgtcaagccgtgagctttgaaatttttaactcttttaacttctccatgtcaacatactttttagttccccacttagtagaggcaacatgccttaaccttgcagtagctaacatgagagcggacttaccatccggaaaagctcctacaactttcgttcttctcttgatctctttgatgatccgctctaaaggattattcgttcgtatctttctccaatgctcggaaggaaagtccatataggctaaagtttcctcaattccatcagaaactaccttagccgcttcttttaatttcatttccgttagtcgttctacgacgaatttggctttcttcaaagactcatctttgttctcttgagcatggattgctttcagcatttgagatataactttgaaagaacctcttggagctttgccgaatacattcctgtagaaatgaacgatacatctttgccacttggattcaggaaagaagtaagggatcgattccactaaaccgtaagcgctcaattaaacccatcccatcgattttgaaaaaagactttcaaaatcttgtgttaaatgggaggcaggcaccccttcgaaaagagtacgaaggacggcatagggatcttttttgttagcgatagcggtttgaacgatagaaaaaaagaa

SEQ ID NO: 153 - DNA, 7414 bp, synthetic construct
  source 1..7414: mol_type = other DNA
  misc_feature 1..7414: note = Synthetic
tgcctccgcctgtcttcacatccttgcagaactttgccgtgtcctccgcgcaggggccggcttctttggcgaatgtcgccccgttgtgtaacaggcccaggcagaacatgacggcgaatgcggctaaccatttgttgcgggtgccaggcaatatggaatttttcatgctttctccttaagtcttgctgtgtaaatgaccatcttctgaacgacgtcgttttgagtcgacgccaccgggtgaaaaatcatcttctttgcgccggcgcgaccgcccgcccactatgccagccgctaccgaaaaacagcagtcccgtcgaacgatcgggctgtccgcacggcggacagcgtaagcggggcgtgacgcaagggctttgccgactagctcactctagcagtgtagccagcaatcgtcgacgtgccggcaccagccactccaaacctgtgcttggcgtcccgcggggcctggggcgagccggagattgcgcgaccgccgaagcatcaccggggagccgtcgctgacgccgaagaggccgcctgcagcacgagtatggcgtggatgcggtgttcgagccggtgcaggtcgcgaccgcgcgctggatcgcctgcaaagacgaaaagatgttgaacgactttgaaaagaagctgcgcgataaccattgcgctcgatggcgccggcgagctgacttacctcgcgccgtcgcgcgtgaacctccagctcaccatggagcgctggccggacatcacctttaataccacgtgcgagcaggtctagcctctttgcaaggaacaaaaatggcccccggaaggggccatttatcggagcggccggttgcccgggaccacgtttgccgatagcctccaccatcgggcgataaaccagggaggggcatggtggaaaagcacgtctcaccggttgccattgatcttggcgcgaaacacacgggcgtttttctcgcgcattatccgagcggcaccgacccggccgaaggggggcggagcggccatctcattactgcgcctgacggcggcaagcagtggtcgcagcaaggacgcactgccaagcgccaccagcggcgcggttacaagcgcgcgaaacttgccaaacggctgctgcgggtaattctgacggagctttttaagctcaatctccagcacccgatggccccgaaccagacggccgggcagtggttcgatgggctcctcaacaatcgtggctacacctacctcgccgatgaaatcaacaaggagttactggcgcagtccggtgtaacgattgttcacctccgctggccaaaagaatttcccgagcaggataaccttttcaaccggctccaatttctcagcgacaagctcgacgtcgcaaagcgattgatctccgagtttctgagcagccgggagttcttcaaggcccccgctgtacaggaactgatggcggagcatttcccggaaaaggaggaagtcaaacgtcagcaggagatttactcagaagcacgagacgcaatcgaccgtttggtcaaggcggaacaggaaggccaccgccgccggcaggactatctcgacaacatccgcgccgacatctacaaccatccggaactgtcggcactgctcaacgggacgtcgctcacagccgatacgttcgccaacctcatcggccacatcagtaacctgcaacttcgtccgctgcgccgctacttcaacgatccatcaatgtcggccaaggatcgctgggatgaagaacgcatggcgaagtacttctggaactacattgaaagttggcgtacccaggaagaaaaagacaaggcgacccgcaaggcactgctcgcgcgccgccatgaatcgatattgaaagtctggctggaaacccacccagcactgagcgtccccccgttcgaggaccaggacaaccgccggccgcctcgctgccaaagtctgctgctcgatcccgctcgcctcgatgccgcactgccaaactggaagaccatcacccgcaagcttctcgctgccgatcccggcctcgacgaagaattggaaaacaggccggccgcgcagggctggcccatggaaatgcccaagagtcatccgtggcggggcgacgacaaccagcttgcacacatccttcagcgtgcgctcgaccgttcgagagagcgtgatccctattgcctgcggctgctggcaagcatccgaggcgagagcgagatcgtttcccagtcggcgcaaaatggccgtgctgaaatcgatcgacacatagggacacagcacacgggcgattttgttaagttcgcatcggcctactatgcagaggcgcgcgacgcccgtgacggttcgtgggatcacgaggacacccaaggacttctgcgccgttgcgacctgcatccgccacgcaagagtaagcagcgcgaacgactgatcggggcgataattggctgcgaacttctggacgccgggccgctgcgcgactacctgaaatccgagaagatcggccgtccttcattgcttcgtatcgcgaagcgggcggcaaatgcacaaaaggagaatggcaacgcgctcaaggaaatttaccagagcaaccactggctccagcagagtggcaagaaacccgagaacaaggacgtattgaaattattcgacgattcccggctggcggctgaacgcatcggcaactggctcaaacaggatccgaagggctgggaaaactacgcctctcctttctcgcttgcccagatatacaacattcttgaaaccgacatccacggcttctcgagcacctgccagggatgtgctcgggaaaacgcctggcgcagccgcgtgaatgtgcaaggtgtcgctaatgcctcgcgcctgccggccgacagtgtgcggccgttcgatggcgtgctacgccggctgctcgacactcaggcgcatgaaatcgcgcggcgcaaggtggatcaaattacccaagccgcggttttgggcacgctgcacattcccatcctgatcgaggaaaaccgctttcagtttgccgaagggctcgccgaaatcaagaaatcggcgaagaagaaacgcgatctgctgcacaagatgggcgaggaacaggccgaacgctggctcgacaaggacgagcgcatcaaggctgcctcgcaaggcatctgtgcctacaccggcaagccgctcggcaaggatgggcaactcgaccatatcgtcccgcagtcagaaaccaaaaaatggcaagggacggcctacaacagcgaagccaacctgatctacgtcagcacgcgcggcaataccgacaaaggcaaacggacatacaacctcgaagacctgaagccgaactatctgacgaatcagttcgggaccaaagacaccgatgccatcgccgcgcgcatcgaaaccacactgcgaccgtacttcgataagcacaagggttacaccagcttcctcgatctggcacccgaagaacagctttgcctgagacacgcactgttcgcccctaacctgcggcgcgaggctatgaaactgctctcgacccagaccaaagcgcgggtcaacggcacacagaagtggtttgcccgccggatcatccagcacctgaaacacgcacttgcgaaaaacccgaacgccgggcttgatgttacgtactcgattcaccgcatcagcgccgaggacgtgcatcacgcgcgcaatgtgctcgcggcggcggaaccggtatatcaaaagacctcaccgcaaccagcagcgagccatgtcgtggatgcgacactggcctttgcgtgcgggcttcaagacccgcaactcgcggacgtactcacttggccgctcgatgatgatctggaacaacaaaccggctggctgacttcgctggtgccggcaaccattgggattcattcccttcaaagcaaatccaagtaccggaaacccaatccggcgggacaaaaactgttcaaggacggcctctatggcgagcgcttcgtgccgttgctgatcgacaagaaaggcaagctcgctatcggtttcgagcccaagcccaatagctggatccccatttccaagggtgaagagcagtggtttgaattattgcggccgttcctgcgcttccagaacaaaccgctcgaagggtcgttttccgaatggcagcagcgggcgcgcgattcggggaggtcgcatctctatttcaccatcgacaagccggccgctttcgaccacctgtacaaggtcgccaagcagcccgcggatgaagcgtcgttgcaacaggccgacctgcttgacggtctgcgttacatcgttcagaagaagaatctgcaagaggcacttaccaaggataacggaaagaaattcaaggagcgacaggaggtactcaaagagagtgactttgagattaccgtggcatttgccggtggaaatctgccacgcactctcgacaaacctaaagggaaagtcacgctaccagctcgccgcgattgggagcgcctgctcggtgctgaggtattcaagaagcgtttcgggggcgaaaccaaggacttcgattggcgcgttgagttgagcaagatctttccaagtgctgggacgaatagacgccaccatgcagtgaggaaggatttctcgctgccgatcattccggatacgtctggccggttccgtgtaaaacggaaaactccaacgggcgatgctgtgtggcaactcttaaaccttgaagggttctcagcgcagggtttcgagatcggcgcagatggcgggcttggcgatccttcagctctgccgtttcttaccgaaagcctggcgttggttcctgatggaggccgataccaagagccggcgcaacaggtctgttatttcgacgattggcgggaaatcaaactcgatcccgccaaatgttcatggatcaccggcctttatttagcgccaggttcgcaagacagattccgggttcggataaccatgccattccatgagttcagcaagagggtcatttcgctgctggataacactcaagtgattaactctcatcagcaactactcggcgtactgtctgtaccacccgagaaagataaagaacgccatcgaacgttcaaggaacagtggatcaagaaactcgcacccagtgaccacggaggattaattctgggctacccgcggaccaagataacggtgctcgaggttggcgaaagaataacatttgagtatgaggatggaaaaaccaaggattcgatcaaacgtgccaagtatgtgcaggtcgggattccggtaacgaaaagataatgcgccacctcaccatcgcggaacacggacagttcctcggcatgactggcgagcggctggtggtgacggatgatggcaaggtagtgggggaatacccgttctcgcgtctcaagaccgttaccattgctaaatcgggtgtttcgctgtcgagcaatcttatcgttcagtgcgcggcgcggggcatcaagcttttcgtcctcgactttcgcggccaggcggtcgcctgtctttccggcacacagcaacacgccgtggccgcggtgcgccgggcgcaattccggtttctcgatggcgacggcgcgcgcgaattctcgcgcgccgtggtgcgcggcaagattcacaaccagcgtgccgtacttctctacttccgcaaataccacggtaagaacgatgtggcgctgggcgaactgctggcctccgctgccgagaagcttgccgccatggacgagggcgccaaggcgctcgcgcttggcgagcgcgattcgtggcgcgaagaactgctgggccacgagggtcaggcggcggctgtctattgggcggcgttgcgggaatcggaattgtttcccgccgccttcgagaaccgcagcggtcgtggcgcggctgaccccgtcaatgccgcgctcaactacggctacgcgatcctctcgtcctacgtttggcactgcctcatcaacgcagggctggaagtctatgctggtgcgctgcacactgaccggcccgggaagccctcgctggtgctcgatcttatggaagaataccgcgcctggacggtggaccgagtagtcacgaagctccgcacaaaacttgccgatgccgaggaactgacacccgcgctacgcaaggacatcatcaacggcgtgcacgaaaccttcgccacccgctacccttatcgcagccgccagatggcgctcgaaagcattctgcaacggcaggtgtaccgtctgtgcgcgtcgatcgtggacggcaaaacatatcgcccctatttgttccgctggtgaggtgcaccgatgaaactctacaacgaagtgatggtgtgctacgacatcgaggacaacaagatacgcacccggctcttcggacggctcaaggacctggggttgcggccaatccagaaatcggtgttctggggtcacctgaacgccgctgaggaacgcgcggtgctgaggtgtttccgcgacgagctggacaaggcgacggaccgggcgtttctggtgcgcgccccgctggcggaggcggcggaacgaaacagtttcggttacgaattggtcggcaccttcacgctttccagccatgaaaccctatagcctgccggtgcacctgctgcgccagcatgccttttgcccgcgtattccgtatttcatcgaaggactgggaatctcacccgagacacccctctgggtgcagcaggggcaggactatcacgcgcgccaagagcggctgacccgtgaccggacactcaagcgcttcgggctcgacaaggccacgcgccactttcgcatgcgtctttcgtccaaacgacttggcatccatggcatcgccgacgccgttctcgaaaccgagacggaaatctatccggttgaattcaagacggagtttgcggagaccgggcgtggacagacgctgcaactgatgtcttacggactgatggcggaagaaacgcaacacaaacacttcgcggccgggtttctgctctacgggcaaaaaggcaagacacggcggatcgagcgtaccgacgcactcacgggcgacgtagaacgcgcgcttgatacggtacggaaaaacctagcggcagcacgtatgccggaaagctccgcagccgcaccgcagtgcggccaatgcgagtacttcaattactgcaacgaccggttctaaaaaaaacgaaaggcccggcttgatcggagccgggccttccttcatcctatactcaggatgcccggttacccggacagtggcctgagccagtatcctgctgttggatgatttcagagcatcgctttttgggaaagcacagccagcctatgccgaccttcgaaaaagagcaacggttctgcggcaaacaacccttttcgaaggattgctggcctgtcacaagacccgccgccaagccaaacaacgacttagaggcgggccgaaacaacctatcccaaaaagccagctactgaaaccagcgttaggcgaa

SEQ ID NO: 154 - DNA, 19505 bp, synthetic construct
  misc_feature 1..19505: note = Synthetic
  source 1..19505: mol_type = other DNA
caggctattgcagccgcaacggcctgtgttcagccgctgtgtgtgattactggaggccccggcacaggaaaaacgaccacggtgactcgtttgctgagtgccttgttgagtgaaaacccggatctacgggttgccctggccgcgccgaccggtaaagctgcggcacgcatgacagaatccatccgccaggcccgtgagcgcggtggactgccgcatgccgatggtattccctcggttagttttactctgcatcgtctgcttggctggagcccgcgaggctttcgctaccaccatgaacgttaccttccgtatgactgcatcgtggtcgatgaagcgtccatgattgatttgccaatgatggctcatctgctgagtgcactggctccaaagacacgtcttattcttctgggggaccgtgaccagctcgcatcggttgaggctgggagtgtgcttgccgatttgtgcgacgccggtacagaacacggtattaccgacgcttttgccgcgcgactgggggcgttaacggggtacgacatgagcgccgttatcgaagcagaatgttcaattatgcagaatgcgatggtccagttgcgtaaatcccatcgatttggtgaacacagcggtattggcgctctggcgcgtgcggtgaatcagggggccgttcaacaagctgatcaggtgttagaggacccggcttttgctgatgcagtgcgcttagcggcagattctgaagagtggcaggcgcacgttgttgagggttatcgtcagtattgtcgcctgatagaagacggcgcctcgccagagtggattctagatgcgttcgaccagtttcaggtattggtggcattgcgcagtggaccagtcggggttgaagaaactaatcgacgaattgaacgtctgcttaacagagctggtttattgtcagacaccagccagctttggtatccggggcgcgcaatcatgattacccgcaacgattatgatgttggcctgtacaatggggatatcggcattatgctcaggcacgaagggcaggagcgtgttgtattccgcgatgcggagggcggcttacgtttcctctcgccgggtcgtctgcctaatcacgagacggcattcgccatgacggtacacaaaagccaggggtctgagttttctgctgtgatgcttctcttacccgaaaaatggcagcaggtgattacgcgggagttggtctatacggccattacccgagcgagaaaacaattctggtgtcaggtagggaacgcctgctggcaacaggctttgaattccagaacagaaagagcaagcggccttagagacgcgctctggagcaataacgacgcactatgaatgacagtcgaaaaacagaagataatgcgcaacagaacgcattaacaggatcgcagaaaaaagcgcagaaaaaggcgcagaaaaagtatcccaagcatgttcgtcatcgggctaaaactcccttgtggctgaagctgccgctgatactcgttgcggttctggtcagtatttacctgctggtgtttgttgccgctcctttctttgcgctgcgctacgtcgagcaatggtatgccgagcagggagaagggcagtcgcttcttattggtggttggacgctgtcacccttcaccggcgaagtcgagctgcgggacgtcagtgcggtctatcccgttaaggattcagaggcagaggtcggcgctgattttatcggtattaacgtcaacctctctgcgttgctcgatcagacaatccatattcaatccgtgggtgtgagcggattaaagtttcgcggaaagcaatccgaggaagggctttccctggcgggtatcactctgccgggctctgaccaggctgaggaagcaacgcctgacaacggtgaatcagctaatgaaccaggtgatcaggatagtgaccaaaatagagaccaggagagtgatcagacaggcagctccgggcctcttcctgaaggctggtcactccgggtcgacgatatatcgctcacagatgacttgattcagtggcagcaagccgggctggcagtcaccgttgaattaagtgagttatcgacgggcttgttcaattcggcaaccgacgatgcaacgcctctcactttagatgtcactctgcgcgagctgagcgtcgccattggcgaggattctctggtattgcgttctccagtcactctgcgtttgcaggcagaggctcagaaggtgttaacccaaccaaatatttcgggtgatatatcgctgactgcactggcactcgatgcaccgggtattgaaggcgtggaattcaatgcgctggatatcaaaggtgcatctttcaatctgggcgaaagtggtatgaccgcaggtctcagatctttactactgaaaaatgtgcaggctcagttaccggatgatgagaaagcgcaactggaccagttaatgctgagccaggtgagctggcgcgccagtgaagatgacgtcttgattaaagaactttcactcgaaggcttcagtggcaacctggccgggttcccggagttatcgcttgcggcctttactacttcagaagtcagagtcgaaggactctctactcagcctgttgctgatattggccgtgccgcactcgacaccttaagggcgcgtcaccctgaagctggtgttctgcaactgggtaacctgacggttatcggcgttctggcaaatgcagatgagcagaaagtatcctctctggaactgaatgcactgagcgtgacaccgccgggtgaagaagtgccgctggcgtcattggcgcattatcagatcaccgatattacggcgaccccgtcgggttttgcatcaggcgtacatcagttttacgggctggtgtctaacgtgacccgtcttgcagacggcagcattaaaggtgttcctcaagctgaggcagaggcaactcctgagtctggctctggtacagattcgtccgccactgaagatacgacggatgagacagctgccgaagcggtgcctttcagagttcagattgccggtattcagttgctgacagagggcgatgatatacccgctacaaccttcaactggaccgatgaagcggtaacaccgacggtaaataccagcggtaaagtactggagctttcgacgggagcaattgataccgagcagctcgaaagtggcgttgacctgacattgttgcttgctctggatacctacaaccgtatccgtgccagcggaaaaatgggcgtgaaaggggattatccagagggcaagcttgaggtcgatatcgaccagctcaacctggtcgatttcaacccttacctcgtcgacgccatgggttatcgacttaaaaaaggcatgttaggcgttgactcaatcatcagtattaccgacggtcagctcggaggtaatgtgctgattaagctgcagaacagcaagtttgagcccgcagatgaagaaactatcgaccgcctgagcaaacagatatccatgccggttgaaacggcactgtcagtgctgaaagacgataacaacaatatccgcatcgacgttccattgtcgggcgatatcagtcagccagacgtgggcatcaatgacgttatcagtcaggtcagtcgcaaagcgctgcgcacggcgactctctactatctgaagcagtctctcgtgccatacggtcagctcatcagcctggcatcgttcgccggtgatcaactgtttgcgattcgtctcaatgacctcaactatgagccgcagcaactggagttgaatgaagagcatattgcgtatctggataccgtggctgagatgatgtcgaacaagccagagctggaattacaggcttgcccggttgcaagcgagcaggaagttgcggcatggggtgacgcctggtacagcgaggccgttaagcgcggtgcggccgtgaaggcgtatctggcagagaagcaggacaaaaacgataagtcgttatcgggccgggtcacggtctgtgcgcctcagaaaggagacaagccagaggttattctcggcgtctagtgtgggttgcagaatgcttatggcgctatcttgctgattcgtatgcaatttcttcagaaagggttgcgtaatgctaagcgcctgagtaatatacgcaccacttcaggactatagctcagttggttagagcgctaccttgacatggtagaggtccccagttcaaatctgggtagtcctaccagaatttaaaaagccgctgcagcaatgcagcggcttttttgtttctcttcttaagtactcttcttaactactctgctatccgcgataaaggccagaacagtaaaggccaaagggcttctaaactccgagcaaatgagcggctaataccagctcctcgacccgttcctccagcgcgttggcgatatcaatacgctcgaaccgcgaaagagtgtctgcattacccaaagctaacgcattgagatgcagacaaggcgtgagttgatcaaagtctctgaggtcgccacgttttaccacgggaagaaacgggccgcggagttgtttgcgaacgagctgaaaggcagtttctaagggcagtgttctggatttctgatttttcaatctgagattaacaccaacaccatcaggcgtcggatgcagtaacaggcccgtcgcttttaccgatttttctgggatgtgagagtaggtggccgtaaagtcggcagggtcaggaagaatgaccactgaggtttttgtgaagtaagtatcgtagtcagagtacacctgacgaagggctgggctgtatacgggaagaaactcactgaggttcagaagaaactgcttgccgagttccttcgccctcatttcttccagcgaccaatgaaggtctgctgtaatcgccagtttcctttctcgtaaccctgccaccgggagaccttgtgtcaaaataatggctcattcttacccattactcagtcaattggaagaggctttgtcctgatagaagatacttggtccaggttgtagaaaagtaccaggccactactttctatagcggcctgaatggccaatatttcgggtcagttaatggtcaggcgacgctgagattcctgctgcacttttttcggtaaagtcagttgcaggacgccatctttatactccgctgcggacctttcaatatcgacgtcctgtggcagctcgaagctacgcgataccgaaccataatagcgttcgctgtgcagcacgcgttgattatcggacgtactgtcttcctgtttaatttctgccttaattgatacctgtgcgccatcgatatcaacatgaatatcctcttttgatacgccgggtatatcggcatgtatcaggtaattttcaccagcatcagtgacatcaaccttcacgctcttaggtaacgcatcaccatgaagcggttttacgtaaaagccagatgcaacatcgcggaacagatcatcaaacagagatgaacgattaattaaatgagtcatagaagtttctccacaccaaataaaacactcgtgcgcattgcgcatttaaaggtttcgcctggcggatgaagcactcccgggatcgtgcttttccgttcggttacttcttatataaggcaggatttttcacttccaagaggggcaatgcaaaaaagttgatacagatcagtggtgcactgcttgtcactaatctgaaatccttctgtcacggatttgccagatgactgtcaccggatggtaagcgttcgttcttaatgtgttggtgaattttatcaactaaacgcattaaaggtttaatcatgaaagtgtggaaacttacagcactggcagccatggtcgcaggtctctctgcatgtggcggtgaagacggaaatgatggcgctcaagggccagcaggccctcagggcccccaaggtgagcaaggcgagcagggcgagcaagcaccatcgaacgaagataactccatgtcgatcagcattctgcacatgaatgatcatcactcacaccttgaagctgagtcatttgggtttgatgtgtccgagctggggtttgaaacaggtgccgaaggtggagccattgcagaagtggatgtcacttacggcggctttcctatgatggttagcctgttcaacagcctggacatgcagtcagataatgttctgaagctgcattcaggcgatgccattactggcaccctgtattattcgctgttcaaaggtcgtgctgacgccgacatgatgaaccagatctgttttgatgcttttgctctcggtaaccacgagtttgatgacggcgataccggtctggcgaacttccttgattctctcaattcctctgcgtgtgtaacgccaacactggcagcgaacgttaacccggcagaaggctcagccatcgctgaaggctacattgagccttacaccatcgttgaacgtgaaggtcagaaaatcggcatcatcggcatcgatattgcgggtaaaacgaagaactcatcaagcccggacgacggcacgaccttctctgacgaaactacaaccgctcagcagtacatcgatgaactgactggcatgggtgtaaataaaatcatcctgatgacccattatcagtacgccaatgatctcgaactggccgcggcacttaatggcgttgacgtgattgttggtggtgattctcataccttgctgggcgatgagaccttctcacagctgggctttaatacacagggcgaatacccaacggttgtcaccgacgcgggtggtaataccgtttgtgtggtacaggcgtgggaatacgcccacctgatgggcaaactggatgttgacttcgatacagacggtaatgtcacggcatgtgctggtcagccgtatatgccgatcagtaccaccttcgagtatgaatataacgaggaagaaacccgcacccttactggtgccgatgttactcgagtgacaacggctctgacgaaagaggacgaaatcgttgctatccgcccagatgcgaccactcaggctattctggatgtatacgatgaagacgtcgatgtgctgaaacagacagtgattggtactaacgcagaagacctgtgccttgagcgaattccgggacaggggcgctctacgatttgtgatagctcagcgacctacgaaaatggttctgatatctcaaacgtggttgctaaagccttcctgacagtaacgccaactgcggatattgccattcagaatggcggtggtgttcgtgtcgatctggccgccggggatataagcattgctgatgcgttcacactgttgcctttctcgaacaccttggtgattctcgatatgacaggccaacagatcatcgacgtcctcgaagatgcgctggctaacttccttgataacgacggttcaagtggttcgtacccatatgcgtccggtctgcgctatgacattgatgcttcacaggcagaaggtagccgtgtcagcaatgtcgaggtgaactcgcaggttgcaggcatctgggctgccattaacccagcagcaacctatcgcgtagtcaccaacgactttatcgcgtcaggtcaggatggctacaccaccttcagcgtaccgtttgatgcaggtaactatgaagatacctacaccgaatacgcgcagggctttatcaactatgttgaggcactgactgaagacggccagcaggttcagaagctgccgattgaagagtattcaacccagctctttattgatgccgatggctgtaaccacagcacaggcgctggctgtgcaccgcgttaagcgctgattcacaccagtagcaatagacgggagcctcggctcccgtttgtgggagcgaattacctcttctctctgtgggagcgaatcagccgaaggctattcgcgatcacgaaatcctcggtattacacaaccgacgctacttaccccctgtaggaggggagcttctccccgacacgcacgctcttcccgttacgactcctccctccatgtaggagcgcttcagccagcttgtctggctatgcgcgaaatcttcagagccgcgccttctgatatctggattggaatcaccttgagtgagcaaattacctcttctctctgtgggagtgaatcagccgaaggctattcgcgattacgaaatcctcggtattacacaaccgacgctacttaccccctgtaggaggggagcttctccccgacaataattcaatagcgtgcatcaccacttcctccattttcccccccagatcaaacataacctgacagttgcgacgtatgcactcctgcatttcagctgataagctgacctttaataaccggctacggacagcacgtatggacaaacaagtttcctatcagcatcagttaatacttcgattcatcgagcttcgggcactctgggaagggcagatcaatgcctcgcatctgatgcaggaattcggcatcgggcgagacctcgccagtagcctgataaaaaaatacgatcacgccagtcccggcaatcttaactacaacgccagtaccaaaggctatgaaccatcgcgtgattttgtgccgcagtattcaaacggcagcctcgaacaatacctgattggatttcaggctatggacctgccggaaaacaccacaggtctgcaatcggcagacatgttcccgatgcgacagtttgagcgccatcctgagccagagattgtccggcacgtactcagtgccattcgtcagcagcgcagactcgatatatcgtacctatcggtaagtagcaccgactacgaagaccgcatcatcagccctcataacctagtacacaacggcatgcgctggcatgcccgcgcctggtgcgaaaagaatcaggagtatcgcgactacgtactctcccgtataaaagaggtctacaacgacgaaggcgcagcggacaaaacagcccagcaagaccacaaatggaatactttcgtcgacgtgaccatcgaacctgacattcgcctcaaagacaacaaaaaagcggcgctcgcgtttgacttttgcatgacccaagaccaacaagggcgctacacgcgaagttactccgtacgggcagccaacgtgatttatgtgatgcgccatctggggctggatcgtttacgggataagagtgaagctcagcaagtcatgttaacgccggagtcggctgaggcagttgaaccttattggtaaaagcatgctggaaacggtgaagccttagtcaattgcgaggagtgcatccatatggatgcgattttgctaaggtgaagttggttgagtcagtaaaccctgctcattgctgttgcaagctgcgttgtggcattaccggatatacagtgcacagcatcagtgtctgaagtacgctgccaagcccagccaatcatgctaagcggatacagaaaacagtgcaggactgtagtcctgtaggagagccaccggtggatatctatcacattacgttgatcttgaagggtgattataccgagtcagacgccctggaagatcgtttatatgaagcagggtgtgacgacgccaccctttgcttcaacggccgaacggcgtatctggagtttgaccgtgaagccgcaagcgcgcgcgacgccgtggccacagccatcgccaacgtagaagccgccgggtgtcaggttgctcactcagagcagggcggatatgtgacactggcatccgtggcctatctcagtgagttaccgatcaaaacgctgcgcgcctgggcaaacggccagcgtggtaaaaagttagaagcgagctttccggcaccgcactttggtatcagcagtggctcggccgtgtactactggcctgaagtggctgcgtggctggtaaagaacggcaagcttgaaagccgatatctcgaagtggctcaagtcgtaactgaactattaccgttggcaaagtgagcagcttaaaacagaacatactgatctgagagtgcgttaacctgttggaaaatccgacatgtgcgtttgtacagtggttgaacacaccgtagattaatcaaaaaatgacagaaattgagaaaaggaacttacgatgactgactttaaaatcatctctccaatcgcgattgaccttggtggtctttatacaggcctgtatatggcgcaatacccttttggtgaaagcctcgctcagcatcatggcaagttgaccacactggttatgccagaagagggaggcaagatgacttggtcgcaggcggggcggactgccacccggcaccgaatacgttccaacaagcgtagaaagcttgcgaagcgtttattgaaagtgacctttacacaagggctgtcgtacaaactgaatgattcagaacttgaggccttgaatggcttgctgaaccgtaggggctataacagaatagagaccgagattgatcgtagacctctcgagacggttcctccttcttggatcgccaatgagttcccagaatttttcgtcagtagcattgctatatctgaacagttggaagaactactggaagatatacccaaacttcgtgatttagcagctactgagaaatttaatctaaacaatcgcgaagctaagaagcagttattcgaaaacgcagaagatgagaaagttgatcttctgaaagcctatggggttttacaggcaacggtgtccgagctgctgaacagtatcgactttggtcatcagcaccgtcgaaaataccttgaagcgataggtaacgaggttttgaaggattctcgcctggcggagctacgggctaagttcggggcttccgctctcaagaatcttatcggcaacatcagcaatctacagttgcgagcgctgcgatggtacttcaacgatacagcaatgaagggcgcagattactacgacggagagcgctttaagtcggtatatgttcgttggctgcaaaactggcatgtagacgaagaaacacgggttaatcgtaacaatgcattaaaagtgattcatccatcagaagatattctgacggcgttgatgacgatagatgcagatctgacgataccaccctatgaagatcagaataaccgtcgaccaccaaaagaccagaccttatggcttaacccccagtcactgaacgagcaatatggctcacagtggcgtatatgggttaataatctgcgcaagcgtaacccggaactggcagaaggcatcgcgccgattcttgagtttactgaccgccgctcacgtttgataaccaataagcagcgcctgactgatacgtctttatatgcagacagctactttcttcagcgcctgttggatcggagtaagattcacgataactacgcactccgggcgatatcaaagaacttcaagtcaggaaaactcgatagtttccgctggagtctgaagcaggatctgggagatcagcatacagaaaaatttcttgatctcactcagaagtattaccgggaagtggaacgcgcaaaaagtggtatctgggagcaggagtctgcatcactgcttgaaaaagcggatattaaccctccctcaaaacgaaagattctgaatcggttagtagggaatattcttggcgttgaaatgaacgctgaagaactgaccacctttctgtcagacgtatggacgaagaaagttcatggcccatcaacggtaaagagtatttgtaaagctgccgaagaccttagaaaacagaatggcaacctcttcaatatgtacgtccagtctgtgcgatatcgggcgtcggtcgaagcaggcgcagagaagagttttaaaggtctggataaagagatttggcagcttctggttaaagtcgagaaagcagtagatgttattgctgactcaatttctgcgaccgaaacccagaaacaaagattgagcaatagcttttcacttgctcagttgtacaccttgatagaaacagaccggaacggattctcaaaggtcagtgctgctgcacacatggagcttgcatggcgtatgacaatgatcccggtggacgataaggaggccgcacgttgttcgcgcttaccggcagacagctctcgaccattcgatggtgtgttgaggcgcttgctcgaacgtcaggcttatgaaatagcgatgctgaaagtagagcagataaaagaatcaggtgtcagagattctgaaattaacatcccggtggtagtagaagaaaaccgctttacgttcagtattggacttgcagatgttaaaaaagatggggcgaaacgaaaaaagttattatcgctgggtgagaagcaactggaaaagtggcaagaaaaaaatgaacgtatcaggcagggcggaagtggcctgtgcccatataagggaacaaccctggataaagatgctgagctggaccacatcattccacgctcatatagtcgtgatgcgtcaggcacaatcttcaatagcgaagccaatcttatctacgccagccgccgtggcaatcaggaaaagaaagaccaacgttacgggatttctgatttagcacccaactacctcaaggccgtctatgggacgtcagattcggcaaagataacccaggttatcgaagcgtctgtggctactattaagaaagacttcctattctcggagctagcaggtgatcagaaaagggatgtccgtcatgccttatttctggagcgcaattcaaaggcatttgagaaagtattcaggcgcctggcaactcaacagagcgcgcgagtgaacggcacacaagcatggctggctcgaaaactgatcagtgttcttagaggccagttgaaatcatggcagtctgacacgggtaacactctcgtctttgatctgtgtaaagcggatgctcagcaaacatcgttggttcgctcggggcttgcagtcgcaaagcctgaaactgtcaaaggaaatcggcagggcgtagggtctcacgccatagatgcttattgtgcattttcagttgctgccgctgaaggcctgcatgaagcgttggcacagggcgcaggtttgatggaagattccgaatggctcgcacaggcgttacctgctgaagtcgatgtaaattggactgaaagaaaaccgcgttatcgtaaagatgacatatccagtcagccattattcaaagaggggatttatgcagagtcatttctgacgacctgggtttcagagaaaggaatcgaatccggcttctcgttggtaagcaattctgtgcaatggcaaggcaaggagactcgtggattactagagcttatcgctccctttgccaaggagaccttgaatgtcgataccgccctagctagctctcgccctgtacaggtagatattgataaagaaaaagcctttaagcacttcgagagtgtggcaaagggcccatgctctgaggtggagctacgtcaggcagatattcttgatgccctcagatactctacggcgaagaaggatatcagctcgcgtctgattgacgcgcagaagaacacgctcaaaaatccaggagatgtagtaaaggcaaaagactttgatgtgaaagttgacgttaacgttaaaggcctgggcaagctaaagggtaaagtcgctcatccggcgattgagcaatggaaagaactattccttcttccagaaatagaatcccacgttggggaaaaagcgtcaggcattaactggcaaaaaataggtaaaaaatactttggtgaaggatcttcccgcccacacagtaaaacgcgaagagtgtattcgctacctgtagtggatagtccatctggtggttatcgaatcaaaagaactgctccgaacggttcaagtatctggcaactcatgagtatcgagggaaccggttctagcggattcgcagtaaacgaaacaggtgtcaactggaaacaagcggtcgctattccagcgctgcgtgactcttcggtcgttgggattggcgagcgttatcagcctgttccagagcaccaagtatacttcgatgattggaaatgcttagacacaacggatgaacgtgtgttgtcagtctcaatggctcctggcactaaagatcggcgctatgtctcaatcagtcaggctctagctgattttaaggcatggttaaaagagagtggtgtagagctgcaatccccattcgaaataccttctgaaattaaagtggatggcgctaaatttcaaaaggcgcatggcatcgacgttcttggaaaaccaagatcgaatctgtttatttcgaaggtcggggatgtcgttaactactggtacatcgtagaaagcagttctgccgcgatgaatcagtgttacgacaaggcactcttggcagagcgtgaagcagttaacgagactgagccatgcgacatctgacgattgctgattatggtcagtttgtcggtgtaaccggagagcggctggttgtcagggatgacgccagcataattctcgaaacgccgttatctcgcctgcgaagcgttgctatcgctcgtgacggtgtaagcttttccagtaacctgattactgcttgcgcagccaggggaataagacttttctttcttgattggaaaggtctggcagtggctgcagtgacaggcagacatcaacatgcgattgctaatgtccggcgtcagcaatttctctttcaggcagagccagaatccagagcggttgctgcgggaatgattttcggaaaaatccgtaatcaacgggctgtactcctgtatttcgctaaatatcacaagcaacatgcggctgcggtaaagcaggtcgccgaaagcatgtctgatctcgcgagacgcctgaaagataccgattggagaacccggtcagaatggcgatcggagatcatggggatagaaggtgcagcggcagcggcctattggaagcatatgaaagcttcgggctggctgggcaatacctttactgaaagagaggggagaggggcgaccacactcagtaataaactgctgaactatggatacacccttctgacgagctatatctgggctgcactggataatgccggcttcgaattatattcgggatttctgcatcaggagcgtgcgggtaagccagcactggtattggatatgatggaagaataccgtgcctgggttgttgaccgccaggtcgttgccatgcgctccgctattgaagccgaaagtgatattacgccgaagctcaaacggcgactgagtaaggcgatacaggagtgtattgcgacacgatacccttaccacggtaaaagactgcgtcttgataccattatgcaacgtcaggcttatcgactggcggcaagtgtaatgggtgaaaagcgatatcagccgtaccgcttcaagtggtgaatattgtggctctatataccaagtacctcgtctgctatgacattgtgtcaaataaaacccgtcgaaagttcgctgattttctcaaggatatgggattgtttgcgatccagaagtccatctttattggcgagctgagcagagcagaactaaaagcactcgaacgctatgtcaataaacacatggatggtggagaagacagggtcttctggatgcctacagatcttgatgaaaagcgtttgaaaaaaggagttggctatgaccacttcagaattatctccgccgatggccacatcgttatctgaatcaaccattccaatcagtttgttaaggcaatattgtttttgtccgcgtattccgtattttcaggaagtgatgcaactccagttgacagagaagccatggatgaagcagggggtcgatcatcatcagcgccagaccatgttgtcacgtcgccgcaacctgtctcgttttggtatcgcggaggctgccagggttctaagcgacgtttatgttcgctctcaaaaacttggttgtcacggtattgctgacatgatgcttgaaacggcggcgtcgctatatctggttgagtttaaaatctctgagcataaacccgtaaaaggccatatcttccaagtggctgcttatgcgattgcagcggaagagcaattccataaaccggtagcgggcctatatattctgtacggggatagaggcaaaacttttgaagttcaattatcggcggcacttcgcaggcaagttgaaaccatgctgtcgagcgtcaggctgttgctgaatggtggctcgatgcccgattcaccggcgtcagcagaacaatgtgggcagtgtgaatacctgaacttttgcgcagatcgggacgattagcatggctcacaaaaagaaaaactccggatgccgaagcaggtgccggagtcagtcatgattttagatgatttcagctcgcccgtggacgacttcaatcaggcctattgggataggtcagaccagtatccccgatttttcgcaaaaagcaacccttttgaggcaaatgcacactttgcgaacaattcagcttcacgccccaatgtaaaaccctttaaaatcatagggttaggggaggggttgcaaagcctatcccaataaacctgcaactgaaacccctgagcgcagaccgtgctgaacgttaaacaagttgcaaagcctatcccaataaacctgcaactgaaacaaccagccaccaatcgcttcgtacaggtagacgtgttgcaaagcctatcccaataaacctgcaactgaaaccggccaactgatggcactggtcgcctgcctgggagttgcaaagcctatcccaataaacctgcaactgaaactacggtaagcatggtgtgcagcctggcgactttgcgttgcaaagcctatcccaataaacctgcaactgaaacaacgggcatgtcaccgggtagcatgcgcctgtatgttgcaaagcctatcccaataaacctgcaactgaaacgcaacactgccatccgggccggtggggctaaccatgttgcaaagcctatcccaataaacctgcaactgaaactgtctgagccgctatctccgaagccgagtaaccctgttgcaaagcctatcccaataaacctgcaactgaaactgctctgggattccagcaagatgtacgacaacggttgcaaagcctatcccaataaacctgcaactgaaacggcgaatagcccagcccctccgggcagacccagatcgttgcaaagcctatcccaataaacctgcaactgaaactgcttgtccactcgcaacgctttgccgtgctttatgttgcaaagcctatcccaataaacctgcaactgaaacatacctgaacgtgacggtgttgtgagatacttcatgttgcaaagcctatcccaataaacctgcaactgaaacaccgttattattcccgttgttacggttggggcggttgcaaagcctatcccaataaacctgcaactgaaaccgcattatggcgctggtatggcgcgagaaaatcggttgcaaagcctatcccaataaacctgcaactgaaacatgaagccatcgtcgaaaccgtcatcgctggcggttgcaaagcctatcccaataaacctgcaactgaaacgttgatattcttcggaagtagcgcacctgtgccgttgcaaagcctatcccaataaacctgcaactgaaaccctcccggttacgctcatttctgacgttttcccagttgcaaagcctatcccaataaatctgcaactgaaacccagagtcttctggctcatacatggctcgccctgttgcaaagcctatcccaataaacctgcaactgaaacctgaaacgtcgaggtgcacgtgcaaagcctatcccaataaacctgcaattgaaactcgatgttgcagcgctgggtttgggtgcggcggttactacaattggctaccgcacaggcagctaggaaaatggttgtgtcgttatattatgggttcttatattgccaagactgtaatactatttgccatgtttgattatacacagtttctccattgtcaagggatagagaaaatgagtgctattaaggaaatactaaaagatacgatggccgatgctaaatcaaaaagccatggagatgatagttacaaagtcttcaagcgtgttgagtcgagattttccagaatgaacaggtcccgattagccgcaaagctcgaagagtaccgtgaaggagggtttcagctcaccgctgctgagctatttcgtgagagccactcatctgagaagttgggtaaatttctaagggtgactggtttttcccgaccaggtcctcgctgggaggcacaccatatcgtctcggcaacacatcgagaggctgttccagtgcggttgttgatctcagaagatgacttctcaataagaattgatgatcctgacaacggtacgtggatgcctaaaacaaaggctgacgccagaccaacaatttacccagacgctataggacataatagaattcataggcaacgatattatcgttggcttgagcactcaatcggggcattgatggatgacgcccaagtcagagcttttctcaatactgtgcgatctcaactcttacatggaaacattaaagacgaaattaagcttcaacaagagattgatgaagctgaatacaacgattggttgaagaagaatacttgaaaatgatttatcaattggaagctgactttgaaacattctactcttttgactttgatgtagaagatttactcgagaaaatgcctggttacagccagaggtttcgggcaaaagctcgattgcccggctgggtcgagccccaagggggattctataaaggtagtggcttcattggtgacgtagagtgcataccagatatttcaatatgggctctcggaaatctgttactaaacgagagagcttatgaggttctatctgatcacattgacggtgccggtgagtttttgccagtacaggtcgacgataaacaatactatatgttcaatacgttgcatgttctaagcagtcaagtggttgatcttacagatgctgtcgaagtaatagactctggtgttcatctaggggtgtcaggattgaaggtcattgaagacaatctgaatgatgttgatgtttttaaaatgaaagaggagaagttgattcatagttttgttactgatggatttaaacgcttgtgcaatgatgcagggcttactggccttagttttcgatctataaatggagtttgaagtgaaagtatctgatgtatctatctcgatgttcgaaaagcttcttcgggaatctgtatttcctgaatacagtgcggtggccaatgctgaggaaggggagcaggttcatatttattcatcagaatatttccccgtcgccacatcgagataccctctgagtttcaaggtgacggcaagatcggtaagtcatggagagttgcttaaaaaggtgacaccagagtcaataacttctgttttgggtacgttccgggagagtcttacagatgctgaagagtgtgtttttcagatcacaaagtattcaacccatattgagcaagaaacgggagctttcaagctttggtgtgaggtcaaccttagcaatctcaattcggaaattgtgcaaaacagctggtgatatggatgctgcgtaatcgcgaatagccttcggctgattcgctcccacaatgaatgtgaagtgtcgagagtacagtgggtatcgcacaacgtttgcttgggtggtgagg

SEQ ID NO: 155 - DNA, 16204 bp, synthetic construct
  misc_feature 1..16204: note = Synthetic
  source 1..16204: mol_type = other DNA
tgggagcatcgactttgattgtgccgacgaggttttcgccgttacggcgtccccaagtgtggacgaactcatctggagttatcttggcggcagcgtgccggaatacaccagcgtggttgatcacctgaaccgtaatctcggacttcgcgggacctggcaaagtgactctgccaccctcagttttcttacagataatgcctttctgtatatcgacgaccatggatatgagtacggccagtacagccatgactctgccgccgcgagcgtgacactatccgtcacgctggattacaacggcgatgccggtgtcggcccgcagaacgaaatcagtatcgaacagctcaacaccacgacgctcatgatttcagacagcgtgatacctgctgactatcgtcgcaccacgcaaaacctgcagggccttcaggacacctggctatatatcgatgcggacaacaatgaccgctacatactcctcttgcttgaggatggtcgctaccagctgacccgcgccagcgaagaagatggcggcggcgttgatcagggcagctggaccatgcagagcggcaagctcgcacttaccagtactggtggcgacactgacgtgttgggcacattcgcgacagacgaaacatcgcgcagctatgccgccttagtgtcggacgacgagcttaccctcagcgttgacgttcccatcgtctttgtccggcagtaggggatgactttcatccccataccttcattggtcatgcttatatcttcttctgtcatccccgcgaacgcggggacccagcgctccaccaatgccgccgtggcttccgttaagtatcatcccaataataaaaatgtaatcgtcatcccaataataaaaatgtaatcgtcatccccgcgaacgcggggaaccactccactaacgcttctccgacgatgtcgccatacgacacatgcaacctacctgatacgtcgatatactcaaacactatcagagcgcagggagcccaaatggacgacaccagacacctgtcatatcaacaccggctcatactccggttcatagagctgcgcgctcggtgggaaggacaaattaacgctacccacctgatacacgaattcggcatcgggcgagatctcgccagcaacctgatcagaaaataccaccacgtcagccccagcaacctcacctacaacgccagcaccaaaggttatgagccatcgcgacaatttaccctccaatattccaacggtagccttgaacaatacctgatggggtttcagggcatggacatgccggaaaactccacatgcctgcagtcgtcggacatgtttcccatgcggcagtttggacgacaccctgagccagagattgtccggcacgtactcagtgccattcgtcagcagcgcagactcgatatatcgtacctgtcggtaattagcaccgactacgaagaccgcatcatcagcccacacaaccttgttcacaacggcatgcgctggcatgcccgtgcctggtgcgaaaagaatcaggagtatcgcgactacgtactctcccgcattaaagaggtctacaacgacgaaggcgcagcggacaaaacagcccagcaagaccacaaatggaataccttcgtcgacgtaaccatcgaacctgacatacgcctcaaggacaacaaaaaagcggcgctcgcattcgacttctgcatgacccaagaccaacaagggcgctatacccgaagttactccgtacgggcagccaacgtgatttatgtgatgcgccatctggggttggatcgtttacgcgataaaagcgaagctcagcaagttatgttaacgccggagtcggctgaggcagttgaaccttactggcgttgacctgctggaaattccggcatgtgggtttgtatagtgattgaacacgccatgaattaatcaaaaaatgacagaaattgagaaaaggaacttacgatgactgactctaaaatcatctctccaatcgcgattgacctcggtggtctttataccggtctgtatatggcgcaatatccgtatggagagagcctcgctcagcatcatggcaagctgacaacgctggttatgccagaagagggcggcaaaatgacctggtcgcaagcggcgcggactgctacccggcaccgcatacgttcaaacaaacgtagaaagctggcgaaacgtttactgaaagtgatctttactcaagggctgtcttacaagctgaatgatgcagaacttgaggccttgaatggcttgctgaatcgtagggggtacaacagagtagaaacggatattgatcgccaacctcttgagactgttcctccttcctggattgccaatgagttcccagaatttttcgatagtagcagtcctatatctgagcaattagaagaactactggaagacattcccaaacttcgtgatttggcggctgatgagaagtttaatcttaataatcgcgaagcaaagaagcagttatttacagacgcagaagacgaacaagcagatattctgaaagcctacggtattcttcgggaatcagtaacagagttgcttaacagtatcgacttcgggcaccagcatcgtcgaaaataccttgaagccgtaggtaaagagattttgaaggattcccgattagcagagctgcgggctaagctcggggcttccgccctcaagaatcttattggcaacatcagcaacctgcagttgcgagcgctaagatggtactttaacgataccgcgatgaagagtgccgattactatgatggcgaacgcttcaagtcggtatatgttcgttggctgcagaactggcatgtggacgaagaaacgcgagttaatcgcaacaatgcattaaaagtgattcatccttcagaagatattctcacggcgttgatgacgattgatgcagaactgacgattccaccctatgaaaatcagaataaccgtcgacctccaaaagatcagaccttatggcttaacccccagtcactgaatgagcaatatggctcacagtggcgtgtatgggttaataatctccgtaaacgtaatccggagctggcagagggaatcgcgcctgttcttgagttcactgaccgccgttcacgtttgaaaaccaataagcagcgcctgactgatacgtctttatatgcagacagctattttcttcagcgtcttcttgatcgcagcaggatccatgatacctacgcactccgtgcgatatcaaagaacttcaagtcagaaaaacttgaaaaattccgctggaacctgaagcaggatctgggagatcaacatacagaaaagtttctggacttcactcagaagtattaccaggaagtggaacgcgcaaaaagtggcatctgggagcaggaatcggcatcactgcttgaaaaagcggatattaaccctccctcaaagcgaaagattctgaatcgattagtagggaatattcttggcgttgaaatgagcgctgaagaactgaccacctttctgtcagacgtatggacgaagaaagttcatggcccatcaacggtaaagagtatctgcaaagctgccgaagacctgagaaaacagaatggcaacctcttcaatatgtatatccagtctgtacggtatcgagcgtcggtcgaagcaggtgcagagaagaaatttaaaggtctggataaagaaatttggcagcttctggttaaagtagagaaagcagcagatgtgatttctggttcaatttctgcgaccgaaacgcagaaacaaagattcagtaataccttttcacttgctcagttgtacaccctgatagagacagaccggaacggattctcaaaggtcagtgctgctgcacacatggagcttgcatggcgtatgacaatgataccggtggacgataaggaagccgcacgttgttcgcgcttgccagcagacagttctcggccattcgacggagtgttaagacgcttgctcgaacgtcaggcttatgaaatagcgacgctgaaatcggggcagataaaagagtccggtgtcagagactctgaaataagcattccagtggtggtagaagaaaaccgctttactttcagtattggccttgcagatgtaaaaaaagatggatcgaagcgaaaaaagctgctatcgctgggtgagaagcaactggaaaaatggcaagaaaagaatgaacgcatcagacagggcgggagtggcctgtgcccttataagggaacaattctggataaagatgctgagctagatcacataattccacgctcgtacagtcgtgatgcatcagggacaatcttcaatagcgaagccaatcttatttacgccagccgccgtggcaatcaggaaaagaaagaccaacgttacggcatttctgacttggcacccaattacctcaaggccgtctatgggacgtcagattcggcagagataacccggattatcgaagcgtctgtggcgtctattaagaaggacttcctcttctcagagctagaaggtgatcagcaaagggatgtccgccatgccttattcctggaacgtgattcaaaggcatttgagaaggtattcagacgcctggcaactcaacagagcgcgcgagtgaatggcacacaggcatggctggccagaaaactgatcagcgtattgaaaagccagttgaaatcctggctgtctgaaacgggtaatacgatcgtctttaacctgtgtaaagcagatgctcagcaaacatcgttcgttcgcaccgggcttgcagtgacaaagcctgagacaaccaaaggagagcgccagggtgtaggatctcacgccatcgatgcctattgtgcattctcagttgcagccgctgaaggcatgcacgaaacgctcgctcaaggcgcgggactcatggaggataccgagtggcttgcaacggcgttacctgttgacgttgatgtgaattgggttaaacgcctacctctatatcgcaagtcagaactaagtactcggccaatatttaaagaaggaatttatgcagagtcatttctgacgacctggatttcagagaaaggaattgaatccggcttctcattgggaagcaattcggtgcaatggcaaggtaaggatactcgtgggctacttgaattactggcaccattcgccactaaaaatttaaatgtcgataccgccctggcaagccctcgccctgtacagctagatattagtaaagaaaaagcgttcaagcacttcgaaatggtggccaaagcgccgcattcagaggtcgatctgcatcaggcggatattcttgatgctctcaggtattgcaccgcgaaaaaggatatcagttcgcgtctgattgatgtacagaagaaaacactgaaaaaaccagaggaagtgctaaaggctaaagatatttacgtgaaggttgatgttgacgttaaaggcctgggtaagttaaagggcaaggtcactcatccggcgattgagcaatggaaaagactattccttatcccggacatagagacacgcattggggaaaaagcggtaggcattaactggcaacaaattggtgaaaaatactttggtgaaggatcgtcccgcccacacagtaaaacgcgaagggtatattcgttacctatcgtcgatagccctgacggcggctatcgaattaaaagaatagcgcctgatggttcaacgatctggcaactgacgagtatcaaagatacgggatctagcgggtttacggtaaatgacaagggtgtaaattggaagcaaccagtggctatccctgcgctgcgtgattcttcggtcgttggggttggtgaacgttaccagcctgttcctgagcagcaagtatacttcgatgattggaaatgcgtagacataacggatgagcgtgtgttgtcagtctcagtggctcctggtactaaagatcggcgctatgtctcagtcagtcagactctatctgattttaaggcatggttaaccgagagtggtataaaactacattcgcctttcgaaattccctcaagagtcaaagtggatgctgctaaattccagtcggcacatggcattgacgtactaggaaaaccgaaatcgaatttgtttatttcgaaggtcggggatgtcgttaactattggtacatcagagaaagtagtcctgttgtgattaatcagtattacgacaaggcactcctggcagagcgcgaagcagttaacgagaccgagccatgcgacatctgacgattgctgattatggtcagtttgtcggtgtaactggagagcggatggttgtcagggatgatgccagcataattctcgaaacgccgttatctcgcctgtgaagtgttgctatcgctcgtgacggcgtcagcttttccagtaacctggtgactgcttgcgcagccaggggaataagacttttcttccttgactggaaaggtctggcagtggccgcagtgacaggcaggcatcaacatgcgattgccaatgtccggcgccggcagtatcagcgccaggccatgttgtcacgtcgccgcaacctgtctcgttttggtatcgcggaggatgccagggttctaagcgacgtttatgtttgctctcaaaaacttggttgtcacggtattgctgacatgatgcctgaaacggcgacatcgttatatctgattgagtttaaaatatccgagcctaaacccgtaaaaggacatatcttccaagtggctgcttatgcgatcgcggcggaacagcaattcaataaaccgatagcgggtgtatttattttgtatggagataaagggaaaacgtttgaagtacaactgtcagcgtcgcttcgccggcaagttgaatccacggtaacaagggttagctcattactgaatggtgcctcaatgccagactttccggcgtcagcagaacagtgtggtcagtgtgaatatctgaacttttgcgcagggggacgattagagtggctcagaaaaagaaaaaccccggatgccgaagcaggtgccggagtcagtcatgattttagatgatttcagctcgcccgtgggcgacttcaatcaggcctattgggataggtcagaccagtatccccgatttttcgcaaaaagcaacccttttgaggcaaatgcaccctttgcgaacaatccggcattgctccccaatgcaaaattcttaaaattcaaagagttaggcgaggggttgcaaagcctatcccaataaacctgcaactgaaacgacgtccagacgatgatcgagaaaattctcgaccgttgcaaagcctatcccaataaacctgcaactgaaacgtgccatccaattctgattcagcggcctgcacgggttgcaaagcctatcccaataaacctgcaactgaaacttactgatgttattttcttccgtaagcacagtgccggttgcaaagcctatcccaataaacctgcacctgaaaccctgctgactctgcgttgccgcctgctgctgcatgggttgcaaagcctatcccaataaacctgcaactgaaactgcgtcgaagcggcgttacgcgctccttttgcgtctgttgcaaagcctatcccaataaacttgcaactgaaacacaagggaatgtctgactatgccggctttctggtgttgcaaagcctatcccaataaacctgcaactgaaactggatgcgggattatatggggctgcctgatcgtagttgcaaagcctatcccaataaacctgcaactgaaacggtttgatagaccacttctgaggttattcttatggggttgcaaagcctatcccaataaacctgcaactgaaaccctccctgtggcatgcatgaccatgatcacgcgcggttgcaaagcctatcccaataaacctgcaactgaaacaacatttctgctgagcctttcattcacccgccctagttgcaaagcctatcccaataaacctgcaactgaaacctgtctcgttggtatgtgtttatattacgacctggttgcaaagcctatcccaataaacccgcaactgaaacctatgtgcgcccggtaatcactgtgggcacggctgttgcaaagcctatcccaataaacctgcaactgaaacattaaaagccaccatcgccgccgccaaactcaagttgcaaagcctatcccaataaacctgcaactgaaacacgatcaacgtctggagtttcttccgcgcgtggttgggttgcaaagcctatcccaataaacctgcaactgaaacttacagcctcgacgagctgctgatcctgaccgagttgcaaagcctatcccaataaacctgcaactgaaacggtagcgcataagcgcatcgtgcacctcgacgttgttgcaaagcctatcccaataaacctgcaactgaaacgtaccgtcgtgacggtcgatgcggtcaataccgatgttgcaaagcctatcccaataaacctgcaactgaaataccgaagccaccctgatttatttataataaaccggttgtgtagtctatcgaaaaaaaccgctactgaaaacgaattcctgaggaatacgttgatatgttgtgtagcatatatcaattgtattaatttctgtaggtcgtttcgaagtgactgttttatcttactatctttcaatggtgaggcaataatatatggccgtgtcgctatgataagggttcttatatcgacgtgattgtaatactattctatatgtttgagtgtatatggtttcttcgttttcaagggatagagacaatgagtgctataaaggaagtattgcgagatacgatggacgacgctaaatcgaagagtcatgaggacaatagttatagggtcttcaagaaggtggagtcaaagttcgcaaggatgaacagttcccgtcttgcctcgaaacttgaagagtaccggaggggtgggtttcagatgaccactgcggagctattcagggagcgacattcgtcggagaggctagggaagtttctgagggtaactggtttttcccggcccggtcccaggtgggaggctcaccacatcgtatcggcaacgcatcgagaggctgtggcagtgcgattgttgatttcggaagatgacttttcgatcagaattgatgatcctgataacggtacctggatgcctaaaaccaagttggatgcgcggccaactatttaccctgatgcaattggtcacaacagaatacataggcagcgatattaccgctggcttgaacatgctataggtgcattgatggatgatgctcaagtcagggcttttctgaatactgtccgtactcaactattgcacggcaatattaaagatgagattaagcttcagcaagagattgatgaggctgaatactatgattggttgaaaaagaatatttaataatgatctataaactagaagctgactttgagaatttctattcttttgattttgatatagatgatttgcttggaaagatgccagggtatagtcagaggtttcgcgctaagccacgattgtcagagtgggttgaacctgtggggcagttttataggggggaagggtttaccggtgacttagaaaaaatcccggatatttcaatttgggctctggggaatcttgtgatcaatgaactggcttatgagttgcttttcgaaaatatacgtgatgctggtgagtttttacctgtgatggttggtggtgataaatattacatgtttaatactttgcaggtactaaacagtgattcggtagatagcagcagcgcagtgagcgttatagattctggtgttcacctgggcgtgtccggagtgaaggtctgtaaagaccttttaagtgacgttgacatttttaaaatgaaggaagagaaattaattcatagttttgctactgatggattcaagcgtttgtgcgaggatggagggctgacgggtcttaattttttaaatgtaaacggagtttttaatgaaagtgtctgatgtatcggtagcaatgattgagcaggttttacgagatggtgtgttctctgaatatcgttcactggccagtaccgaggatgaagaggtcagggtgtattcgtcggagtattcgcctgtagaaaaatcaagaactcctcttatatacagggttggtgcgaaatctgtagtgaatggcgaggtgcttaagaaagtctcgcccgaatctatcgttgcggcacttgggatcttccgagcggagcttgaagatgcaaccgagtgtctctttcaggtgaacaactactcgacagagagtgacgctgatactggtttgttccgactatggttcgagattcatctgtgtaatctgagcgtagaagtacagaaccggagctggtgattgttgatatacaggacgctggattaccgcgttcgcggcaatgacaaggtgtgcgctggattaccgcgttcgcggcaatgacaaggtgtgtgctggattaccgcgttcgcggcattgacaaggtgtgcgctggattaccgcgttcgcggcaatggcgaggtgtgcgccggattaccgcgttcgcggtaatgacaaggtgggcgtttgattaccgcgttcgcggcgatgacaagaaggtgtgtgctggattaccgcgttcgcggcaatgacatgtctgcgcggcaatgagatgtcggcgtggagatgacacccccattcgccgtaacggtactcctcaggtatcatgccggctttgtttgtgtgtgtctgaggtgcgtctcttgtctgattcttctgctgtccgtcttacggagtacagtcacggtgcgggttgtggctgtaagatctcgcctaaggtgttggatactattctggcatctcagctgagtctgccggatagcccgaatcttctcgttggcaacagttcaaaagatgatgctgccgcctacgacattggcaacggtcaggcggtgctgagcaccactgatttctttatgcccatcgcggatgatcccttcgattttggccgtatcgcggcgacgaacgctatctcagacatttatgccatgggtggtaagccattaatggcgattgccattctgggctggccggtaaaccttctgccaccagaggtcgctcagaaggtggttgatggtggtcgtcaggcctgtgccgatgcgggtattccgctggcgggtggtcacagtatcgattcgcctgaaccgatttttggcctggccgtcaccggcatcgttgatatcgacaagcttaagcagaacaaccgcgcgacggctggctgtaagctgtacctgtctaagccattaggtgtcggtgtgctgactacggcgcagaagaagaaacttctgaagcctgagcacgagtttctggcgcgcgatacgatgtgcatcctgaataaagtcggggagaagatctccgcgttgccgggggtagaggctctgactgacgtcacaggctttggccttggggggcacttgcttgagatctgcgagggcagtggcgtgaatgctgtggtcaactacaacgcactgcctgtcatggctccagtcaaagactatatcgcgcagggttcgatgccaggcgggactgatcgtaacttcgatagttatggcgagaagctctctgtgttaacggatgaacagcgcgcgatcgtctgcgaccctcagaccagtggcggtctgctgattgccgtacgcccggagcaagctgccgaggtcgaggccattcttgcggctgaaggtctgcagaacacttgcattggtgaactggtggaagcgtctgatggtctggtgcgggtcgaggttcgtgcatgagccgtgcagataccgctgatttcaaagccctgtttctgaaagatacgcccatgatggatacgcgagcgcctcttgagtttaagaagggtgcgtttccacatacggtgagcctgccgttaatgacggatcaggaacgggcgaaggtcggtacctgttataaaaagaagggtcaggacgaagcgattaagctcggtcatcagctggtttctggcgagaccaagcaggaacgtctggaaaagtggctggccttcgccaaagcgaatccagacggctatctctattgttttcgtggggggctgcgcagtcagatcacccagcaatggctgaaagacgccgggtgtgactatccgcgcatcaccggtggctacaaagccatgcgtcgtttcctcattgataccctggatcgcgtcgcggttgagcagccattgattgttgtggcgggtgaaaccggttgcgccaaaaccgagttgattaaacaggtcaacgggcatgtcgatctggaaggcattgcgaatcatcgtggaagcacgtttggcaagcgcgccacggcgcagcccccgcagatcggttttgaaaacgcggtggcagttgattttctgcgccacgaagacacgcatcctgatcgcccggttgtgcttgaagacgagagtctgctgattggtcgctgtgctttgccggaacggctgcgcgctgaaatggcgaaatcacctctggctgtggttgaagcgacgatggagcaacgtgtcgagcacagcttcaataattatattctggataaactcgctgaatggcaaagcgaagtcggcgaagaagaaggttttgctgccttcgctgatgacctgcgcaccagtatgggtaaagttgagcgccgtcttggcggcgttcgccataaggccatgactgagacgttagaagcggccctggctcagcacgaaaggggcgacccaggcctgcatcgtgactggattcagcccatgctggaagagtattacgatcctatgtaccgctggcagttgagtaaaaaggctggccgtattctaattcgcggcacattcgatgaagtccgtgacttcctgaactccgattcggtaaaacgataacttttttaaacctttgactaacccctaaataacacaggaaaactcgatgaaaatccgacaatggatgctgggtggtctgatgaccttactggcaacaagtgcactggcagaaacttttaccttcactgcgatccctgatgaagatgaaagccgcctgaatgagcgctttggtaaggttgcagactatctggcagcggagttgggtgtcgacgttaaatacattcctgtgaagtcgtaccctgcggcgatcacggcattccgtaatgatcaggttcagctggcgtggtttggtggtctgtcaggtgtgcaggcgcgtgaattagtgccgggttctaccgcgattgctcagggttacgaagaccagttctttaaaacttacattattgcgaacgtatcgaccggcctggaagcgtctgaagaattcccgcagggcattaaaggtaagacctttacttttggttccaaaggttcgacctctggccgtctgatgccggaatttcatatccgtgaaaacatgggcgcgccagaagacgtattcgcgcgtgttggtttttcgggcgatcacagccgtactgtcactcaggttgaaagcggtgcctttgaagtgggcgcggtgaactacagcgtttacgataaccgcgtcgcagagggctcgactgaccctgagaaagtaaaagtcatctggaccacgccgacgtacccggattatcagtggacgatccgtggcgatgttgatgcccgttatggcgaaggttttactcagaaagtcaccgacgctctgctgaatatgaaagacaaagacctgctggcgagcttcccgcgtgaaagctttgtaccagccagcaacgacgattacgcgcctattaaggcaaccggtgaagccatcggcctgctgggcgagtaattttcgtgtttgaactttctcacgcatcgctggatcacggcaaacagcgggtattgcacgatatcagtgtcaatatcgcagccggtgagaaagttgctcttatcggcccgtcaggggccggtaaatcgtcactgctctcgcttttgtgggagcagagtccagcagacattgcgctttgcccgcaggacagtgctctggtcgatattctgtcggtgtatcagaacatctacatgggcgcactcagtcgccatggcaatatttataacctgctgaatttaatccggccgtgggcggatcgtcgtcgtgaagtgtcgatgattgcagaagccttaggtatcggagagaagctgaaaacctcgccggataaactttcgggtggtcagcgtcagcgtgtggcattgggcagggcgctctacagaaaacagccggtatttttcggtgatgaacctgtgtcatcgcttgacccggcgcagggtgatgaactgttgagtttagttctgggagaacatgacacagccgtcgtggcgattcacagcccggaactggcgcttaagcatttcacccggcttattgcgttacagcacgggcggattgtcggcgactggcctgcggatacggtcactctggatcaggtttcttcgatctactccggtgggccgtctgttcaagcggtcgataatgcgcgctgaactggccagtgaagtttcaacagcttctcgcttagcccgtttaagcggcggctttatcgttgtcgctattatttcgctgtttattgcagatattcatttctaccggccagacccctggcaggagctgggccgtattggtctgggattaattactccgtattggccggacattcccgagcttgcgttagcccttggtcacacagtcgcctttgctttgttggctgtggcgggctcagctgttttagggttatttctggcgatgtggtttcattggcgcatcgtgcgggtctttgcggcatccatccgttctgtgcacgaagtcttctgggggctgctgtttatgcaggtctggggcttaagtgcgacgaccgggttactggcgatcctgatcccttttactggaatttttaccaaagtttttgcggatattctgcatcagcaatcaccacaaaccgtacagacgtttggtaatgcaccgcgtatcagccgttatgtgtatgggttgattcccaaggcctggccagaacttatttcgtacgtgcgttatcgctttgagtgcgccttgcgctccagcgcaatcctcggctttatcggcttgcccacgctaggttttcatctggaaaccgcgttcaaacagggtcagtacagcgaagccgcggctgtgctctgggtgtttctgttgctgattggcagtgtgcgcttgtggctgcgacctaagttgattccgttatttattgccgctgcgatctgggtgttaccagaaatgccaccggtaaatgccagctttttctggcaatttatcactgaggatttatggccaaaggctctgcagcggggtgatttaatcgccacagggcagtggtacggcaatgtttttatgtcagacgtctggcccgcgttgtggcagacattggccgtgacgcaggcagcgctggtattgagcgggctgctggcgcttatgtattacccgtttgcgagtcgctggctggtgggcggcttccgaccgatggggcgctttaagctgctggtactgcggtcggtgcctgagctgatgctggcctatgtatttatgttgattttcggtccgtcggccttgccggcgattctggcgctgggtattcacaatggcggtctgattgccttcctgttggccaacaacagcgaagatgccgctagggttcagcgtccggattcaccaacaggtgcgatgcgattcttctatcaggatcttccgcaacgttatccagcatttctggcgctgctgttttaccgctgggaagtgatcatgcgcgaaagcgccatgatgggcgtgctcggtatcgcaacgctgggcttctatgtcgattcggcgtttgaagaaatccgctttgataaagccttctttctgattgtgatggcggcggtgctgaatatcatcatcgacagcctctcccgtcggctacgcagaaggtcggggctgcgcacaccgcttatgtaaggtaggctgaccctatggctcttatatttctgtttgcgtctgccctgtgctggacgctgtttgatctggcccggaaaacactggcatcctctgaaagcccgctggctctgactctggcattcaatgtgggagccattcctctttatgcgactgcgtggttcttcagctcagagggggttgctcctgcggattactgggtaccttcctttatcgctgctgtgcttgcagcgattgctgcgcttggatttattaccgcactgaaacttggtgatattgccagggtcataccggtgcttgcattaacgcccgttattt

SEQ ID NO: 156 - DNA, 25088 bp, synthetic construct
  misc_feature 1..25088: note = Synthetic
  source 1..25088: mol_type = other DNA
gcctcaggaggagcttctggtctatataaatatgtaactaatgctactgctggtgatggtagcactatgattatggcacatgatataggttgtcagttagaaaacttagagtttacacagtttcatccaacttgttttttaggtaaagctggtgagcctactttaatatcagaagctattcgtggtagtggtgctgtattagagacagagaaaggcataagaatcatgaaatctattcatgagagaagagatcttgctcctagagatattgtagcgagacaaatttatataaatatgcaagctggacgagatatttatttaaatgcaactcatctaagtgcgagtcagtggcaaaatgagtttccttatatctatgaaaaattattagaaaatgacatagatccaaccatagataggatacctatatcaccagcagctcattatagctgtggaggagtgaaggttgataagagcgctaaaacaagtataaaaaacctatatgctgttggtgaagtttcttgtactggcttgcatggagcaaataggttagcgagtaactcgttattagagtgtatagtatatgctttagaggcgagtaaagatatactaagtaacttcacaaaagatacatatcacgataatgaaaatctaaagctaattgattcaaaaaaagattattcacaacaaataattcaaataagacagctaatgtgggataaggttggcttagtcagaaaacaatctgagttagaagaggcttatcagcaagttagtttgcttgaaagtgctatagataatgatatcgctttagatagctttgatattaatatagaaaattatagaaaaatcctaaaaatgtctaagcttactatacaaagtgctatagcaagaaaagagagcataggaagtcattatttaagaagttaataaatacaagggtatagtttaaactatgagagataagatattttcaattcctaaagttgtgcttcatgaccatcttgacggtgggttaagagctagtactatagtggatttagctaagcaatataatatagatttacctaaaacttcagacaaagaactgtcggagtggttttatgagcagttctcatctaaagattttaataaatgttttgatgcatttaatatagcatgtgctgttatgcaaacacaagaaggtattgaaagagttgcttttgagtttgctcaagatcatgctttagataatgtaatctatgcagaggcaaggttttgtccttattttcatacagaaaaaggcttaacatatgatcagatcatcaaaagtgtagctagaggctttgatagagcgaaacatgagtatggtatagatgcaggtattttagtatgcggaatgtatcatcttgatgatgatactaatttagagatagctaaattgtgcattaaacatgatgaggttgttggctatgactttgctggtatggacattgatggaagtttatctcaaacactacctaaaacggtggcatttttacaagaaaataatattgatttcactgtacatagtggcgaattctcaaatattgaaaatattaaagatagtattctaagtggggcaaagagaattggtcatgcatgtaacctttataaaactacagatactgatactttaagagaaactatagcactacttattgacaggagtatacacgttgagtcaaatgtaagtagtaatctggcattaggactagtagacagttttgaaaatcatccatatcaaagaatgtttggtgatgatattagtatagctttaaatactgatgataggctaatgttgctaggtataactcttactgatgaatatactttagcacatcagaaaaataatttgtcttttgcaaatatggttatcatgaatctaaatgctgcaaaagctgcttttgctaaagatgaagttaaaaataagatagtcaaaaaattaaagagttttgctgaagcaaatatattgtaatagcactttgaagattaattttctataaaattttacctataaaatatatgcaagttattttgtttatgtttttacttgcttcagacttttaaatttttttataaaacattatagtattaagatcatcttgaatttattaatttagtatatgaaaaaatatgcagtatttgttttaagcttcatttgtttttgttcatcttttgctatggcacataataatgttggcaagccatcagtagaaagttataaaactaaaattttaaatgcagatcagcagattattgaactgattgcagaacgtaaaggttggcgaaagaagatgctgaaacttgagaaaaagcaaggtttaccaagctatgatccatttaaggataaatcattggataaaacacgaacatctttcgcaatacaatatgatgtctctcctagactagtggatgagatttttaatatattaaatacgcaggatttaaaaactgcagatcaaagtttttaataaaatatatgaggtaataaaataacatgtctatttacgattttaagcttacagcaggtgatggatcagaattctatttaccaaaaaataaggttttactaatagtgaatgtcgcaagtaagtgtggatttacaaaacaatacaaaggtttgcaacacctacatgagatatatccagacttagaaatagtagcattcccttgtaactcatttggcggacaagagcctggtagtgatcaagagataaaagagttttgtaagactaactttggtattacatttccaattatgaaaaaaactaaagttaatggtaaagattcagaacctctatttgagtatttaaaagagcaagcaaaaggaatcttaggtactgaaagaataaaatggaattttactaaatttttagtatcaaaagatggtcaaactgttgtaagatatgcaccaaagacaattcctgaagatttgattgctgatatcgataatttcttaaaagattaatctttcttaaaccttttttatcaatatttaaaaagatcttatagatactttacttctcacaagagttatttcaattaagctaagagctatagaaatattggctttacagattggtttgagtagaatcataaaggttatatgtacacgtgtaactaacacttaagcttaaaaggctttttaatttaataataaaaccaggagttaaaagtgatttcaacatctctttcttatatatcatcgctactattaatatgtagtgtaatagtacttatttctagtaagtctaaatcaaaaatatttgaatattttccagctattgtaatcatatattttttgatagttatattatcaatacttggtttgtggaatactcattctgtagaaattaagcagacaaagtcacaacttgaaggtttaatcttacctgtgatgttatttttaatgttgattcgttgtgatattagacttgtgattaaacttggacgaaagcttttgatagctttttttggtgcaagtattagtataatgatagctttcataattatgtatctaactattggtcgatatatatcaccagatgcttggaaaggcttctctgcactatcggctagctggatgggtggtactggtaatatgatcgcagttaagcaagctttaaatactccagataatcaaatgggatatatacttcttacagattcgataagttatacgatttggtttgctcttttatttgcgcttatttctcgtgctaaagtttttgacaagtggacaaaagctggatcactagaggagcatattagcaaggttaatatccaagatccatataatttaaaaggagatattaattttgtaggcatatttttattaattgctatagcatttactgctactgatatcgcaggtatagtagcatcatatttacctcaaacagcactaattagcacaaagacttggactatcctaatagtaacatttcttgggtttataggagcaatgactccgatagctaaaataagaagtgatagtatcattgctagtatatttttatattttctagttgctttgatagcttcaggttcttcatttaaaggattttctgaggctccaatatatatagcatgtggcataatgattttagttattcatgctataataatgacaattatagctaagatatttagactaaatcttgcaatgtgttctatcgcatcattagctaatattggtggtattgcaggagctcctattttagctagtgcttatagtagaagtttagtttctatagctgtagttatggcgttacttggatttttagtagggactcagggcggtttaattgtagctaaaatactttcaggatttgctgtatgagtaaaatagttgatataaaaacatctatagtaaaaatagctcttaaaagaacatttgtaacagctgtacgaagtacagatcatattgatgctttagtagttgagctagttttagataatggactaaaaggctatggtgtagctccagcaacaacagctgtcacaggtgatactcttcaaggaatgaagtttattataaatgaaatctttacacctgttattaaaggtgcgtatttgagtgactatgaagagattttacaccaggcttttaatagagttatgtttaattcagcagcaaaaatggctattgatttagcatttcatgatttattagctaaacaaaaacatatctccgtagctaatcttcttggagcaaagaataatactattgaaactgatgtatctataagttgtggtacggtttcagagactatacaaaatatccaaaatggtgttgaggccaattttacagcaatcaaagtcaaaacgggtgctgattttaaaagagatatagaactacttaaagctttggatagtgagtttgataagagtactaaatttagatttgatgctaatcaaggctggagtataactcaaacaaaacagtttattgaagagttaaataaatatagcttaaacgttgagataatcgagcaaccagttaagtattatgatatatcagctatgcatgaaataactcagtttagtaatatcccaatagttgcagatgagtcagtatttaactctagtgatgctaagcgagttatagatgagagagcttgtaatatgataaatatcaagcttgcaaaaacaggtggtattttagaagctaaaaaaataaagaaactagctgatgatgcaggtataccatgtatggtaggttgtatgatggaatcaccagctgggatcttagctacagcaagttttgcactagctgaaaatattactatagcagatcttgatccgctagattgggttacaaaagatatttatagtgattatataactttcaatgaaccaaatattattttaaaagataatttaatcggatttggatataatctataaaaataaataagtgtttgttggtaaatgaaaacagacaaaagtttaatactcgttcatggctttatcaaaaatagtaaagacatgcgtagcttagagggtttctttaggcaatactatgatgacattatatctatagatctgcctactacttttgttggtattgatgttgcagttgctaagttgtgtcaagttatacaaaatattcctaagacaaaatctatcacatttttagctcatagtatgggtggtataatagtttgtaaaactatagataaattgcaacttgaaaatgtagataaatgtgtatttatagctacaccatttaaaggatctaagattgcagattttggtgataaaattcctttttattctagaatattaaaacccaataaagaactaatggtgacggataaatatttagatgtttgcaataaggtcgcctcaaagtttccagttggtttaattgcaggtaataagcattctaaacttaaccttttagctaagttatgtcttaataaagatcatgatggtttagtagaagtagactcagcatttgctattaatagtagtgatagagttattctaaataagaaccatagtgagattcatcatgatattgaaacacttaataaagtagatcacttcttaaaagagggcaaattttaaggttcttaaagtataataaaagaggttattactaaatagtggaagatatactattaatagtctaggtttaattttgctacaggaaatgagttctttgatatttcatgtgcaaaagaagagtatccaaagctagtagaagataaaataattaatactgtaattgagagagataggtttttcattttgattacctttaataaagttttatgatgacttatattaatccgaatatcttttgaaaccatttcgtcatcctcttcggtcactgggcggagtcgaagtgtgaccataggatctactcattatgagtcttaaattagattctacgatcaagtcgtagaatgacatgtttcttttggactaactataatttttgcgtgtattatcacaccaatttagttatatgtaaaactagtctttttaatatattatgtaagcttagcttactaaatgaggtatttagacttttcttttaaaaattcgtcaacaaagctttaataataatgttttgatatctatttttctaaagtataacatcatggtttttcttatttctctttcaagaatagttataagaaaagtatttattgttaggatattagcatgagagtttttcttgagttatagatggacatactatttttaataagccttattaaaaataaatgaatactaataatacattattaaggtacaatctatttgaattaaaattaaatggaaataaaaatgagtgcaaaaaaagtactatgtataggttgggaaccaaattctgtagactatgctaaatatcctggaatgaattcagaaaaacttcgaagtgttcttgaaggagatttacaaaagttaaatgatattggttatgatgctcatatgggctatatcactagtgaagcaacagctgttaaagaggtttgtgatatcctttctaacaacacttttgatattattttgataggtgctggcgtgcgtaaggatgatagttgttttattctatttgaaaagttagtaaacgtcgttcatgagcatgcaaattctgcaaaaatatgttttaatactggaccaacagatagtgttgaagctgttcaacgttgggatatctaatcaaataatatttaatctacaaagttatcttatatttataaaaatattaaattatttttgctttaaggaaagattaggtgtaaattatagcctataaacataaactaccttgagcttgtttatgataggtcacaaaagtttaagtctaaagttatttagtttagcaatatttagtattccatttgaaggtatagctcatgaacatgatgcttttgctcaccatcaatcaaaccgatatggatatatgataaaagataaaaatggtttagacattacagatgtggttttatctgagagatcgccgtattgtagtagttatgtaggtaactattttgcatctgcagatgactataacttaaatcagaaaaactcatcatatatgacaataaagactaatactaaagattgtattattattagtaatggaattccaaatcatacttatgatgatgccgagatgggagcttttccaaataaagtagtgccacaatatcagatatatgtagtttcaaaaagtcctaagcgcttagctaagccaattcccttatctctaagaatggataatgcaattatgcttaatggagttaaagttgatctattggctgctgggtgttatggagttggcgatggtaggattggttgttttgatcctaatgcaaaatggcgctataatccagcatatgaggagtctgagtttataatggatactcaccatgcccattctcagcctgatggaacttatcactatcatgcttcaccaaatgcactgtttaaagataactcatctgttgagtcacctgtgataggttttgcagcggatggctatcctatttatggtagttatattgaaaataatggtgagatttttgaagttaagtctagttatcaactaaaaaaaggtaatcgtccaaatacaccagatagtccaggaggtaagtatactggtgagtttgttgatgattttcaatatgtaccaggaagtggtgacttagatgagtgtaatggtatggagtatgatggtagctatgggtattatgttactaaagagtttccttatattattaactgttttaaagctgagccaaataaatcttttatgaaaaaaccaccaattcgtagatcctaaaaaatatcatataaaagtttatatctttagcttattatatttatatatagaatagcttttaggtctatagatatgacttttcttactgaaaaacaaaatcgtgaaattgaagagtatgctatttctcaaggtttaaacctgattgagaatgcctctgatgagatagttaagctaatttgtgcaaaatttgataaacaaaataaaattttagtagtcgttggtgctggtaataatggtagtgatggtattgcagctgcaatcaagcttttaaataaaggttataatattgatgtttatcgagttttttcaaaaggaaatctagataatcaaagttattatcaagagttttcaaagttaaaaaatcctatcagctccttaaaacaaaacaaaaatgtcattccggaccccgatccggaatctcctaaaaaaaatcaagtagctctaatatgcgattatgatgtagtaatcgatggaatatttggcatagggctagatagagatctacaaggagatgttttagagctcactaaatccataaatcaagatgcaaaatataccttagcaatagatgtaccaagtggtttaggtgcttttaatgccaaagtgtatggtgaggcaatccaagctaatgaaacaattacatttttagcagataaacaaggtttacatactggagatggtttagattatgctggtaaagtaactgttaaagagctaattaattgtgaaaatatcaaaattagtaaatcagaatatcaaatctataaaaatcatatccaagatataaatctcgataatatccttaggaaaaagaaaaataccaacaaaggcacttatggcaatctagctatagttggtggtaatgttggtatgaatggagctttgcagttagctggtaaaagttcgctatatagtggctgtggcaaggtatcgatgatatctttggataaagattttcgtgcagacatatctatgcctgagctaatgacaaaatctttgcagaacatccctaaagatctaaatactttctcagctttagcagttggagttggctttgatataactgatgactctgaaaaggttttagagctaataattgataatttaactcaaccaacaatttttgatgcagatgctttaaatataatcgcaacaaatcagcaaattagagaaaaatttattaaattagaaaataaaataataactccacatccagcagaagcagcaagattacttggctgtacaacaaaagaaattcaagaagatagatttgctgtagttagagctttagctaaaaaatataactctacagtcgtactaaaaggagctggaagcctaatttgtaaagatgataagatctatataaatgctacaggtaatcaaggtatggcagtggcagggcaaggagatgtgttatctgggattattggagcatttttatcacaaggtttagatactctatcagcaagtagactagccgtgtatattcatggtttagctggtgataatctagctaaaaaactaggtggctatattgggatatttcctagtagagtggctgatgaggtttgtgaggttttgaactttttaaattgattttgatttagagtgttgatttaatgatagaagagtcactaagaaaataataaaaactgtctgttttaacgaggatatttcatgaatagcaaaatattaccaatatctatagatctaggtgcaaaaaacacaggggttttcagtgcattttatgagaaaggtacaaggcttgaaaatctaagcaataaatcaggtaaagtttatgaattatcaaaagattcttatactttgttaatgaatagcagaacagctaaaagacatcaaagaagaggtatagatagaaagcaattagtcaaaagactttttaaattgatttggactgaaaagctgaatttagaatgggataaagatactcaacaagctattagttttttgcttaatcgtagaggatttagttttctagaggaaaagcatgatgctagttactttgagaagtttcctgctgaagctattgaattattacctaaacaactaagattagatatagattctaaccaaagctatgatctaaacagtaaaattattgaaactctcgaaaatgatactttcaaagatgtgtttgatgaaattgagaataacataaaacaagtaaaaaagagtattgttaaagctaacattataaatataataaaatcagctattgatgatagagtttcaaagggaggaattaagtcaactaagcaaaataagtttgatgacttaaagaaagtatctctatggattatagaagatatctttgattcagaaacatttacttatatagagaatgttgataattattcaaaaaatatatttgactatttaaactcgttatcaaatgatcaactagagaatctaagaaaaaatttacctactatagatcttaatgagtataaaaatagtgtttggaattttaatatttctaattttaatttagataatgagaaattaattgataaattagaagcaggtgatgtttcagttcatttacatcatttaggatatgctcttcagaatatcaaaaaagaacttgatgaaggctctagacaccgtagtaaatactttgaagagattgcaagtgtactactagagcagaaccataaagaaggatatctcagaagcttttgtcaaaatctacacggtaataaatatcaaaatctgaatgtcaaaaaactagtcaatctaataggtaatctaagtaacttagagttaaagccactaagaaagtatttcaatgataaaaatcatataaaaggcgactactgggatgaaaaaagatttgctgaaacctattgccgttggatactaggggagtggcgagttggtagcaaagacaaagataaaaaagatggtgctaaatatagctataaagatttatgtgatgatctaaaaaataaagttggcacaactcaagatattaagagtagtataatagaatttttagcagagctagatccatgtagaactataccaccatatcaagataacaataatcgtaagccaccaaaatgccaaagtttgattttaaaccctaagttcttagatgataaatatccagagtggcaattatggctaggtgagttaagaagtatagaaagtgtccaaagatatttagaaaattttgaagatgatttaaaaaaattaaaaacaagtaaagatcaaccatattttgtagaaactaaaagctcaaataaacagattgcaagtggtcaaagagacaacaaagatttagatgctagagtattacagtttatatttgatagagtaaaagctagcgatgacttactactaaacgaaatttattctcaagcaaaaaaagtgaagcaaaatgctagttcagaaaaagataaacaaaaagcatttaataatctaaaagtagcattgctagatagtcatttatcaaatgagttaaagcctgaaggacacttcgacaagcttagtgatcttgatagtgatatatttgagcagggtacttttttacatttagtttgtaaatactataaacaaagacaacgagcaaaagactataggctctatatcatgcctgagtatcgttatgataaaaaactagataagtatagtaatactagcagatttgatgatgataatcagctactaacatattgcaatcataaaccaagacagaagagatatcagcttttaaatgatttagcgggagttttacaaatatctccaaatcttttgaaagataaaattggctctgataatgaattacaaaccatagagtggttaaaaaatttcaaaatagctagctattgtaaatctgcagttgaaatacaaaaacaacatcgtggtactctaaaaaatactgtccagacagctatatttaaacaaagattagaagctataaggaaaaataaaaaagcaagtgatgatgaaaaagcacttctagaaaaatataaaaatgcaaaagcacttacagctgatgagaaaaaaatagtaaagctagttgataacatatataaagcaactctaaaaatcggcgaaaatctgggattggatgataagcaaatagctaaattcaactcaatttatagttttgctcaaattcagcaaatagcttttaccgagagaaaaggtaatgctaatacttgtgctgtgtgtagtgccgataatgctcatagaatgcaaattataagcgcattgagccagtcgaaatgcgatactcaaactagtaatattgaggcttcgacaagcttagccatcttagataaaacaaacatatcacataataaggtcactgagcttgtcgaagtgaaaccaaataatgctctaaatgatttcgacaaagctcaatcatctttgggagccaaagctcaaaggctaccagctataccaactagaatagttgatggagcagttaagaaaatagctacaatactagctagaaatatagttgatgataattgggataatattaaacaggctttagagaataaacaaaagcttcatatacctattatcacagagtcaaatgcctttgagtttgagccaagtctggcagagataaaaggcactaaaaagaaagatagaatatcatcacaagagctatttgccaaaaaagaaaatagaatcaaaaacttttccaaagggatatcagcatatagtgatactattttagcggatggtgattatgacggctcaaaagaagagcttgaccatataattcctcgctcacataaaaaatacgggactttaaatgatgaagcaaatttaatttgtgtaactcgtgatgataaccaaaaaagaggtaataaagctgtatatttgagtgatctaaaaccaaactataagtccaagcaattttgtactactgataattcacaaattgaaaaatatatagctgaaaaaatttgggatgctgaaaagcaaggtttcaaatttggtaactatcgtagctttattaatctaacaccagaagagcagatagcttttaggcatgcactatttttagcagatgaaaatcctatcaagcaagcagttatcaagtcgatagataatcgcaatcgtacatttgtaaatggtacacaacgatattttgctgaagtactagctaataatatctacctaagagcgaaaaaagaaaatttagctacagataaattatcatttgactattttggtgtgccaactacagatagtagtgggcgaggtattgcagatattcgtaagctatatgagaaagtcgatgatgatatatcattctttgcaaaaaataaggataaacaacaggaatcttattcacacttgatagatgcaatgctagctttttgtgttgctgcagatgagcataaaaatgatggtagtattggtttagaaatcgataaccaaaatggactattcccaacccctgataagtatgatgaaaatactggagaaattctaagctggcaagatgatgatatatttagtcaaataaaagtaactgatagtgagtttagtgagagtaagttggctagaagaaaggctacggatgggtttaatacacataggcagatgactagagatggtatatatgctgagagctatttaccaatattgattcataaagaattagatgaagttagaaaaggctttacatggaaaaatagtgaagaattaaagattcataaaggtaaaaaatatgacacacaacagttaaacaatcttttatactctttaaagtttatatctaaacctattgttttagatatgcaaattaattcattagatgagttaagagaaattttaaaagtaaataaggctcagtcaacagcagaatactactgcttaaatttaaaaactcaaaaattacatgagtactacattagcaactataatactgctttaggctataaaaaatatagtaatgaaatgaagttcttgagagaacttacatatcgcacagagagagtaaaaattaaatctcttgatgatgtaaatactattcttggcaaagatagtaattttaaagcggggaaaatagatttaccttttaaaaacgagtggcataagcttcagcgagcatggcaaaatacggctattgaagatgattatgaatttttaaaaacttattttgatgttagatctaatacaaagcaacatcaaaaagtaagaaaagatttttctttaccaataaaaagtattcagggtaattatttatttaggagaaaagcttgggataactcatatacttatcaaatattaaataattcagaccctagaaaagatgatgttcaatctttcatacctgtgtatgatatttctagtagacaacgcaagaaaggtattattgacgcttttgtatctaaaaatgtatttatgctatctgatgatgagtttgttaagtctgatatacctaatattatgatccttaatagaacaaattggtatacgattgatatcacagatgagttaagacaacttggagttacagacttatgctatagagttgatgataacagtagaccaagtattaaaatatcatatagagagatattacaagataatattagtcgattgtgtagtaatccccttattaaacctaatgtaccaaaagatcttgcagatcagctaaagctaaaatccaattgcaaagattatatatataagggagctagtttttctaatacttcaaatatagcactaaatacagcgttagctagatattatgaaacatctaataattagtgaatacggaatatatttaggtttagaggcaggtagattagttgttaaaaacaaagaagatagaaaatattttccattaaatcgactagctacagtagctattgctaaaagaggtattagtttctctagtgatttgatagagcaattttctctaagagggatcaagcttttctttttggattttagaggtgttgctcattctatgctagttggtgcaaatcaacatgctgtagttcaagcgcgtattaatcaatatagatatatagaaacaaatgctttagatatatctatcagactaatttcagctaaaattaaaaatcaacgagcaacacttagttactttaataagcatcataaatctgcaaatctactaaaggctatagaggagcttaaacgaagtactcagattatcaaaaatgctaaaactctaaatgatgttttaggttacgaggggtatgctgcaaatatttacttctctgctctagcacaggataaattcttatcagaaagctttgcaaatcgagaaggaagaggctctcaagagatagcaaatagcatgctaaattttggttatgcgatattatctagctatattctaaatgctattacaaatgcagggcttgaaccatatttaggattcttacatcagaaaagaccaggtaagatgtctttagtattagatctcatggaagaatatcgtgcttgggttgtagatagagttgttattaaactacgagagcaatacaagaataaaaaacatatggataccaaattgaagtctgctcttatatcacaaatacaggctactattgctaaaaagtatatctataaaggtaagaagttgagactagaacatataatccaaagacaagtttataggctatcaggagagtttgcaggcgagcataattataaaccatatgtttttaagtggtagaatatatgtgcattaagtcggtcaaaattaacaatatgtatatgcttagtaatgaattaacaaataaggtgaccgagtttgtcgaggtactgatagggaatatgaactatgaaaaaaggatatgtttatattttaaaatgcagagatggtacattttatacaggaagtacaaataatatagatgctagagtatatcaacataatattggtaaagggtctaattacaccaagaaaaggttgccagttactttagtttacttagaagagtttgaaagggttgatgaagcattttatagggaaaaacaaatacaggggtggagtcataaaaagaaacaagctcttattgatagtgactttgatagattaatatccttgtgtaagggtaatgtcttcgacaagatttagtcatctttataagttcattgagctggtcgaaatgaacttataacagagatatttaactgtaaaggttgatgacttcgacaggctcagtcatcttaagatataactatgcaactaagaaaagaatatttaatagcctacgatatagaagataataaaattagaaccactatatataaacaactcctagcatatggtctaaaagctgtacaaaaatcagtattttggggttgtgtaagtattgcagaattaaatgctatcaaaagattatttgataattctttagatacttttgataaagtatttatagcaagagtgaatatgcaagagcaaaagctagattatagttttggctatgatgaaaaagtttttaaagattgggacgaatatggacatatttgatactgatttatctatacctattaatataattcgtgagtggtgtttttgtccgagagttgtttattatagagagcttttgaatataaaaacgcataagcctttatgggtagcacaaggtgaagactttcacaaaaaagttgaacatctagaaaaaaggcgaagttttaaaaggtatggtttagatagtgctactaggcattttaatgttagtttgaaaagtagtaaatatcatatacacggagtagttgactggattttagaaacagatgagtttatatatatcgttgaatacaaaactaatccaaaccctaatagcttgggacataaattacaaatagtggcttatgctttactagctcaagaatcataccaaaagacttgtagagtagcatttttaacgtctagtaaaaaatcttatgaaatacaaataactgactatttaatacaaaaattacaagaaataattaaaaatatatctgatactttagatagtggtaacaaacctgactcttcagcctctgatcatcagtgtatacagtgtcaataccttaacttttgtaatgaccgctagagatataagtcaattgtactagtcgatatgcccgatgctgtaaagtatgatgacttcgacaggctcagcgatcttgttaaagtttattgaactcaatcgaaatgaatagagttatccgcaatacccaacttgattgggtatctcaaatcgatatttacacaaacaaaaaaagccacttatgcggcaaattttttgctctaaattaatcagacgtgtctaacagaggtccgttcaaaatacttttaaatgattacagagcattaaatatttggtacatttgatattttagatactttttcgcaaaatgtctactatttttgacaagtagagtattttcgaaaaaatacctttaagtaattctcttaaagccttataaacactaggtttgttttggctccaacagtagtataccaaatattctagctactgaaacatacgctcatttgttattttatttgaatcaatattaccaacagtagtataccaaatattctagctactgaaactataagtagtctgttattccaaaacctctaatagccaacagtagtataccaaatattctagctactgaaacttagcatcagggcttagatatgtacttccatcgttccaacagtagtataccaaatattctagctactgaaacaaaaatgagttaatgagagccaagattatggaactaccaacagtagtataccaaatattctagctactgaaacatcctattttaatagatggtgataataatgttattgccaacagtagtataccaaatattctagctactgaaacaatccattgaatcacaaaatctttcaaattcttgtccaacagtagtataccaaatattctagctactgaaacgaatctgctgacaaaacatttcagcttatgcaagcaccaacagtagtataccaaatattctagctactgaaacgtttaagtggaatatttgtataaataggtgtaccccaacagtagtataccaaatattctagctactgaaacatggcgtatttgtttgaccagtaacagctatttgcaccaacagtagtataccaaatattctagctactgaaaccagatggtatattttcattcgttgtgcttgtagaagccaacagtagtataccaaatattctagctactgaaacagaaaaacatcatctttgatgttaagacttgtagagccaacagtagtataccaaatattctagctactgaaacacatgggtaataattctacttcttggtttgatgcttccaacagtagtataccaaatattctagctactgaaacccgcaatctggggattaactcaggcagagcttgtccaacagtagtataccaaatattctagctactgaaacaattagatgccttaggtgctagtaacacttttaggccaacagtagtataccaaatattctagctactgaaaccaatggttacattcatgattctcatgattagtgttaccaacagtagtataccaaatattctagctactgaaactcatatcaaacaatataccgttagatagttaatacccaacagtagtataccaaatattctagctactgaaaccgccacttatatttattagctaaatgatataaacaccaacagtagtataccaaatattctagctactgaaactaaaagctgggttatctttctgacttctaatataaccaacagtagtataccaaatattctagctactgaaacaaaaacgtaaaagcctgcgagtaatcaagattattaaccaacagtagtataccaaatattctagctactgaaacataatgccgtttctgccttttgggctgaccaagctacccaacagtagtataccaaatattctagctactgaaacatattgctttcatgtaattgtagtttttgttagcgccaacagtagtataccaaatattctagctactgaaacatatttgcacagaagttattgattacctcaatcaaccaacagtagtataccaaatattctagctactgaaactcttgtgattgggctggagttgttaagccgagcgccaacagtagtataccaaatattctagctactgaaacgtacaggtggctcaactggtggagctagtacaggtccaacagtagtataccaaatattctagctactgaaactttattgtcttgccatctcgcaggtattactaggtatccaacagtagtataccaaatattctagctactgaaacaagctgaaattcaggaaatgatgaatgaagagactccaacagtagtataccaaatattctagctactgaaacgtaagagtcggccatagtatcaaaagaattggaaccaacagtagtataccaaatattctagctactgaaactctgacccttgtaagatccgctaacaccatcctgaaccaacagtagtataccaaatattctagctactgaaacacgtatattgttctacgacctcaccgttacaattaccaacagtagtataccaaatattctagctactgaaacatatcacatattggattatacgaaactcctaaacccaacagtagtataccaaatattctagctactgaaaccaaattgcgaccacgtgtattatttaagtttaaaaccaacagtagtataccaaatattctagctactgaaactcctctaactaaatggctacacttagtttaaattaaccaacagtagtataccaaatattctagctactgaaactcacaattaactattttcataacatctttagcatacccaacagtagtataccaaatattctagctactgaaactaagtttcaatcagtgccaggcaaaactaaaaacccaacagtagtataccaaatattctagctactgaaacttgtctatcttttaaatcaagccctttagtaatttaccaacagtagtataccaaatattctagctactgaaactactcaccatcatacgccttgttgatatgagtcttccaacagtagtataccaaatattctagctactgaaacataaaacttgcattactgtgatttaacgaacttaattgccaacagtagtataccaaatattctagctactgaaactttatgagtcgatcagtcctggtaaagcttttaactccaacagtagtataccaaatattctagctactgaaacaatgtaacactggtgacccgaatgcagatcttccaccaacagtagtataccaaatattctagctactgaaactactatctaatgataattacatgaataagttgagatccaacagtagtataccaaatattctagctactgaaacatttgattatatgatgaatagttttacaagagtgccagattggcaagaagtcaaaaagaagttggatttagttaataattgctaaggcgtaacatcatcaaccacatcaccgacaatctgaaatggtagttttaatatacagctatttaaactaatacaacaaacagctaatgcaactactaaaaatattttctttaatttcatttctaataagattagtatttaaaacttgtttatataatacctaagaggtttaagtatttgtagattttattttagtaatactcgtttaagagtatatttgctataattaatattaataaatttagattatctatttaggcaaatactgtgaaacaccaacttaaatggatggcatgggaaacaactagacgttgtaatctcaagtgtgtccattgtcgttcatcttcagaatgtgaggtgctagggcatccagatttctctaccgaggaaggctttaggatcattgataatatagtcgagtttgcaaaccctgtattagtcctttctggaggcgaaccacttttaagagcagatatctttgagctagcagaatatggagctagtaaaggtttacgtatggctttagctaccaatggttcattagttacagatgagatttgtgagaaaatcaaaaactcaagcataagcatagtatctctaagtatagatggagctacagctaaaacacatgatgattttcgtagccaaaagggggcatttgaagcaactgtaaatgctgcaaaattatttaaaaaacatggtataccatttttgataaactcatcatttaccaaacgtaatcaacatgagatcaaagatgtttataagcttgcaaaatctcttgaagctacagcatggtatctttttatgatagtaccaacagggcgtggcgaagagcttatgcaagagttgatagatgttaatgattatcaagatattctaaattggcattatgatatggaggctgatgagcaagatatgcttgtgcgtccaacttgtgcaccacattattatcgtattcgttttgagcgtaataaagaagataatgcaaaagttcgctcacgcgctcttagttttggtactggtggaggtaaaggttgcatagctggacaaagtatatgtctactagatgttgatggtaatgtctatccatgtagttatctacctgttagtgcgggtaatgttaaagaaaaatcatttgcagatatttggcaaaatagtgatgtaatgcaggatatgcgtgattttagtgcttatgaaggcaaatgtggctcatgtgaatttatcaaaatctgtggtggctgtagagctagagcctataatatccatggtagttatctagcagaagagccattttgtaatcatatgccaattaggatgcaataataactgagaataattttattatagatattactgtctttctaaaccaactacatcactcatattaacaatttcaataattttttcttttggggtaggcttaattatatgcttgtttgcttctagaggcacatcagtaaaattcatagcctttagatcataactgatatatccttcgttaatacctgctgcataaactccaatagggctattaccttgatatgctgcaatatctttatatgagactattaggttttttagatctttaatagtagtccataaagtcatagaaacctcatatggtggtacagatacattattaataattgatgaagcatggaaacaagcttctctatttgattgaggctcaggaactagttgtgagagaatataagctcttacaaatctagatacaccactgaagtctccaggcatacctatcaattgagcaacctcaggacgagagcttgaaatagtatctttatagtttattgttttatcagaaaattgactattgctatcctcaaatggttctaataaagatttatattctttgatattctctaaatgccaatcataagtaggtgcgttagttaaaatgttacctttgttttcgtatactttaacttcaccatcaacaaactctacaactgtagtattaccttttgagtcccttaaactaaagtgtatagggatatttttcacaaaagttccaggcttgagttctaatgccccaccaactaactggtgttcagctataagttttaaagcctctggaacatcttttgccatagatagcaaaaaattacctatataatagacagataaaacctttcttttatcttctgggttaaaagtaggatgctttgtaacatctaaatataagaaactaaatgataagccttgggtatttaatccatctgtaagacatttatcaaaggctaatctaccaaaaaaaccgtagcgagtcttccaactagttaactgagaatcaggtattttatcagcatcaataactatgtccatagtattatcaatacctacataacttatacaattttgaaaagctatgttcattgggaaatccatagatctagcttctattttatactcatttttatttataaaaacatttgtacacacggctatctcctttcttatctcattactaatgctatacttatactatcaatattacattattttggagtgtataagaatgacgcaatattttaataaaataattttataccgcatggtaacacctgagaaaacttgtccgtatggtctaaaagcaaaagctctttttgaagaaaagggttggcagtttgaagatcatattctaaaaactagagcagaaacagatacttttaaacaaaagtataacctagaaaccacgcccttgatctttattgatggtaagcaaataggtggttatagtgacctagttgagtttttaggtgagaaatgaaagatcaattaaagtattttgtctatgaaacaaaagttttaccagagcatatagatcctaataatcatctaaacaatattgtatatctacaatggatgcaagatattgcaattgcccatgtgaaggctaatggagtatttgatattacagagactaatggtctaacatggtttgctaaaaagcatactatagaatatttagctcaagggttcttaggtgatgatattatagttgtcacatgggtggagagtatcacaaagatctcaacatttaggaaatatcatatttatagaaagtcagataaagctttgttatgtaaagctgatactctttgggttatggtaaatgctcaaaaaggtaggcctgcaaaaattcctacagagctagttgaaatctttgataaatataatggttttgagactgacgatatcaaaaatcttttttaaattttttcttaaaatagagaattcgatatagattattgttactatagtcatataagcgcgctgatatatttaattgagtagagtttagttttgttaaatttttcagaaaaagaattaaagtatttattagaaaacacccctgatggaattcatattttagatcaaaagggtaatcttatattttatagtgaatcttttatgaataaccttggttatagtcatgatgagatgttaggtctaaatgtggctgactgggatccttttgctcttcatgctcagcttagttatataatcagagaattgatcgataaaccagaaatatttatttcaaaacatttgaaaaaagatggctcattaatagatgttgagataaatgctaaaggtgttgttatcgataataaaagatatctttttgcatctcaaagaactattcatacaagaaatacaacacaagtagatttagccaataagctattagttagggaaaaagccaaatataaaaccattttagagttagcttctgatggagtttttattatggattttgagggtagacttcttgaatacagtaaaaaggctcaagaacttttaggatactctgatagtgagatggaagatctaagtgtttatgactgggataagaatattactcaagaagagtactcacagattattttagcactgatgaaagggcctattgaaatagagaggatacatactagaaaagacggctctaaatatatagctttcataacagcaaatattataaatatcaaagatcaagagctactttatgcttcagctcgagatataactgaacaaaaagagaaccagagaataattatcgaacagaatgagcaattagaagctatatttcaaactgctttaggtggaattagtctattgagtttagagggtaagtatgagtttgttaataataaatattgtgagatgctagaatattctagtaaagaaatattagataaaagtacatttgattttacagataaagaatctcttgatgaatataaggc

SEQ ID NO: 157 - DNA, 24941 bp, synthetic construct
  source 1..24941: mol_type = other DNA
  misc_feature 1..24941: note = Synthetic
acattatgagtacattaaatgatcgtgttataagaaagcttatataatattctaaactgtttacttaatgaattaatcacagtaaactcatgattatagtttatcaatttgttaattaaaggataacatggaaaaaaagagtctttctacttttagtcttgtggctatgggtgttggtgctattatgggttctggttggatgtttgccgcacagtatacatctcaagaagctggtccaggatctgttatatcatggataataggcgcaattttaatggtttttatagccttagtattcgcagaagtttgtacaattgtccctgttgagggttctacatcacgaattccacatattacacatggaacaatgataagttatatgtttgcatggattacgtggatatcatatttggttttagcaccaatcgaggttcaggctgttattcaatatttggctgttttttatccatcattgatcgatacaagtagagacggtgctttatctatagctggtctacctttagcgatattttttcttttaggtttctgtgtaattaatttctattcgcttaagtggttggcaaaaataaataatatcgtaactttatttaaagtggctataccgatatttatctcaattgtttttatagttttttgttttacattgcctgcattaaaagatataaaagccgaagagctttcattaatgccatttggatttaatggtgttttagcagcagtttctgttgggggtattgcctatgctttcactggctttaaaactattgttgaattagctggaagtacaaaaaatcctaaaaaatctatacctgtagcaactgttggtgcagtattgatttgtctaataatatttttattcttacagtctgcttatttgttagtgatgtcaaagtttgtgcataataatgattggcatagtgtggttatgccaggtgcaagctcatctagctttggaccttttgcgataatggcacaaagctttggggtaaagtggataatgtacccactttattttggggcgattattttcccattgatggcaggattaatctattttagtattgcactaaagtctcttggtgctatggttcataatggttatttaccaagtgttttaggcaaactaagtcccgttatgaaaaagcctatctatgctattagcttaaattttcttatagcattaattatgtttgcgccttttcctggttggaaagagatggcaacttttttgacatctttgatagctctaacttatataactggtcctacatcaactatggcacttagacatcatttacctgagcttcatcgaccatttagacttagaggagcttatttactatcaactttaggtatgtttgctgctactttagtatttttgtggagtggctgggctatagtatcaaaagcaggtatagctttgattattgctttagcgatgcttggtatatatagaacttttagaaaagatagatctgaagaaatacactggaattttagagagtcaatatggttttggatttatatagtattagtgacgatagtttcatactttagctcatttggtggtagaggtgatttagatttatattggagttcggcaataatattagtaattagttttattgttgttacaatcgcaaaaaatctgtgtctaccagcggctgatatgcgcgatggtatacacaaagccatcagtgatgataattatatctaagtaaatatttctatttttatcttatatttcataatgtattatatttattagttaaatcaattttaaatatcctatgattaaagtatcttttcagggtgagcatggtgcctactctgagcaagccataactaattttttggagcagcagaatataaaagattttcaaacagttccgtgttggtctttttctgatgctattgaacatactataagtggtaaatcaaattttgtaatgattccagtagaaaactctttagctggttctgtcgtgccagcatatgatgagttgattaagagcaatctaaaggtcaaagctgagatagtcttaaaaataaagcattgcttaatggggctcgatggtgtcgagatttccgaagttgaaagtgtgatatcacatcctcaagcattatcacaatgtgccaatagccttaaaaaattaaagcttactcctgaggcatttgtcgatacagcaggggctgctaagtatatatttgaaaaaaataaaaaaaatcacttagctattgctggagagttagcagctaaaacttatggcttaaagatttttcagcatgaatttgaagatgaaaggtttaattatacacgttttttattgatgggttatgatgatatcaaagttaactcagctgataataagtataagacaactataatattctcagttgaagataagtctaacgctctagtaaatacattaaatgtttttggtaaacataatattaatctgacaaaaatagaatctcgaccatcaagaaatagggcatggaactatttattttttattgattttgagggttgtgatgatgatcttaatgtacagcaggcattactcgaggttctaaaaaaaagcacatttcttaaagttttaggttcttataaaagttatcactttagttaaaaagttttattaatgaatttaagtaatgagttataaagttaagattatttatagagatgttgctaatctaaagatttctttaaataaagatggtttagtaacagtggtatcacctcaaaaggttaccaagaaagaaattttcaaaattcttgagtctaaaaaagcatggcttgataaacatgctaaaagattattagtaaatcaaaaatatgattatcaaaactataccttaaatgatggagatggtgtttattttcttgggcttgaatatcctatcaaaattgtcgagtcaaagcataatgttgtgaattatcatgatgactatatacagtttttcttaaatcctggagttattgcaaatagagaatttaagttacaattattagaagaattttataaagatcaagcagatgttattctcaataatctagtggctaaatacttaaaaattactaatcaagaaattagtagagttacaataaaaaaaacaaaaacacgttggggctcatgtaactatgtcaaaaaaactatcaatcttaattttaatcttgttttgcgagacatccaagcaattgaatatgttgttttacatgagatagcgcatttgactcatccaaatcattcaaaagaattttatgcctatgtggcaagctatatgcctgattggaaaattagagaaaaaaggctaaaatagagtatagttaatcatatctattatcaaatttttaaactttctggaggcattttatggaaagtacgtttgagcttttttctataggagttggtccatcttcatctcatactataggtccaatgagagctggttgtaattttataaatttgaataaggaaaaattacctcaaactactcgtgtcaagattgatttatttggttctcttgctttaactgggaaaggtcataaaacagattacgctgttgttttaggggtgatggggtttttaccagagtcagttaatattgaactagctaaaaaactctacgatgattgtttaaggaataaaaagctgaatttaggtcaaaaatttgaaattgattttgattatgataaagatttagtatttcattataatgagtttttaccagaacatgctaatggtatgtgtttttcgctatttgatggtgatgagttactttgtgagaaagagtatttttcaattggtggtggctttattgtcgataaaaaacaaattaaaaaagatactgttcctacagaggttccttgtgataagccttataagttttcaactatggctgaattaagagagctttgtcagcgtgataataaaactattgatgagataatgttcgaaaatgaaaagacagcttatggtgagcagcaatcactagataaactagctgagatatggcatgtgatggaaacatcaatcgaaaaaggtttaacttgtgctgaagcaacgttaccaggtggtctcaaagttaggaaaagagctccaagtatgattagaaagctcaaggaacaaaatattgtcaatactgactttaattatttaaatgcttttgctatagctgtaaatgagcaaaatgcgtgtggtgaaagagtagttacagctcctactaatggtgccgcaggcgttattccagctgtgcttaaatattatttacagactcatgagattgttaatcaacaagaacttaaagaggtggtgaataaatacttactagtatgtgctgctattggtattttgtataaatctggagcatcaatttcagctgctgaagtaggttgtcaaggagaagttggtgttgcctgttcgatggcagctgcaggatactgcgctttacttggcggagatcttgattctattgagtccgcagcagaaattggcatggagcataacttaggacttacttgtgatcctattggtggattagtacagattccatgtatagagcgtaatgctatgggcgctgtccaagctataaatgcagctaaactagcataccttgatacaggtgagaaacgctttgttggtttagattatgtaatcaaagttatgtatgaaactggtttggatatgtctagtaaatataaagaaacctctttaggtggtttagctactaatgttccagtatgttagttaacttatagtagtgaaatatctaggttttaagttagtctggtaaaattatactaatttggtataatttaggtcgtaagaattctatagaagtttttgatatgtatgatgtaaataagattagacaagattttccttttttagcacaaaaaataaataataaatcggtgcttttttttgatacaggagcctcagcacaaaaacctcgagctgttatagaattcatagctgaagcatatgcgtatgattatgctaatgtccacagaggagtatattctcttagccaagaagctagtgaaaagtatgaaaatgttcgtaaaattgtacaaaaatttttaaattctaaatcagcagatgaaatagttatcacaaaaggaactactgaggctattaacctagttgctagctctatcggtaaggggattattaggtctgatgatgaaatagttgtcacagaaatggagcatcatgctaattttgtaccatggcagatgctttgtgaagacaaacaactagcttttaaagtagctgcaatcaaagataatggtgagctagatgttgagaatttattagctttagttacggctaaaactaaaatcttagcaattacattatgctctaatgttttaggtacaattaatcctgtgaaagagattattaaacaagttagacaaattaatccaaacataattattttagtagatggtgctcaagctgttattcatactaaggttgatgttcaagatttagattgcgatttttttgtcttctccgggcataagttgtatggtcctactggagtaggtgttttgtatggtaaatatgaactactaaaacaacttccgccttataattatggtggtgatatggttgaagaagtaactatatctaaaaccacatttgcgttaccaccatatagatttgaagcaggaactccaaatattgttggcgctattggacttggtagggctattgagtatgttgactcaattggtatgagcaatattgaggaacatgagcaaaaattgttagagtacgcgacaagtgagctaagtaaaataacgggtttaacaataattggacaggcaaaatataaagcaggtgtgataacttttaatattgaaggttgtaatgctggtgatatcggtgagctactagcaatcaagggtatatgtgtgagaactggtaagcattgtgctcatcctttgatgtatcgaatgggagttacctcaacagtacgtatgtcttttggaatgtataatacttttgaggaaatagatttgtttgtaatagcattgaaaaaagtaatatctcaattaaaataatttagcaaaaagaggcggatatggtagaagtttttgatccaaatgctagtagtgttttagaagttacagatgctgcggcaaaacatttcaagaaacatctagaaaagcataatggttgtataggcatttacgtcggaactaaggttatgggctgttctggcttagcttatgatgttgactttgttaaacagcaaccagaagatacacaaaaagtacaacagcatggtattagtttttttgtgtctaataagtctatgaattttcttaatggtctaaaaattgattatgttaaacatgattttggattatataagttagaatatacaaatccaaatgagtcagcacgttgtggttgtggtgaaagttttacagtttaggaatatataaataatgaaaccaacagatgtaacaataataagaagacaggtaaaagcaattgctgtaccatttggtaatgaagtcgagctaatgcctggtcaagaagtcttagtaactcaagataaaggtggaagctttactctaaatgtaaatggtaatttactccatctagatggtaaagatgcagatgcgataggtaagcaaatcgtcagataccctgtagaagaatacgatattaaaccaggtgatcctattaatatggatgctatttgggatcaaatgagaacagtttatgatccagagattcctgtcaatattgttgatcttggtctgatttataatattattactagaaagttagacaatggtaatttccatgtaataattgatatgacattaacagcgcctggttgtggtatgggaccagtgcttatgacagatgttgaaaaaagagtagcaatgcttcctaatgttgataaggtcgatgtggttatggtttttgatccgccatggaattcagaaatgatgactgaagctgctaagttagagttaggcttattttagtagtttagtttatgaataagatagcaatttacccgggcacttttgatccaattaccaatggacacgttgacttagttgatcgggcactaaatatttttgatcaaatagttgttgctgtatctacagcttatggtaaaaatactctttttgatattgctactagagagcagattataaaagaggttttcaaagataatcaaagagtcaaggttgtaagctttcaaggtctgcttgttgatacagcagtaaaacataatgcttgtgctatagttagaggtcttagagcagtatctgattttgattatgaatttcagatgtcaagtatgaataataaacttaatagtaatattcaaactatattcttaactccgagtgagaagttttcgtgtatttcttcaacattggttagagcagtagcgatacataattataagcgtgtcgatgagtttgtacctgagtgtgttttccgtgagataaagcttaaatattctaaggaataaaaattatggcattattaattactgatgaatgtattaattgtgatatttgtgaacctgaatgtcctaatgaagcaatatcacaaggtgaagagtattatgagattgatccaaataaatgtacagagtgtgtaggacattttgatgaatctcagtgtaccaaagtttgcccaattagatgtataatcatagatccaaataatatagaaacacatcaacagcttttagaaaaatacaataatttagtatcataaagctataaaaaaactctttgatttttttaaaaaatcatgtagaatacttgagtcttatgtttcggcatgtgaatagttaaaaagtatttaaaggagtttttgatgagattaaaaagtattgttatagctacaactgtattattaggttcagctacagcatctatcgctgcaggttcagataatatggatacgtcagcaaacactaattcagctactacacaaagcaccggttttgcagctaataatttcattgctccttttgcaaatacttatagcgctttgactaacaaggataatacttggggacctcaagatagaactggtcagtggtacttaggtgtagatgctaacggtcttgctggaactcctaactctccatcaggtgctggtgctaacttcacaatcggttataatgttaacaaatactttgctgtacagtataaccaattagttggtagagtctttgctggtttaggtgaaggtgttgtaaactttagtaacagtactatgtttactccatatgctgcaggtggtgctggttgggcgaatctagcaggtcaagcaacaggtgcttgggatgttggtggcggtcttaagtttgagctatctagaaatgttcaagcaagtgttgactatagatatatccaaacaatggcacctagtaatatttctggtgctaatggcagagcgggtactaacatgattggtgctggtttaacatggttctttggtggcaaagatactactaataatgacactggtaatatccaagataatggcgcaactacagcagcacaaactgttgctatgccaactattgatgaatctaaatatgttttacctacaggtattaagcaatgtgaaggcaactttaatctaactgaagatggtgttgcgtgctatacagtaaatggtgatgatgtaacagtttacttagatactaagtttgcttatgataaagctactttaaatgctaaaggtaaaaaagctattgcatcttttgttaagtttatcaaggatagtaatattggctctgtgacagttaagggttatgcttctcaaggtcaaactggtggcgaatttgatatctataaccaaaaactttctaagaaaagagcagaagctgttgctgattatatgaagcaattaggtttagatagtgagaaaataatcactaaaggtttcggttacgacgatactttaggtggtattcctaaatctgatccgcgtaaccaacgcgtagaagctagcgtatcagctcctcttaaagaagctaactaatagcttatttatcaaaatcttttaattttatctatattatattattctagacaatcagttgatttttatatttaaactatttggtaggtattaaatatatttttatttactattatgaattaaacataataagtcacataaattttgataggttaatatagcttattagttataagaatagtatgaaatagcttaaaattaagttgttacagtggtaaagcctgacggaataatatactattcttagtctagttagttatatagtctagtaggcttacaagtactatgttctgctgttactctgaaatagttttagtttcaatgaaattaatatttataatgagatgatgaacatgtactagaccagcttcattattttctgtatatagtttataaagaaaaactctcaaagatgatttattctctaaatctgatattattttcctattaataacatgcatatacatgtatagtaagctcttaataagagtattaaatagtgtcagtcaattcaaataaatatcaatttacatctctaagtaataaagtcatatataaacaatataaagatcaatttgaaaaatattttcattaacttagattaccataaagatatttttttcaaaaagataaaatgaattataaattttataattttaatctaattttagtattgagaaattagattatcgtatttgattttattaaacagaattactataaaggttgttaaatttttcaattttttaaattgattttaattttaaatactggtttaatgcttattaaacaaataataaatgtaagtgaagctgaagctagtttctacaagctttgattcaaatttatagattttatgattataaactttatgattaaaaatttatatcaaattattctctaactagagtaaaagaggtcactttatgaatatcaaaatattaccaatagcaatagatttaggtgctaaaaatactggtgtttttagcgcattttatcaaaaaggaacttctcttgaaagtttagataataaaaatggcaaagtatatgaactatcaaaagattcttatactttattaatgaataatagaacagcaagaagacatcaaagaagaggtatagatagaaaacaactagttaaaagactttttaagcttatttggacaaagcaactaaacttagagtggaataaagatactcaacagactattagctttttgcttaatcgtagaggttttagttttattactgatggttattcgcctgaatatttaaatattgctccagaagctgtaaaagcaatacttatgagcatacttgatgattataatggtgaagatgatttagatagttatttacaatcagctactgagaatgatagcaaaattgatgagctatataataagctattacaaaaagcactagaatttaagctaagaaagttatgtattgatatcaaagaagataaagtaactactaaaacacttaaagaactctcaaatacagagtttaagttattagctaattatctagttgactatgatcgtatcttaagaacacaaaaatttagttatacagataaacaaggtaatttaagagagctaaactactatcaccatgataaatataatattcaggagtttcttaagcgaaatattattataaatgatgtaattttagaaaagttaactgatgatttagatatttggaatctgaattttgataagtttgattttgagaagaatcttgaaaagcttgaaaatcaagaagataaagattatctacaaacgcatttacatcattttgtttttgcagtaaataaaataaaaagtgaaatggcaagtggtggtcgtcatcgtagccaatattttcaagagataacaaatgtgctggttgaaaataatcatcaagagggatatctcaagaatttttgtgaaaatttacataataaaaaatattcaaatttaagtgttaaaaatttagttaatctaattggtaacctaagtaatttagaactaaaaccgctgagaaaatattttaatgacaaaattcatgcaaaagctgattattgggatgagcaaaaatttgcagaaacttatagcgattggatactaggagaatggcgagttggtgcaaaagataaagataaaaaagatggcgctaaatatagctataaaaatttgtgtgatgaattaaaacaaaaagttggtataaatcaggatggtataattaaccaaactaagagtgattttgtggattttttactagagttagatccatgtagaactatcccaccatatctagacaacaataaccgtaaaccgccaaaatgccaaagtttgattttaaatccaaagtttttagataataaatatccaaactggcaacaatatttacaagaattaaagaaactacaaactgttcaaaattatttgggaaattttgaaattgatttaaaagacttaaaatcaagtaaagagcaaccttattttgttaaatacaagagtttaaatcagcaaattgctagtggtcaaagagattacaaagatttagatgctcgagtgttacaatttatatttgatagggtaaaagctagtgatgagttacttttaaatgagatttactcgcatgctaaaaagcttaagcaaaatactagttctgagttagaaaaactcgagttgtgcaaaaaactagatgaagttatagcaaatagtcaactatcacaaatactaaagtctcaacatgtaaatggtatttttgaacagggcacttttttgcatttggtttgtaaatattataaacaaagacaaagagcgagagactctagactatatattatgcctgagtaccgttatgataaaaaactagataaatataacaatacaggtagatttgatgatgataatcaactattaacatactgtaaccataaaccaaggcaaaaaagatatcaattattaaatgatctagctggagtactgcaggtatcacctaattttttgaaagataaaattggttctgatgatgatctatttattagcaaatggttggtagaacatattagaggatttaaaaaagcttgtgaagatagtttaaaaatacaaaaagacaatagaggattattaaatcataaaataaatatagctaggaatacaaaaggcaaatgtgaaaaagaaatatttaatttaatatgtaaaatagaaggttcagaagataaaaaaggtaattataagcatggtctagcctatgaattaggtgtacttttatttggtgaacctaatcaagctagtaaactcgagttcgataggaaaatcaaaaaatttaactcgatatatagttttgcacagattcagcaaattgcttttgcagagcgtaaaggaaatgctaacacttgtgcagtttgtagtgctgataatgctcatagaatgcaacaaattaaggttgctaagcctgttgaagggaacaaagataatataatcttaagtgccaaagctcaaagactaccggcgataccaactagaatagttgatggtgctgttaagaaaatagcaactatattagctagaaatatagtagatgataattgggataatatcaaacaagctttgagtaataatcaacaattacatgtaccaatcatcacagaatcaaatgcttttgaatttgagcctgcattagctgatataaaaggtaagagcctaaaagataagagaaaaaaagccttagagagaatagatcctgaaaatgtattcaaggataaaaacaatagaataaaagaatttgctaaaggtatatcagcatatagtgacgctaatttagcgaatggcgattttgatggtgcaaaagaagaattagatcatataatacctcgctcacataaaaaatacggtactctaaatgatgaggctaacttgatctgtgtaacacgtgaggataatcaaaatcgaggcaataaagcagtattcttatatgatctaaaaccaaattataaactaaaacagttcaacacaactgatgatttggaaattgaaaagaagatagctgatacaatctgggatgctagcaagcaagattttaaatttggtaattatcggagttttattaatctaacaccacaagagcagatagcatttcgtcacgcgctatttttggctgataaaaatcctatcaaaaaagcagtcataagggcgatagataatcgtaatcgaacttttgtaaatggtactcaacgctactttgcagaagtcctagcaaataatatctatttgagagctaaaaaagaaaatctagctacaaatagaataacttttgattattttggaatagagactacaaattcaaatggtagaggtattgcagatgttcgtaaactctatgaaaaagttgatagtgatatacaagcgtatgcaaaaggtgataaacctcaagatagctactctcacttaatagatgcgatgattgctttttgtgttgccgcagatgaacacaaaaatgaaggtagtataggtttgaaaatgggtaaccaatatggtttgttcccaacgccagataagtatgatgaaaacacaggcgaaattataagttggcataatgatgatatttttagaaaaatcaaagtatctgataatcagtttagtgataaaaaattagtaagaaaaaaagctacagagggctttaatacgcatagacagatgactagggatggtatctatggagaaagttatttaccaatactaatccataaaaacctaaatgaagttagaaaaggctataactgggaaaatagtgaagaaataaaaatattcaaaggtaaaaagtacgatatacaacaattaaataaccttgtgtattgtctaaaatttgtagataaacctatatctatagatatacaaattactacattagaagagttaagaaatatattggaaacaaataatataagtactacagcagaatactattatataaatctaaaaactcaaaaattacatgagtattatatcgaaaattataatactgctttaggttataaaaaatacactaaagaaatggagtttttgagaagcttagcttatcgtaccgaaagagtaaaaatcaaatctattgatgatgtaagtatgatattggctaaagatagcaactttaaagctggaaaaatagaattgccatttaaaacagagtggcaaagactataccttgagtggcaaaatacaactatcaaagataatcatgaatttttaaaatcatattttagtgtcaaaaatgctacaaaacagcataaaaaagttagaaaagatttctctttacctatttctacaaatgaaggtaagctcttagtcaaaagaaaaacatgggataacaattttatctatcagatattaaatgattctgattctagagcagatggaacaaagccttttattccagcttttgacatttctaaaaatgaaatagttgaaactattattaaatcgtttacatcaaaaaatattttttggcttcctaagaatatagaattacaaaaggtagataataaaagcatttttgctatagatactagtagatggttcgaagtagaaacacctaaagatcttatagagattggagtatcaacaattcaatataaaatagataataattctcgcccgaaagtcagagttaaacttgattatgttatggatgatgatagtaagataaattattttatgaatcattctttattaaaatcaagatatcctgataaagttttagaaattttaaaacaatcaactattatagaatttgaaagttcaggttttaataaaactatcaaagaaatgcttggtatgaccttagcaggtatttataatgaaacatctaataattagtgaatacggtttatatcttggtttagaggctggtagattagttgttaagaataaagaagataaaaagtattttccattaaatcgactagctacagtttctatagctaaaaaaggtgttagtttttctagtgatttgatagagcagttttctctaagaggaatcaaacttttcttttggattttagaggtgttgctcactcgatgcttgttggtgctaatcagcatgctgtagttcaagcacgtataaaccaatatcgctatattcatgagaatgctctagcactatcaaccaagttgattatagctaaaataaaaaatcaacgtgctacacttagctattttaataaacatcataaatcagtaaatcttttaaatgctatagaagagctaaaaagaatagcacaacttatcaaaaatgctaaaactttaaatgatgtgttaggttatgaaggatatgctgcaaatatatatttttcaagtttagccagagataagtttttatcagagagttttgctaatagagaagggcgaggctctcaagaaattgctaatagtatgctaaattttggttatgcaattttatctagttatattctaaatgctgttacaaatgctggacttgagccttacctaggatttctgcatcaaaaaagaccggggaagatgtcactagttttagatttgatggaggagtatcgagcttgggttgttgatagggtggttattaagctacgtgaacaatataagaataagaaaagtattgatcctaaattaaaatcggcattaatctcagagatacaagcaactatagctaagaaatatatttataacggtaaaaagttaaaattagagcatattatccaaaggcaggtttatagattatctggagagtttgctggcgagcataattataaaccgtatatttttaaatggtaagatataagttgattgagttagtcgaaatagacacatataggttaaatattactttgactagcccggtcatctttagaggagagtcatgcaactaagaaaagaatatctaatagcctatgatatagaagataatagaactagaacaataatctataaacaacttctagcttatggtcttaaggcggtacagaaatcagtattctggggtcatataagcattgctgagcttaatgctattaaaagattgtttgctaactcattaactatttcagacaaaatatttataacgagggtgaatatgcaggagcaaaagctagaatatagctttggttacgatgacaaaacttttaaagattgggaagagtatggacatatttgataatgatttatcgataccgattaatttaattaggcaatggtgtttttgtcctagagtagtttattatcaagaactattggcgattaagccacacaagccattatgggttgctcagggtgaagaatttcataaaaaagtagagcatcttgagaaaagacgaaactttagtagatatggtttagataatgctattaggcattttaatgtaactataaaaagccaaaattataaactccatggtatagttgattgggttttagaagctgataataatgtatatgtggttgagtataagacaaatcctaatccaaatagtctaggacataaactacaaatagcagcctatgctttattagcacaggagtattttgctaagccatgtaaaactacatttctaacatctgataaaaaatcatatgaaataaaaataactgatgagttaatcacaaaacttgtaaaaactgtcaatgatattcttaatgctttagatagtggtaataagccagactcatctgcatcggatcatcaatgtatacagtgtgagtatttaaatttctgtaatgatcgctaaaatcaaattccttcgagcttgtcagaataattttaaactaaaaagatatcataaagtaaaagatatagtctgctaggcataaaagtagtaaattttgtcatcaattatgtaattatgttttttttataaaatctatatttataatgagatgctgaaataaatttagcttgacatttttatctatggttagctatacaaagctcaaataaattatccactagcaaaaaaagccacttgagtggcaaatttttacttttagttattcagacgtgtcaaacagaggtccggtcaaaatacttttaaatgattacagagcattgattatttggtacgcttttaattgtagatattttttcgcaaaatgtctacatttttttacaagtaggatgtttgcgaaaaaacaccagcaaataattctctcaaagccttgcaaactctaggtttgtcttggctctaacagcagtatatcaaataatctagctactgaaacttgccagtataaccaccttcagcaaaaccagtaacactaacagcagtatatcaaataatctagctactgaaacgccaaaaagactgagcctaaggctaaagttgaggctaacagcagtatatcaaataatctagctactgaaacgtaataacagcctttgagcctttacagcctacaactaacagcagtatatcaaataatctagctactgaaacccagcactatctgcaattgcaatgttgctttggtctaacagcagtatatcaaataatctagctactgaaacattaaaaaagaaatatatgctgtatcgtatggcactaacagcagtatatcaaataatctagctactgaaaccatataacctgaattgtacccgtatcggcagcagctaacagcagtatatcaaataatctagctactgaaacttttttttatttgttttgcctgcaatgctcatagcactaacagcagtatatcaaataatctagctactgaaactaacgcctcgaagttgaactttataacccaatatagctaacagcagtatatcaaataatctagctactgaaacttcatctaaccaatccccataatcgttccataattgctaacagcagtatatcaaataatctagctactgaaactcgacatactcttgatattcattatctggcttaactaacagcagtatatcaaataatctagctactgaaacaatatcgctagaaaacatattgttaagcatattatctaacagcagtatatcaaataatctagctactgaaacccgtttcaacaacaggcttgaagtttcaagcactctaacagcagtatatcaaataatctagctactgaaactcaccctcgccgccagtttgaccgcctccaccagctaacagcagtatatcaaataatctagctactgaaacaattgtgaaatagataatatagcttctacattagactaacagcagtatatcaaataatctagctactgaaacataaaaattaaataaaatatcttgaaatgcttattctaacagcagtatatcaaataatctagctactgaaacagagaatttgtatttagataccctaagattaagaaaactaacagcagtatatcaaataatctagctactgaaactctggacgagtgttggttatagtcattgtcataccctaacagcagtatatcaaataatctagctacttataaataacactaatacctagcatcaaacaggtaagtttttattgtacatcaaataacctagctaccgaaacttaattaattttacgaataatatttagaagtttctatctgggtaaagtatatcagataatataaccgctaaaatagttatatagcaaaatatcaattcaagtacagtattgaaagcagtatatcaaataacctaattaacgaaaatttacagctaattgttctttatatgttaggttaatcctaaccctataacactagtatgtaccaaataatctagctactgaaacttacagctaatcttttttcatttgctggactaatcctaagatagtatatcagataatctagtaactgaaacttattaaaaaaaataatatttagtaagatcattacttgcttatgaaaacctaattctaagagctatgtaaacaaagttttaagagactttaagcaatttattttatggattaattattttttgaatcagttaaaaataatagctaaaatgatatatggctgcaattagcttaataatagctaaaataaagtagtatatagaatataaagttgccataaataccatagctaacaacaaaagtgtaatcataactaatattgagattatcagtatttatagagtataaataaaaagctcaaactagcaaaataaaagagtttctaaaatagccttttaaaagttatttttagtagctttatacagttagtttaatgattatttgttataatatctattagcaaaattatatttcgttttggattaagaatttagtgaaaaatcaacttaaatggatggcatgggaaacaaccagacgttgtaatctcaaatgtgttcattgtcgttcatcttctgactgtgaggtacttggtcaccctgatttttctaccgaagagggttttagaattattgatagtattgcagcatttgctaatccggttttggtgttatcaggtggtgagccactactacgtactgatatctttgaactagctcagtatggggcgaataaaggtctacgtatggcattagctacaaatggctctttagtaactgatgagatctgtgagaaaatcaaaagctcaagtataaatatagtatctctaagtattgatggtgctacagctgcgacacatgatgattttagaggtcaagagggtgcttttgaggcaactgtaaatgctgctaagcttttcaaaaaacatcgtataccttttttgataaactcatcatttactaaacgtaatcagcatgagatcaaagatgtttataaactagcaaaatctctagaagctacagcatggtatttatttataatagtaccaacaggacgaggagaagagcttatgcaagagctaatcgatatcgatgattatcaagctattctcaattggcactatgatatggaggcagatgagcaagatatgctagtacgtccaacttgtgcgccacattattatcgaattcgttttgagcgtaataaagaggatagtgcaaaggttcgttcacgtgctcttagctttggtactgggggtggtaagggttgtattgcaggacaaagtatttgcctacttgatgtcgatggcaatgtctatccatgtagttacttacctgtcagcgctggtaatgtcaaagagaaatcttttgtcgagatttggcaaaatagtgatgtaatgaatcatatgcgtgattttagcgcttatgagggtaagtgtggtgcgtgcgaatttatcaaaatatgtggtggctgtagagctagggcgtataatattcatggtagctatctagcagaagagcctttttgcaatcacatgccaattagaatgagaaatacagaggaaaaaataaggtcatgagtaattttaaaaatatagttttatatcgtatggttacaccagagaaagtttgtccatatggtctcaaggcgaaagcactttttgaacaaaaaggttggagttttgaagataatcatctaaaaactcgtgctgaaacagacgccttcaaagcaaaatataatttacaaactacaccattaatttttatagatggtaagcagataggtggttatagtgacttacttgagtttttgggtgaaaaatgaatcagcaattaaaatattttgtcctatctactcaagtattgcctgagcatattgatccaaataagcatctaaataatattgtctatctacaatggatgcaggatgtcgctatcgcacatgtcaaggctaatggcgtctttgaattgaccgagtctcaaggacttacatggtttgctaggaaacatactatagagtatctatcacaaggtttcttaggtgatgatatcgctgtggttacatgggtggagagtattactaagatttctacatttagaaaatatcatatctatagaaaatcagacaaaacactattatgtaaagcagatacgctatgggtcatggtaaatgcgcatcggggcaaacctgcgaaaattcctacagagctagtcgaaattttcgataaatataatgattttgagattgatgatattaaaagcttaatctaagtaagtattttaaagctattttttatcgttttgaatcacttccactggtccgtgatcatcacaatgatcgccatgaggatggtgtaatctaccatcaacaatataatctatatgatcaccatgaggtactgcttcatgaccacaattaggtccatgtatatgtttagagcaatcttctttgattggatgacagccatcgggattcttttcggtgatttctagggtatgttcatcatagtgaccattgtgttcatgatgaaggtgaccatcatgtagatagtcgtagtgatcgccatgtttgattttggtatgaccacagtcatcttgatgtttatgctcatggttttgatgtgttttacatttgctcatagcgttatccttttgtagacttgtattataatcttaatgctaatcagtaaaaacatcaattctactgtgttaatttgttaaattagcgcgattgacaaattttatacggtaggctaaatttgttttgaaaggtacaatcctatttactagaaaagcttataagtagttatggtttaaaatcaaaaaccaacaataatttgatagaaaaaattatttgaatttgaactcttgatagttagcttgtccaaatattgtatctgcttgatattcggctttggcaaaatctatcttactaagatcaactttacggatatcatagttatcccaagtacgaaaataataaacacgattactaagatcatcaactacagagtatgaggtaaattgtggctgagaacttacccatttccaatatagagaaccctgtggtatatctacagtgttgatcattgaccaagcatgatttacagctgtcaaatcatctggtgtatttgctttagtagcattaaaagatgccatttttgcaaagcgacctgcaggtgaataatcaaaagcaatcaatctatcttgtttaaatttatcaccttgatatttttttagcaattcaagttgctgatcataggttggatcattagtaagaactttaatcttattattataaattttggctttaccatttataaactcaactactacagagttaccctgagcatcactaatggcaaaatgtagcgtaatctcgagtttatctgagatctctggtagtacagaagtatagaacttattttttttgatgaattctacagcttgagcaactgttttggtattacctaatacatatggtaacagcatggctatattatagttagcatcttttttatccgaatacttactactactaagccaaagagcacttacagctaaaccatactcattgataccatcactaaaattaccattatgactcataccaacaaagccgtagtgagttgtaaagtctgcaaacttatagcctcttggtactagggtaattttagtatttaaatcgccaggccattccatagttctgccaataaagtaatgtcccttatcattttcaaaactaaaccaagtacatccaaagctaaattgtagaaatgataatataattaacggagttactattattttcttaaacatacttaataattttttaactgatacatattgaccattatacatataactagagtactttatatatttatattctgatattcaaaaaaatggcaaattttatttaagacgctggcgtaaaccttcaaataaataaattgttgcagcttgagctacatttaacgactctatatcactaagtgtaggtatcatagttttttcacctatagaaaaatcttcgataccatttgcctcttcaccaaaaactaaaatgctattagcaagtttgaattctttggcatagcatgatactccctgatgtggcgtagttagccatattttgcgctgctgtaattttgagatattctttagatcagcaagagtttctagatagctaaatttgagactaaattgtgctcccataccagctctgatggctttagggttaaatggatcaacagtgccattgattaagataatttcttttaatcctacagctatagctgtacgtagaattgtgccaatattgccaggatcttggattctatcaagtactagtataaagtcatcatcaaagttaagctcttgggagttgggtttttcggctaaaattaaaattccttgtggattttgtgtttgtgatagtgcttcaaaatctttttcagtaataatatattttttgtctagagcataatttggactatcagttttctcagttaccaatatcgcaattatttgttgttgtggtaatcttttgagggcttcttgagcgcatctaaatccttcaatgacataatacagtgacttttttcgaccctgagagctatgaagtttttttatttctttatagagtttttggctaagatttttcattaaattaattagctaagaattttgttagttattgtatgttttttggcgtggtgtttaaatagctttactgtgtatttttgctatagctagctataaatgttaaggtaaatatactattaatagatctcgagagtatattatgcaaagagaaaaaggagcttatgctccagtattttatcctgctatcgttattgcaatcgtattatcattattaggaattttagtgcctacatcttttgctaataatatccaaattatccaaaacctaatattagaaaagtttggctgggcatatattttagcgatgagcttttttgtttgtttatgtttgattttgatgtttagtcgttttggagatatcaaactaggtcaggatcatgagctgccagagtatacaaatatctcatggtttgcgatgttatttgccgcaggtatgggaattggtttgatgttttatggtgttgctgaaccactaaatcattttttaactcctcctaatctttcgccagatagtctagaaacgctaaaacaagctatgaatacaactttttttcattggggaatacaggcttggtctgtatatgctgtagttggcttatctttggcatattttgcatataggcataatttaccactattaccacgctcagtactttatccaattttaggtgacaaaatctatggagtaattggtcatggtattgatatttttgcgatattaggtaccttgtttggggttgcgacttcattaggttttggtgcaatgcaagtaagttctggtatgagttttttaactggtattgctgatactcaaaatatgcaagttatctatatcatcataattgtcgcacttgcaactatatctgtagctttaggacttgataaaggtatcaaagcattaagtaatttaaatattatattagctattgtattattagtttttatattatttttaggggatactgcaggactgatacgtgattatatccaaaatattggctactatttaagtactattgttaatcagacttttaatctatacgcctacaatcaaaataatcaagaatggttgaaaaagtggactttattttattggggttggtggatagcttggtcaccatttgtagggatgtttatagctaaagtttcaaaaggtaggacaattcgccaatttataataggtgttttgtttataccagtagggtttacatttttatggatgactgtgtttggtaattcagctattgaaattgtaatgagtactaaagctcaagagctaataaatgctgccaataataatattccagtagcgctatttgagtttttgcagcattttccatttgcgacaatattatcgatcttggcagttcttttggttgtgacattttttgttacatctgctgatagtggcgccttagtaattgatattttag

SEQ ID NO: 158 - DNA, 24938 bp, synthetic construct
  source 1..24938: mol_type = other DNA
  misc_feature 1..24938: note = Synthetic
gagttaaaatatggtaagacgtatttgtttgaaatagataatgagacagagatgtctcatcctatacacattcatggtcatgattttaaagttgttaaaattaatggaaaatctatagatgatggggttataagagatacattatatgtagagcctaaatctagcgtaaccatagcactaaaagcaaatgagttaggaaaatggtttattcactgtcatatgctttatcatatgcattcaggaatgatgacttttatagaaaccaaaagaactaatgtttaacagtatttgaaattatctcactaatttttataaataaatcttcataaatcgagcttttacgcataactaaatctatttctctgaagaaatcaccgttatcaatatcgatatatttaacattttcagctttagtacaagctgtcttaggaattaatgtaacaccctcatcaatagataccatctgtcttagagtttctaagctactgcctttgaagtcattattattaaaatcctttaatgaacataatttcaatgtttgatctcttagacagtgtccttcatcaagcaacataagattttgtttaacaatttcagttatacaaatttttttattttttgctagtggattagtctttgccacggctacatagaatttatcatcaaaaactttttttcttttaaactgatagttatccgtaggagtcgccaaaagagcaaagtcgatcttaccttgatcaagcatatttacaagcgtatcagttttttcctcaattatagagatacttagcttcggaaattcttttttgatttcaggtaaaacttttggcatcaagtatgggcataatgttgggaatgctcctattgatatgcttatttttccattatttaaatgtagttcggatatcttttttaaattttttacttcatctaaaatcttataagcttgattaactattttcataccagcttttgttataagtacttgttttgtacctctttcaaaaatttgtatacctataagctcttcaaatttttttatctgcatacttagggctggttgactaacatagcacttttctgatgctgtaataaagcttttagtttcatatacagaaatgatatattcaagagtacgagtattcatataagtaaatcttatagctagtataaatataatatattttaaattatttattaaagcaatacaataacagtgtaacttaacaaaacacaaggagttagacatgactaaaagagttcctaatgtaacttttaagactagagtaagagatgaaagtatcggtggatcaaacccatttagatggcaagatgtaacatctgctgatatttttgataacaaaagagtaattgttttttcattacctggagcgtttactccgacttgttctacttatcaactacctggttttgaaaataatgcagctaggtttaaagagctaggaatagatgaaatttatgttttatctgtaaatgatagctttgtaatgaataagtggatacaagcactagatgttaaaaatattaaaccaattcctgatggtaatggtgagtttacacaggctttagatatgttagtagacaaatcaaacctaggttttggcaagaggtcttggagatatgcgatgatcgttaacaatcacgaaatcgaaaagatgtttgtagagccaggtaagcgtgataatgctgaagatgatccttacggagagtcttctcctgagaatcttctaaaatatttagaagctaaatagcgaaaaatggagtctctaatgagcaaaaaagtagttctaataggtgcaagcggagtaataggatcagcaacttataataaatttataaatgcaggttatgaagttattccagcaacatttagtggaagcaatggttcacaccgtattgatatagaggatatagaatctatcgaaaatttctttgaaaaagtaggttcttttgatgctttagtatctactactggtaaagtagcttttaaagctgttgatcaactaactcaagaagactggagttttagttttagaaataagctacttggacaaattaatctagtgcaaattggtgcaaagtatatcaataagggcggttcatttactctaactactgggatattaaatgttgagccaattgctttgggtgttgcagcagctacagtaaatgctgcagtagaaggatttgtaaaagcagcaactcttgaatataaagatttccgtataaatactgttagtccaactgtagtcaaagaggcgttagcaaagtatgggccattctttgtaggctatgaacctattgaagcagagaaagtagctaatgcatatcttaagtcagtagcaggaattgctaatggtagtattataaaagccggttattaatttataattattaaaaaactattctacacttaatttcctaataatattgaccaactctattcatatatatactattttattaagtatctattttaagattgcattcaataagtattgttgcgcttaataatgattgatatttatttcaataaggagaaaacatgaataagatattaactacagcaaatggcgctccaattcctaatgataatacaagtattagtgcaggtaaaaatggttcgctaacatttgataactttcgattatttgagaagttagcacattttaatcgcgagagaattcctgagcgtgtagtacatgcaagaggtactggcgcatatggtacttttacccttgaaaaagacttgtcagatttgacagtagctgattttttaagagatcagaacaagcagactgaggtttttgtgcgattttctactgttggaggaggtcaagattctagtgattatgttagggatgtgcgtggtgcagctatcaaattttataccaaacaaggcaattttgatattgtgggaaataacacaccagtattttttataagggatcccaataaattccctgactttgtacactcacaaaaaaagaatcctcgaactaatctaccagatcctgcagcacagtttgaattttggtcaagaaaccctcagtctttgcatcagatgacaatattgatgtctgatagaggtatcccaaagaactataggcatatgcatttatttagctcacatacattaagcttttataatgaaaatggtgaacgtttttgggttaagtggcattttaaaacacaacaaggaattaaaaatctcacaaatgaagaagcatctaggcagccaagctatggagctcaaaaagatttgtttgatgctatagagagtggtaactatcccaagtgggatgttaaattacaaattatgactgaggatcaagcaaaacaatataatataaatccttttgatttaactaaggtttggtctcataaagattttccacttcaaaaaataggtattttagagttaaaccgtaatgttaataattatttcgctgaagtagagcaagctacttttgctcctaataatctagtgcctggtgttggtgcatctccagataagatgttacaagctagactactagcttatcaagatgctcatagatatcgagtaggtgtaaatgcaagtcatataccggtaaatgcttcaaaatgtcccatgcataattatcagcgtgatggagcaatggctggtacagctcttaatgtatcacagaatgaaatgcctaatttttatccaaatgcgcattctgattctccttcagatgctaagcaatatatagagccacctttagaaatagagggttatattgcttattatgatgcacaaggcgaagataactactcacaagctggaaatctttttagattaatgagcgaatctcagcagcaacagttagctaataatattgcagaaggattggtacatgctagtcaagagattcaagaaataatgcttgaccagtttgctcaagctgatgaaaactatagagttaaggtcgaaaaagcccttcaagacatctagttagaaattatttttgctcagattatctgacatcggtagaaataactcaaaatagaactgtgatataaaataagtttttattttctaatagtaactattaaatgaaattttatatactattgactttcaaaagtttttataaaacattatagtattaaaatcgaaccataaattttgtactttatgaaaaaatacatattaatcttactcagtgtagctacttttagtttatcttttgctatgagtccaagtagctttatcgctaaaccgacttcagagaaatatgaatctgaaattatggatgcagatgaacaaatcataaagttcatagcaaagcgtcaagagttaagaaatcaaatgttagatcttcagaaaaatcagaagttacctagtaatgatccatttgaagataaagacttggcggctacgcgtactaactttgcaatacagtataatgtaagccctaagctggtcgatcaagtatttgatattctaaattcttcggctcaaaaaccagcaaaataatattttaaataaaatttataagaggtggtaatacaatgtcaatttatgactttaaattaactaagaatgatggctcagaatattctttacctaataataaagttcttttgatagttaatgttgcaagtaagtgcggatttactaagcaatatagaggacttcagcatttacataaattatatcctgatctagagatagtggcttttccatgtaactcatttggcggacaagaacctggtagtgatgaagaaatcaaaagtttttgtgaaactaactatgatgttacatttccaataatgaaaaagacaaaagtaaatggtaaagatgcagaaccattatttgaatatcttaaagaaagagcaaaaggtgtgcttggtaccgaagctataaaatggaactttacaaaatttttagtatcaaaagatggtgagactgtcattaggtatgcacctaaaacaattcctgaagatctaatatctgatatcgagaattttcttaaagattaagttcaaaaatctgtataatttatttatctctgttttaaattctaaaatatgatttcaacttcattatcttatatatcatctttattacttatatgtagtcttatagttttgttatcaagtaagtcaaaatcaaaattatttgaatattttccagcgattgtaattatttattttgtcatagtagtactttcagctatgggattttgggattcaaaatcttcagaaattattcaaacaagattacagcttcaagatttaatattgcctgtgatgttatttttgatgcttattcgttgtgatattagagtcgttataaagctcggtagaaaattacttatagcattttttggagctacagtaagtatcataatagcttttgtcataatgtatttgactgttggtaagtatatatcgccagatgcttggaaaggattctcagctttatcagcaagttggatgggtggtactggtaatatgatagctgttaagcaagctcttagtactcctgataatcagatgggctatatactattgacagattctattagttattctatttggtttgcttttctgtttgcgcttatttctcgagcaaatatatttgataaatggactaaagcaggttgtattgaagagcatataagtaaagttgatattaacaatccttatgatgtcaaaggcgatattaactttgttggaatatttgtattaattgcaatggcatttactgctactgatatagcaaagattttatcaagttatttaccagcaacagatttaatatctgctaagacttggacaatattgctagtaacactatttgggtttgtaggtgctatgactccattagccaaaattagaagtgatagtattattgcaagtatcttcttatattttttggtcgcacttatagcatcaggctcaagttttaaagggttttctcaagcaccgatatacatagtttgtggacttatggttcttgttattcatgctatacttatgataataattgccaagatatttaggctaaacttagcaatgtgctctattgcctctttagcaaatattggtggaatagcaggagcaccaatattagcaagtgcatatactagaagtttggtatctattgcagttgttatggctttacttgggtttttgattggtacccaaggtggattaattgtagctaagatactttcaggatttgcaatatgagtaagataattgatataaaaacatctatcatcaaaatacctcttaaaagaacatttataacagctgtacgaagtacaaaccatattgattccttagcagttgagttaactttagataatcgagttaaaggttatggtgtagctccagcaaccacagcgattactggagatacgttgcagggtatgcaatatattattcgtgagatatttgctccagtgatacttggctcagatttatctgattacaaacaaactttagaactagcttttaaaaaagtgatgtttaactccgctgctaaaatggctatagatttggcgtatcatgatttattagccaaagaacaaaatatatctgttgctaaattacttggagctaaagcaaattctatagtaactgatgtttctataagttgtggaaatgttgcagaaactatacaaaatattcaaaatggtgtggaagctaactttacggctattaaggttaaaacaggtgctgattttaatagagatatccagttgcttaaagctcttgataatgagtttagtaaaaacattaaatttaggtttgatgctaatcaaggttggaatctagcacaaacaaagcagtttatcgaggagataaacaaatatagtttaaatgtagagataatcgagcaacctgttaaatattacgatataaaagcaatggcagagattactaaatttagtaatattcctgtagttgcagatgagtcagtatttgatgccaaagatgcagaacgagttatagatgaacaagcgtgtaacatgattaatattaaacttgcaaaaacaggtggtattttagaagctcaaaaaatcaagaaattagcagacagtgcaggtatatcatgtatggtggggtgtatgatggagtcaccagcaggtattttagctacagcgagttttgcattagcagaagatattacagtagctgatcttgatcctttagactgggtagctaaagatttgtatagtgattatattacatttaatgagcctaatattattctaaaagataatctaaatggttttggttttaatctttaagtaatacatataacgatgagtaaagataaagttgtaattttggtacatggttttattaaaaatagtaaagatatgtcatctttagctaattttttaaaagatagttatgatgaggttatagcagttgacttaccaacaacatttgtaagtgttgatgtagcagttaataaactatgtcaaattgtaaaaagtattccatcatcaaagtcgttgatatttgtagctcatagtatgggtgggataatatcatgcatgactattgataaattacagcttacgaatgttgaaaaatgtgtatttatagcttctccatttgctggctcaagagtcgcagattttggtgataggattcctttttattctagagtgctaaaaccaaataaagatctcaaagtaacagataagtatttagaaatctgcaatagagtagcagagaaagtatcagtaggtcttattgctggtaataagtattctaaacttaattttttagcaagactatgtctgagaaatgagcatgatggtttagtagaagtatcatcagtattttctataaacagtcttgacagaattactctaaataaaaatcatagtcaaattcatcatgatgaagaaactcttactaaagtatcatttttcttgaagacaggtaggtttctatcttaaaaaaataatttatattcatactattcagaacgaggcttacatgctagattcatttctggctctgaaaatgaattgtgacctacctcatgagcgtatcgacaatttttgttgttaaactgagtagcttcaaagaattttttatcattagtgtgtattgagaatcctagattaaataagatcaaagagatgatcaatatagctatttttttcatattatttccatcaaattttaatttcatagctattatgtcaggtaattcatatatgtaaaactaatgatttttatactatatataagatatacttatatgcatggtgttttctaagttctaaaatttgctttatgtgaattttgtcatgtaatttgtgttgggtataaagataattttatcttattatagactgtagtaattaaattaattgtttgtaacgtgcaatttttaacagaaaaacaaaaccgtgaaattgaagagtatgctatttctcaaggattaaacctaatcgaaaatgcttcagatgaaattgttaaacttatctgtaataagtttgataaacaaagtaaagttttagtaatagcgggttctggcaataatggcagtgatggaattgccgcagctatcaagttatttaatttaggatatgatgttgatgtttatcgagtttttccaaaaggcaatcaagacaaccaaaactattatcaagagtttttaaagttagagactcctatagataaattgccggatattaataattatgatgtcgtaatcgatggaatattcggtataggattagatagagatttacaaggagatattttagaacttgttaaagttataaatcaaaattcaaaatacacattagctatagatgtaccaagtggattaggtgcttttaatgccaaagtatatggtaaggctatccaagctaatgagacaattacatttttagctgataagcaagggctacatactggcgatggtttagattatgctggtcaggtaactgtcaaagagctgattgataatcaaaatatcaatattactcaatcggagtatcaagtttataaaaatgatattcaagatataaatcttgataatatccttaggaaaaagaaaaataccaataaaggtacttatggcgatctagctataataggcggtaatattggtatgaatggagctttgcaattagcgggtaaaagctcgttatatagtggttgtggtaaggtctcgatgatatctttagataaagactttcgtgccgatatgtctatacctgagctaatgacaaaaccattagaaattattagcaaaaatttagcaattttttcagctttggtaataggtgttggttttgatacaactgatgactctcaacaagttttgcagttaataattgataatttaactcaaccagcaatttttgatgcagatgccctaaatataatctcaactaatcaacaaattagagaaaaatttatccggttagaaaataaaataataacaccacatcctgcagaagcagcaagactacttggttgcactaccaaggaagtccaagatgatagatttgtagcagttagagcgttagctaaaaaatataactccacagtagtactaaaaggagctggtagcttaatttgtaaatctgatgaaatctatataaatgctacaggcaatcaaggtatggcagtagcagggcaaggagatgtgttatctggaattattggagggttcttagctcaaggtttggatacgctatcagcaagtagattagcagtatatgttcatggtttagctggagataatatcgttaaaaaactaggtggatatgttggaatatttcctagtagagtggctgaggaagtttgtgaggttttgaattttttaaattgattttagtcataagtattgatttaatgttagaaaagatattatttaaattatagatataattaaaacatagttaccttgaatatataattcagattattatattttttcaaaattgaataaggacactttatgagtatcaaaatattaccaattgctattgatttaggtgcaaaaaatacgggcgtttttagtgctttttatgataagggtctaaagcttgagagtctgattactaagcatggcatggtttatgagctatcgaaagattcatatactttattgatgacttcacgaacagctaaaagacatcaaagaagaggattagacagaaagcaacttgttaaaagactttttaagcttatatggactgagaagttaaagctagattgggataaagatactcaacaaactgttagttttttgctaaatcgaagaggatttagttttttagaagaaaagcatgatgctagttactttgagaaatttcctatagaagctatcgaattactaccacaacaattaagattaggtatagattctgaagaaaactatgatctcaatagtaaaattcttgaaactcttgaaaatgatactttcaaagatgtatttgaagaaattgagagtaacataaaacaagcaaaaaagaatattgttaaagctaacgttataaatataataaaatctgctattgatgataaagttagaatgggagagattaagccaaccaaacaaaataaatttaacgacttaaaaaaagtatctctgtggattgtagaagatatctttgactcaacaacatctgcttatatagagagagttgataattattcaaaaaatatatttaattacttaaactcactatcaagtgatcaattagagattttaaaaacgaacttacctattatagatctcaatgagcataaaaatagtgtttggaatttcaatatttctaattttaatttggataatgagaaattagttgaaaaattagaagttggagatgtatcagctcatctacatcatttagggtatgcacttcagaatattaaaaaagagcttgatgaaggctctaggcatagaagtaagtactttgaagaagtcgctagcgtgctactagaacaaaatcataaagaaggatatctcagaaacttttgccaaaatttacacattggaaaatataaaaatctaaatgtcaaaaaattggttaatctaataggcaacctcagcaacttggagctaaaacctctaagaaaatattttaatgacaaagctcatgcaaaagctgattattgggatgaaaaaaggtttgcagaaacatattgtcgctggatacttggggaatggcgagtaggggtaaaagacaaagataaaaaagacgatgctaagtatagctacaaagacttatgtaatgagttaaaactcgaagttggtacaactcaagaagtaaaagctaataaatctaaaggtagtgtagtagagtttttattagaactagacccttgtcgaactataccaccatatcaagataataataatcgcaaaccaccaaaatgccaaagtctgattttaaatcctaaatatttagataaaaaatatccagagtggcaagattacttaaaacaactaaaacagctagacagtgtccaaaaatatctagaagaatttgaacaagatttaaaaggtttaaaaacaagtaaagatcaaccatattttgtaggaactaaaagcgaaaacaaacagattgcaagcggtcagagagatcaaaaagacctagatgctagagttttacagtttatatttgatagagtaaaagctaatgatgatttactcctaaatgaaatttactcacaggcgaaaaaagctaaacaaaatgctagtaatgaaagtgaaatagctagggctgtacaaaacctagataaaactcttgctaaaagtaagttgccaagtgccttaaaaacgcaacatataaaaggtatttttgaacaaggtacacttttacatctagtttgtaaatattttaaggctcgtcagagagctagagattctagactatatatcatgccagaatacagatatgataaaaacctagataagtataacaatacaggtagatttgatgatgataatcagttacttacatactgtaatcataagccaagacagaaaagatatcagcttcttaatgatttagctggtgtgttgcaggtttctaatggtcaattattatctgttgagaaatggtttcgacaagctcaaccagcggaaacaacaaaatcacaagatgagcaaatatttgaatggttaaaagcttttaaaatagctagttattgcaaagcagcagttgatgtgcaaaagcaatatcgtggtacgctaaaaaatgcagtgcaaacagctatatttaaacaaagactagaaactataaagaaaaacaaaaaagctagtcaagatgaaaaagcacttttagaaaaatataaaaatgccaaaccacttacagctgatgaaaaaaatttagtaaaacttgtagataatatatcaaaagcttctcaaaaaataggtgaaaacttagggctagataataaacaagtatcaaaattcaattcaatctatagctttgctcaaattcagcaaatcgcttttgctgaacgaaatggtaatgctaatacttgtgctgtatgtagtgctgataatgctcatagaatgcaaatatcaaatgatagtgcaaaagcccaaagactaccagcgatacctactcgcatagttgatggagctgttaaaaaaatggctacaatacttgctagaaatatagtcgatgataactgggataatataaaaaaaactctagaaaataaagaagagttgcatataccaattattacagaatcaaatgcttttgaatttgagcctaatttagcagaaataaaagggactaagaaaaaagatagaatatcatcacaagagttatttgctaaaaaagaagaaagaattaaaaaagctagtaatgagatatctgcatatagtggagctagtctaggaggtgaaacagagctagatcatataatccctagatcacataagaaatacggtactctaaatgatgaggctaatctaatctgcgtaactcgtgatgataatcaaaaaagaggaaatacaccgtattatttatctaatctagcagataaatataaacttaagctgtttggaactgcagataatcaagaaattgaaaaatatattgctgataagatttgggatagtgaaagacaagattttaaatttggtaactatcgtagctttattaatctatctcaagaagaacagattgcttttcgccacgctttatttttagcagatgaaaaccctatcaagcaggctgttattaaagcgatagataaccgtaaccgtgcatttgtaaatggtacgcaaagatactttgctgaagtgcttgctaataatatttatctaagggctaaaaaagaaaatcttgcgacaaataaattgtcatttgactattttggagtagaaactactaactcaaatggtcgtggcattgcagatattcgtaagctatatgaagctatagatagcgatatagaagcctatgcaaagggagataagccacaagatagctattcacatttgatagatgcaatgattgctttttgtgttgctgcagatgagcataaaaatgatggtagcattggtttagaaattgatgagacttatagcttgtacccactagatgaaaatacaggagaagtttttaaagaagatatatttagtcaaatcaaagtagcagatagtgaatttagagaaactaagctagctaggagaaaggcatataccgttgaaactaatattaggcaagaaattcaatctaaaggagattttaagaaatctataccatataaaatacatattgatagtctttctgcagagaggtttttcccattattacaaatatcacaagataagtggaaatatggatttactctagataattcagttgatatacctaaaaaagatattgaactaatacaagagtttttaaccaaatctaaagaatataaagattatactgtatggattgtaaataaaacgcaagctcaagaatttctaataaacataggctatgttggagcagataaacagcaggaaaaaatagctaaactacttgataagcttagttatactactatcaaaaaagaaataactagtatcttggctaaagcaaataaaacaccagatactgtaggtgatgctttagatgtaattgatgaattagtatttaaaacagacaaaaaaaataagttaattaactttgtgaaatctgaaatattgttgccggtttataatgattggataatgttaaaaaaagctatgcaaaaagctgatatgaatcaaaatctacatgatttcttatctatgtattttataaccactaacttaaaaaataagcatcaaaaagttagaaagaatttctctttaccagttgtttcaacaataggaactatcagaattagaagaaaatcatgggatggtagcaatatatatcaagttacaggagatgaaagcttagcaaaatatggttttgacgggacagttagacctaaaactattttatcaagaaattcagttcctattaagtactataatggtaaagaaaaagaagttcttatagagccattatcgtggattattttagatatagacgatttgactgatactagtatcattagggcccaaataaaaaatagatctgctggtcaagttagtattaaagtagagttaagctcattagataatatttgtcttaaagaagatagttggtcaggaaatattatatatgctggagataaagataaacctaatactatcaaaggagataaattttatattaaaaaagaagatttctattggcttaaggacttctctttaatgtttgatagtggcaaaactaaagcttcgttgtccattgataaaattggtaatagctatattttagagtttgtttcatctaaaggtaaaaaagaaaagcaatggctaaaaaatgaaacacctaatagttagtgattatggcatatatctaggattagaggcagggcgattagttgtcaaaaacaaggaagatagaaaatattttcctcttaatcgactggctacagtttctattgccaaaaaaggtgttagcttttctagtgatgtaatagagcatttttctttaagaggtattaagcttttctttttggattttaggggtgttgctcattcgatgctagttggtgcaaatcagcatgctgtagttcaagcccgtataaaccaatatagatatattgaaacaaatgctttagacatatctatcaggttgattacagccaagataaaaaatcaaagagcgacgcttagttattttaataaacatcataaatctacaaatctacaaaatgcgatagaagagctaaaaagatgtacgcaaattatcaaaaatgcaaaaactctaaatgatgtgcttgggtatgagggttatgctgcaaacatttacttttcatctctagcaaaagataagtttttatcagagagttttttgacaagagaagggcgaggctcacaagagattgcaaatagtatgctaaattttggttatgcaatattatctagttatattcttaatgctattactaatgcagggcttgagccatatttgggttttttacatcaaaaaagaccggggaaaatgtcactagtcttggacttgatggaagaatatcgtgcttgggtggtagatagagttgtaattaagttaagagagcaatataagaacaaaaaatatatggatactaagctcaagtcagctttgatatctcagatacaagctactatagctaagaaatatatttataaaggtaaacgcctgaaattagaacatattatccaaagacaagtatatagattatctggagagttttcaggtgagcatatttataagccatatgtttttaagtggtaggcgcctcaaaacacacacaaaattctaacgaaagtgggaatctaaatgataaagctatatatgcctagtcgtgtaggtattgcggagaacatcgaaataatgaaacaaagctatctatacatattgagcaatcaaaataatactgttttatatataggttgtacaacaaacttaatcaaaagaatatatgagcataagagtaaattagtagatggttttacaaaaaaatataatgttcataaattagtatattatgaagtttataattttttagaatatgcttttcttagagagaaaaggcttaaaaaatggaatagaaattggaaaaatgagctaataactaaatctaatcctgaatggaaagatttatatagcacattactataaaaaaagatggtaatgaaaagatacccaatcgagttgggtattgcgaatacaattaccattaacaaagtacatataaaatgcaactaagaaaagaatatttaatagcatacgatatagaagataacaaagctagaacaattatatacaaacaactactagcttatggtctcaaagcagttcaaaaatcagtattttggggctatatgagtattgctgaacttaatgctgtcaaaagaatgtttgataacgctttaaatacatttgataaagtctttataacaagagtaaatatgcaggagcaaaaattagactatagttttggctatgatgaaaaaaccttcaaagattgggatgaatatggacatatttgatactgatttatctttacctattaatctaattagacaatggtgtttttgtcctagaattgtttattatcaagagttattagctataaaatatcataaaccgttgtgggttacacaaggtgaagaatttcataaaaaagtagagcatgtagaaaaaaggcgaagctttaaaagatataatttagatactgctacacgacattttaacctaaatcttaaaagttcaaaatatcgtatacatggtatagttgattgggtgttagaaacggatagttatgtttatgtagttgagtacaagaccaaccctaacccaaatagcctaggacataaactacaaataacagcttatgcgctattagctcaagaatattttaataagccatgtcaaatagcatttttaacttctgataaaaactcttatgagattgatatatcagatgacttaatcaaaaaattacataaagttgttaatgatattacaaatgctcttgataatggcaataagcctgattcatcagcaacaggtcatcaatgtatacaatgtgagtatcttaacttttgcaatgatcgctaagagcaaaaggtcatcaaccctatcaagttcctgtaaagtatagagttaatttgcaatactcagcttgattttcttagatcgccatttagtaggaatttcgataagcattatacaaataccattcgtaatacccaacttgattgggtatctatcaaatccatatttacacaaacaaaaaaagccatttaaatggcaattttttgttttatatcaatcagacgtgtcaaacagaggtccgttcaaaatacttttaaatgattacagagcattaaatatttggtacaaaatctattttagatactttttcgcaaaatgtctactttttttgacaagtagggtgtttgcgaaaaaacaccaataaattattctcgcaaagccttataaactctaggtttattttggctccaacagtagtataccaaatattctagctactgaaacacctaaaaaaatataaccctaattgcgagtaaaattccaacagtagtataccaaatattctagctactgaaactatacatatgttagttgaagttgatcctcaatttgccaacagtagtataccaaatattctagctactgaaacaaaaaatttaggaaccatgcaatcattgctcttttgccaacagtagtataccaaatattctagctactgaaacgtaaagcccatgattaagaaaactaagccatctcgccaacagtagtataccaaatattctagctactgaaacttctatcagcgttatcttaaactggcaatgttctccaacagtagtataccaaatattctagctactgaaacccaagcgatgttacattattagctgtagaaactaaacccaacagtagtataccaaatattctagctactgaaacccaacttaccaatattaatcatttgtctttctttccaacagtagtataccaaatattctagctactgaaacttatttatccatgtgccaacggctaaactgctattgccaacagtagtataccaaatattctagctactgaaacaaatatttgcaagttacttctttatgtacattttctccaacagtagtataccaaatattctagctactgaaacggaacgctttgaaacttgtaatacaaatcataatcccaacagtagtataccaaatattctagctactgaaactcgaggtctctaataacaatatcaccctcataaatccaacagtagtataccaaatattctagctactgaaacttagaagatcatgctagcggtgtcgttgctactggccaacagtagtataccaaatattctagctactgaaacacagcaatagcagattgagctgtgccagtgaaagccaacagtagtataccaaatattctagctactgaaacacaatagtaccgccgcctttttgtcgagattctaaaccaacagtagtataccaaatattctagctactgaaacagcattgccggaaacccaagcattgccgtcatggccaacagtagtataccaaatattctagctactgaaactcaaagttaaattgagcattgccagtcaatataagccaacagtagtataccaaatattctagctactgaaacaatcatatcgaagagggtacaaaagcaataatgtgttccaacagtagtataccaaatattctagctactgaaacggaacgctttgaaacttgtaatacaaatcataatcccaacagtagtataccaaatattctagctactgaaactcgaggtctctaataacaatatcaccctcataaatccaacagtagtataccaaatattctagctactgaaaccaatcagcaacacaaactaacactcaaaatgcttaccccaacagtagtataccaaatattctagctactgaaacacaaaaggatctagctcgcagaaacccacatctttaccaacagtagtataccaaatattctagctactgaaacagaatcattcttttaacatcccctaccacatcatctccaacagtagtataccaaatattctagctactgaaactccattgaatggaaacctaacaaaaaggtacttactaccaacagtagtataccaaatattctagctactgaaacaatatttttccacagggaaaatacatatttaaaaccaacagtagtataccaaatattctagctactgaaactccatgaaaccgacaataacatcatcaagtactaatccaacagtagtataccaaatattctagctactgaaacatatctttctttggtgcttaaaacagtgctatcacccaacagtagtataccaaatattctagctactgaaactacttggctttgatgcacccataaaccatctagcccaacagtagtataccaaatattctagctactgaaacaagctgaactagcaagagttttaaagatcgaaccaaccaacagtagtataccaaatattctagctactgaaacttgatgaatggaagcttgttaagccaactatacttaccaacagtagtataccaaatattctagctactgaaacatttatcaagaatttttagtatcagaagttttgaaccaacagtagtataccaaatattctagctactgaaacttcaaactatattttttattttttagtgcaggaattccaacagtagtataccaaatattctagctactgaaacaccgttccgcaaattcgttggccataatcaaatatccaacagtagtataccaaatattctagctactgaaacagctgccctaataccattcatagcctcctcattacccaacagtagtataccaaatattctagctactgaaactcattttatattttgtatatagctttcatttttaaaactcttatccaaaatcgtcaacacatcatcatgaaatctttctcttttttgctgtgtggatctaccacagaacaactcagcgaatctattagttggccattcagcatcgacatgtacagctccatcaattttgataagattgttttcttttagatttgttatgaagtttttgtagttgttattggcattacatgcgcttgctgaggcagctattatataggttgggcaatttatattcttggcggcttgagagccaagattgcctacatctacagggtctaatcctatccaaagcttgaccctagtattctctgatgtcgctatcaaagtagctaatcctccagcagagaaaccaaccaaagcaagatcattatttataatactcgtatagtcgctattgctatagatatagtttattagctcagatataaactcagcatttttactatgattggcccaaaatggtagattaggtactactacaaaatacccatgatctgcaaggaaactcccccaaccagacatattatcttttgatcttgagaaaccatgtactacgataactactggtaaacttcgattagatttttgataaaaaatatcgtagttggagccagcaatatttagagaaatattagccgtttctttgataattctagatgagtttttgctatcttgagcatttgacatactaaaagtaaaaaatatagaaaataaaatgaaactaagagaaaacttagtttttagcatgacatttaattaagaatcaatttcgatatcactaaactgtatatccataacgttattttgagcatcaactacttctacataagttatagtttcaccaccttttagagttacttctttaagagcttttgatagtaattcagtcttaggagttagtactaatgtccaattatctgtagtaccgctgaatttagtattgaaattatcgtagattacttttgagtcaccctccaatacagacaagaatatcttagtgaatgagaacaccattgggctatcttcttcgccaaatacagattttggactatctgcagttttaattgtgatagtatcttttgttgcttttagagaagatttaaacggtttctcttggttccactctaaaccatctttcttagatagctcaaattcaccagatgcaagaataggtttgtctaaaccttgaattttgcgtgattggatgaagtgaccagaatagttatcatttttaactagctgttcttctactttagcaaagtctgctgaaggggcagcataaactaatccactaactaatatacttgtagcaatcgcgactttctttaacatttcatttctcctgtataattttcataaatttagttttaaactaagtattattaatattacatatataaccttaatatactagacttatagataagtaaattataaatattaacaaatattaataatcttgttcgtatctgaatagatgctaattagtaagtctcagcttaaattaaaaaggtgtaatatcgtggaaaacatcatctacaatttgaaaaggaagttttaatatacaactatttaaactaatgcaacagatagcaattgagcaagcaaataaaactttttttaatttcataacttattattaatatattaaattttctatatatattatagtactaaaaattacttttctagagatgttttttatttgttataatatttcataatacctagataggcaactatagtgaaacatcaacttaaatggatggcatgggagacaactagacgctgtaatcttaaatgcgtgcattgtcgttcatcttcagaatgtgaagtagtaggacatccagatttctctactgaggaaggctttagaatcattgataatatagtggaatttgctaaccctgtattggtactctctggaggagagccacttttgcgagcagatatttttgagctagcaaaatatggtgctaataaaggtttacgtatggcactagcaactaatggttcattagttactgatgagatttgtgaaaaaatcaaaaattcagggataagcatagtatctttgagtatagatggtgctacagctgagacacatgatgattttagaagccaaaaaggcgcctttgaagcaactgtaaatgctgcgaaactatttaaaaaacatggtataccattcttggtaaattcatcatttaccaaacgcaatcaacatgaaatcaaagatgtttataaactagcaaaatctcttgaagctacggcatggtatctatttatgatagtgccaacagggcgtggcgaagagcttatgcaagagttaatagatgtcgatgattatcaagaaattctaaattggcactatgatatggaagccgatgagcaagatatgcttgtgcgtccaacttgtgcgccacactattatcgcattagatttgagcgtaataaggaagataatgcaaaagttcgatcacgagctcttagctttggtactggtggtggcaaaggttgtatcgccggccaaagtatatgtttgctagatgttgatggtaatgtttatccatgtagttatttacctgttagtgcgggtaatgtcaaagagaaatcatttgcagatatttggcaaaatagtgatgtgatgcatgatatgcgtgattttagtgcttatgaaggtaaatgtggttcatgtgaatttatcaaaatttgcggaggttgtagagctagagcttataatatccatggtagctatttagcagaagagccattttgtaatcatatgccaattaagctgaaacaatcagaaaacaacaaaaataaataagtcattaaagccaagtatcgcaaataaatcttgaagttactgtctttctaaaccaacaacagctgacatatctatgatctgtttgatttcattcggagatgttacttttagcccagaatcttgctcagctggcgggatatcatagaagttcatcgcatttagatcataagtaacataaccgttatctatattcatagcataaactcctacaggacctgtgccttgatatacagcattatctttatatgctacagttagattcttgagatctttaatagttgtccatagtgtcatagatttctcataaggtggtacagaagcattggcaattattgatgctgcatgaaatatagcctctctattagattttggctcaagcatcagttcagataatatataagatctaacaaatcttgcagctgcactaaaatctccaggtagtccaactaattgagctacttctggacgagaacttgaaattgtatcagcataattaataactctatcactaaatttaggattactattatttactgatggttgtagtagtgatttatattcttcgatattgcttagatgccattcgtaagtaggtgcattagttaagacattaccagcatttttatgaatgtacattttaccatcaataaactctatcacagcactgttgccattagcatctcttagacacatgtgaagaggaatattttttatatatatgccatcttttaactttacagcactattcactatctgatactcagatattaattcaagagcatctgctacatcttttgccatagctaacaaaaaattacctaactcatacaccgctagtgcaggcctattatcattatcatcataacttggatataccgtaccatctaaatacaagatactatatgaaaagccttgagtgtttaaaccatctgttacataactctcaaatcctaatctacaaaagtaaccatattttgaagtccacttagcgattctgctttcaggaattttatcagcatctattacaacatctgttacattttcaataccgacataaccccaaccatttttaaaggcaatatttattggaaaatccatagatcttgcttcgattttgtattgatttttatttataaaaacattagtacacatattaatcttacctttcaaatttcattgctggtgctatacttacaatattaatactacattattttggaatataagagaatgactcaagagtttaataagattgttttatacagaatggtaacaccagaaaaaacttgtccgtatggtttaaaagcaaaagcgttatttgaagaaaagggttggtgttttgaagaccatattttaaaaactagagctgaaacagatgcttttaaacataagtataatttagaaactacacctttaatatttattgatggtaaacaaattggtggttatagtgatttgcttgagttcttaggtcagaaatgaatcagcagttaaaatactttgttttgtcaactaaggtattacctgaacatatcgatccaaataatcatcttaataatattgtctatcttcaatggatgcaggatgtggctattgagcatgtcaaggctaataaggtttttgacttaacggagtctcaaggacttacatggtttgctaagaagcatactatagagtatctatcgcaaggatttttaggtgatgatatcgctgtagttacgtgggtagagagtattactaaaatttctacatttagaaaatatcatatttatagaaagtcagataaagctctactgtgtaaagcagatactctgtgggtaatgataaatgctcagaagggcagacctgcaaaaatcccaacagaactggttgaaatatttgataagtataatgattttgagattgataatattgagagcttaatttaaagtagggttttaaactattttttattatttttaataacctcaactggaccgtgatcatcacaatgattaccatgaggatgatgtaatctaccatcaacaatatagtctat

SEQ ID NO: 159 - DNA, 24890 bp, synthetic construct
  source 1..24890: mol_type = other DNA
  misc_feature 1..24890: note = Synthetic
  variation 19433..19532: note = n is a, c, g, or t
tcctattggttatggcgatggttttcctcgtgagttaggtgatagaggattcgttaatattaatgatgtcatgtatcctatggctggtagaatgagtatggatggtctgacagtatcgttaggaattaatgaatacgatgtcaaagtgggcgatacagtagagctaatatcagctattccacgcaatcgaaatagtgcattttcaatagcaaaacaaacaaatactatcgaatatgatattatgagcacattaaatgatcgtattataagaaagatcatataatattctaaactgtttacttaatgaattaatcacagtaaactcataattatagtttatcaatttgttaattaaaggataacatggaaaaaaaagtctttctacttttagtcttgtggctatgggtgtcggtgctattatgggttctggttggatgtttgctgcgcagtatacatcacaagaagctggtccgggatctgttatatcatggataataggcgcagttttaatggtttttatagctttggtatttgctgaagtttgtacaattgttcctgtcgaaggttctacgtcacggattccacatataacacatggaacgatgataagttatatgtttgcttggattacgtggatatcatatttagttttagcgccaatcgaagttcaagctgttattcaatatttagctgttttttacccatcattgattgatacaagtagagatggtgcattatccatggcaggactacctttggcgatatttttccttttaggtttttgtgtaattaatttttattcgcttaagtggttagcaaaaataaataatatcgtaactttatttaaggttgctataccgatatttatttcgattgtttttataattttttgttttacattaccagcattaaaggatataaaaaccgaagagctttcactaatgccatttgggtttaatggtgttttagctgctgtatctgtaggtggtattgcctatgctttcactgggtttaaaactattgttgaactggctggaagtacaaaaaatcctaaaaaatctatacctgtagcaactgttggtgcagtattgatttgtctaataatatttttatttttacagtctgcttatttgttagtgatgtcaaagtttgtgcataataatgattggcatagtgtggttatgccaggtgcaagctcatctagttttggaccttttgcgataatggcacaaagctttggggtaaagtggataatgtacccactttattttggggcgattattttcccattgatggcaggtttaatctattttagtatcgcattaaagtcacttggtgccatggttcataatggttatttaccaagtattttaggtaaactaagtcctattatgaaaaagcctatttatgctattagtttgaattttcttattgcactaattatgtttgcgccttttcctggttggaaagagatggcaacttttttaacctcattgatcgctctaacttatatcactggtcctacatcaactatggcacttagacatcatttaccggagcttcacagaccatttaggcttagaggagcttatttactatcagttctaggtatgtttgcagctactttagtgtttttatggagtggctgggctatagtatcaaaagcaggtatagctttgattattgctttagtaatgctaggtatatataggacttttaggaaagatagatctgaagaaatacattggaattttagagaatcaatatggttctggatttatatcgttttagtaacaatagtttcatactttagctcatttggtggtagaggagatttagatttatattggagttctgcgattatattagtaattagttttattgttgttacaatcgcaaaaaatctatgtttaccagcagctgatatgcgtgatggtatccataaagctatcagtgatgataattatatctaagtaaatatttctatttttatcttgtatttcataatgtattatattttattagttaaatcagtttttaattttaagtaagtatattatgattaaagtatcttttcagggcgagcatggtgcttactctgagcaagcaataactaattttttagagctgcagaatataaaagattttcaaacagttccatgctggtctttttctgatgctattgaacatactataagtggcaaatcaaattttgtaatgattcctgtagaaaattctttagctggttctgttgtaccagcatatgatgagttgattaagagtaatctaaaggttaaagctgaggttgttttaaaaataaaacattgcttgatgggactcaatgacgtcgaaatttcggaaattgaaagtgtgatatctcatcctcaagcattatcacaatgtgctaatagtcttaaaaaattaaagcttactcctgaggcatttgttgatacagcgggagctgctaagtatatctttgagaaaaataaaagaaatcacttagctattgctggagagttagcagctaaaacttatggactaaagatttttcagcatgagctggaagacgagcaatttaattatacacgttttttattgatgggttatgatgatatcaaagttaactcagctgataataaatataaaacaactataatattttcagttgaagataaatctaatgctttagtaaacacattaaatgtttttggtaaatataatattaaccttactaagatagaatcccgtccatcaagaaatagagcatggaattatttgttttttatcgattttgagggaagcgatgatgatcttaatgtacagcaggcattacttgaagttcttaaaaaaagtacatttctaaaagttttaggttcttataagagttatcactttagttagaaagttttattaatgaattaaagtaatgagttataaagttaagattatttatagggatgttgctaacctaaagatttctttaaataaagatggtttagtaacagtggtatcacctcaaaaggttactaagaaagaaattttcaaaattcttgagtctaaaaaagcatggcttgataaacatgctaaaagattatcagtaaatcaaaaatatgattatcaaaactataccttaaatgatggagatagtgtttattttcttgggcgtgaatatccaattaaacttgtagagtcaaagcataatattgtcaattatcatgatgatcatattcaaattttattaaatccaagtgttattacaaatagacaatttaagttacaactattagaagaattttataaagatcaagcagatattattcttaataatctagtggctaaatacttaaaaattactaatcaagaaattactagagttacaataaaaaaaacaaaaacacgttggggctcatgtaactatgtcaaaaaaactatcaatcttaattttaatcttgttttgcgagacatccaagcaattgaatatgtagttttacatgagatagcgcatttaactcatccaaatcattcaaaagaattttatgcttatgtggcaagctatatgcctgattggaaagttagggaaaaaaggctaaaatagagtataattattccgggtatctatcatcaaatttttaactttctggaggcattttatggaaagtacgtttgaacttttttctataggagttggtccatcttcatctcatactataggtccgatgagagctggttgtgatttcataaacttgtataaagataaactgcctcaaactaagcgtgttaagattgatttgtttggctctcttgcgctaactgggaagggtcataaaacagattacgctgttgttttgggtgtgatgggttttttaccagaatcagtggatattgaattggcaaaaaaactctatgatgaatgtttaaggaataaaaaacttaatttaggtcaagagtttgaaattgattttgattatgataaggatttagtatttcattataatgagtttttgccagaacatgctaatggcatgcgtttttcattgtttaatggtgacgaactactttgtgaaaaagagtatttttcgattggtggtggttttattgtcgataaaaaacaaattaaaaaagatactgttcccacagaggtttcatgtgataagccttataaattttcaactatggctgagttaagagagatttgtcagcgtgatggtaaaactattgatgagataatgtttgagaatgaaaagacagcttatggtgagcaggaatcattagataaactagccgagatatggcatgtgatggaaacctcaattgaaaaaggtttaacttgtgctgaagcaacattaccaggtggcctcaaagttagaaaaagagctccaagtatgattagaaagctcaaggaacaaaatattgtcaatactgactttaattatctaaatgcttttgcgatagctgtaaatgagcaaaatgcgtgtggtgaaagagtagttacagcaccaactaatggtgctgctggtgttattccagctgtgcttaaatattatttacagactcatgagattgttaatcaacaagagctcaaagaggtggtgaataaatatttattagtatgtgctgctattggtattttgtataaatcaggagcatcaatttcagcagctgaagtgggttgccaaggagaggtgggtgttgcctgttcaatggcagctgctggctattgtgcgctacttggtggagatcttgattctattgagtctgccgcagaaattggtatggagcataatctaggacttacgtgtgatcctattggtggtttagtacaaataccatgtatagagcgtaatgctatgggtgctgtccaagctataaatgcagctaaacttgcataccttgatacaggtgagaagcgctttgttggtttagattatgtaattaaagttatgtatgaaactggtttagacatgtctagtaaatataaagaaacttctttgggtggcttagctactaatgttccagtatgttagttaattcataatattgagatatctcagttttaagttagtttggcaaaattatactaatttggtataattttggctgtatgagttctatagaaattttttgatatgtatgatgtaaataaaattaggcaagactttccatttttagtacaaaaaataaataataaatcggtacttttttttgacactggtgcctcagcgcagaagccccaagctgttattgaatgtgtagctgaagcatatgcttataattatgcaaatgtacatagaggtgtatattctcttagtcaagaagctagcgagaagtatgaaaatgtccgtcaaattgtgcaaaagtttttaaactctaaatcagcagatgaaattgtaataacaaaaggaaccacagaggctattaatttagttgctagctctattggtaaggggattattaggtctgatgatgaaatagttgtcacagaaatggagcatcatgctaattttgtaccatggcagatgctttgcgaggacaaaaacctagattttaaagtggctgcggtcaaggacaatggcgagttagacattgataatttattagctttagttacagctaagactaaaattttagcaattacattatgctctaatgttttaggaacaatcaatcctgtgaaagaaattatcaaacaagttagagaaattaatccaaatataattgttttggtagatggtgctcaagctgttattcatactaaggttgatgttcaagatttagattgtgatttttttgtcttctctgggcataagttatatggacctactggggtcggcattttatatggtaaatatgagttactaaaacaacttcctccttataattatggtggtgatatggttgacgaagtaacaatagcaaagactacatttgcgctaccaccatataggtttgaagctggaacaccaaatatagttgaagctattggacttggtagggctattgagtatgttgattcaatcggcatgattaacattgaaaaacatgagcaaaaattgttagagtacgctacaactgagcttaataaaatcgatggtctaactatatttggtcaggcaaaacacaaagccggagttataacttttgatattcaaggttgtaatgctggggatattggtgagctattggcaattaagggtatatgtgtgagaactggtaagcattgtgctcatcctttgatgtatcgaatgggagttacctcaacagtgcgtatgtcttttgggatgtataatacttttgaggaaatagatttgttcataatagcattgaaaaaagtaatatctcaattaaaataatttagcaaaaagaggcaagtatggtagaagtttttgatccaaatgctagtagtattttagaagttacagatgctgcagctaaacatttcaagaaacatctagacaagcatgatggttgtataggtatttatgtcggaactaaggttatgggttgttctggcttagcttatgatgttgattttgtcaaacagcaaccacaagatacacagaaagtacagcagcatggcattaatttctttgtatctaataagtctatggattttcttaatgggctaaaaattgattatgttaagcatgattttggattatataagttagaatatacaaatccaaacgaatcagcacgttgtggttgtggtgaaagttttacagtttaggaatatataaataatgaaaccaacagatgtaacaataataagaagacaggtaaaagcaattgctgtaccatttggtaatgagattgagttaatgcctggtcaagaagttttagtaacgcaagataagggtggaagctttactttaaatgtaaacggtaatttacttcatctagatggtaaagatgctgatgcgataggtaagcaaatcgtcagatatcctgtagaggaatatgatattaagccaggtgatccaattaatatggatgctatttgggaccaaatgagaacagtttatgatccggaaatccctgtcaatattgttgatcttggtctgatttataatattattactagaaagttagagaatggtaattttcatgtaataattgatatgacattaacagcaccaggttgtggtatgggaccagtgcttatgacagatgttgaaaaaagagtagcaatgcttcctaatgttgataaagttgatgtagtaatggtttttgatccgccatggaattcagaaatgatgactgaagctgctaagttagagttaggtttattttagtaatttagcttatgaataagatagcaatttatccaggcacttttgacccaattaccaatggtcatgttgatctagtagagcgtgcattaaatatctttgatgaaatagttgttgcagtatctacggcttatggtaaaaatactctttttgatattcgtatcagagagcaaatgataaaagaagtattcaaagataatcaaagggtcaaagttgtaagctttcagggtctacttgttgatacagcagtcaaacataatgcttgtgctatagttagaggtctcagagcagtatctgattttgattatgaatttcagatgtcaagtatgaataataaattaaacagtgatattcaaactatattcttaactccgagtgagaagttttcatgtatttcctcgacattagttagggctgtagcgatacataattataagcgtgttgatgagtttgtacctgaatgtgtctttcgtgagataaagcttaaatattctaaggaataaaattatggcattattaattactgatgaatgtattaattgtgatatttgtgagcctgaatgccctaatgaggcaatatcacaaggtgaagagtattatgagattgatccaaacaaatgtacagagtgtgtagggcatttcgaggagtctcaatgtactaaggtttgccctattaggtgtataattatagatccaaataatatagaaacacatcaacagcttttagacaagtataatagcttagtatcctagtatcataaagctataaaaaactctttgatttttattttaaatcatgtagaatacttgagtcttatgtttcggcatgtgaatagttaaaaagtatttaaaggagtttttgatgagattaaaaagtattgttatagctacaactgtattgttaggttcagctacagcatctatcgctgcaggttcagataatatcgatacgtcagcaaacactaattcagctactacgcaaagcagcggctttgcagctaataatttcattgctccttttgcaaatacttatagcgctttgactaacaaggacaatacttggggacctcaagatagaactggccagtggtacttaggtgtagatgctaacggtctagctggaactcctaattctccatcaggtgctggtgctaacttcacaatcggttataacatcaataaatacttcgctgtacagtacaaccaattagttggtagagtatttgctggtttaggtgaaggtgttgtaaactttagtaataatactatgtttactccatatgctgcaggtggtgctggttgggcaaatctagcaggtcaagcaacaggtgcttgggatgttggtggtggtcttaagtttgaactatctagaaatgttcaagcaagtgttgactacagatatatccaaacaatggcacctagtaatatttctggtgctaatggcagagcgggtactaacatgattggtgctggtttaacatggttctttggtggcaaagatactactaataatgacactggtaatatccaggataatggtgcgactacagctgctcaaactgttgctatgccaactattgatgagtctaagtatgttttacctgctggtattaagcaatgtgaaggcaactttaatctaactgaagatggtgtcgcgtgctatacagtaaatggtgatgatgtaacagtttacttagatactaagtttgcttacgataaagctactttaaatgctaaaggtaaaaaagctattgcatcttttgttaattttatcaaggatagtaacattggctccgtaacagttaaaggttatgcttctcaaggtcaaactggtagcgagtttgatatatataaccaaaaactttctgagaagagagcacaagctgttgctgactacatgaagcaattaggtttagatagtgagaaaataatcactaaaggtttcggttatgatgatactttaggtggtattcctaaatctgatccacgtaaccagcgcgtagaagctagcgtatcagctccacttaaagaagctaactaatatcaatttttttaaatctcttaatttctttacgtcattaataaatgttctaagcaatcaattaaagtattgtatctctaattattcaaatatctaatactgaatcaaattcaagcacacctttattttaatatcttactataggtattgatttgattgagattctcaaactagttgaggataagagaatgtggtacttttacgcctagtaaatagttttatatttttaagcgttatagcaatactaatacgttattacaacaaactatgttaaatttataacctataaagaaatttcagtgagttatttactaaaattcatagaattattcatactgtctagaaatcaaataatatttacgtaaatcgtagctaatactgacaatatttctttcaaaatgatttataaattttgtaattttagattagttttcctattaggaaaattgatagttatatagaactttatgaagtagaattaatgtataagtttaacgagttttccattttttaatttgattttgattttaaatgctggtttaatgctttattaaactaatgataaacgtatgtgaagctagttcctaaaagcttttatccaagtttatagatttatgattagaaacttatatcaaaatattattctatacagagtaaaagaggtcattttatgaatgtcaaaatattgccaatagcaatagatttaggtgttaaaaatactggtgtctttagcgcattttatcaaaaaggaacttctcttgagagattggataataaaaatggcaaagtatatgaactatcaaaagattcttatactttattaatgaataatagaacagcaagaagacatcaaagaagaggaatagatagaaagcagctagtcaaaaggctctttaagcttatttggacagagcagctaaatttagagtgggataaagacactcaacaagctattagctttttgtttaatcgtagaggttttagttttattactgatggttattcgcctgaatatttaaatattgttccagagcaagtaaaagcgatacttatggatatatttgatgattacaacggtgaagatgatttagacagttatttaaaattagctactgagcaagaaagcaaaatttctgaaatatataacaagctaatgcaaaaaatattagagtttaaattaaggaaattatgtactgatattaaggatgataaagtaagtactaaaacacttaaagaaatcacaagctatgaatttgagttattagctgattatttagcaaactatagcgagattttaaaaacacaaaaatttagttatacagataaacaaggtaatttaaaagagctaagctactatcatcatgataaatataatattcaagaatttctaaagcgacatgctactataaatgatgaaattttagatactcttttaactgatgatttagatatttggaattttaattttgagaaatttgattttgataagaatgaagaaaagcttcagaatcaggaagataaagatcatacacaagcgcatttacatcattttgtttttgcagtaaataaaataaaaagtgaaatggcaagtggtggtcgtcatcgtggccaatattttcaagagataacaaatgtgctagatgaaaataatcatcaagagggatatctcaagaatttctgtgaaaatttgcataataaaaaatattcaaatttaagtgttaaaaatttagtcaatctaattggtaacctaagtaatttagagctaaaaccgctaagaaaatactttaatgacaaaattcacgcaaaagctgatcattgggatgagcaaaagtttacagaaacttattgccactggatattaggagagtggcgagtaggtgtcaaagatcaagataagaaagatggcgctaaatatagttataaagatctgtgtaatgaattaaaacaaaaagttactaaggctggtttggtagattttttattagagttagatccatgtagaactataccaccatatctggataacaataaccgtaaaccaccaaaatgtcaaagtttgattttaaatccgaagtttttagataatcaatatccaaactggcaacaatatttacaagaattaaagaaattacaaagtattcaaaattatttagaaagttttgaaactgatttaaaagtcttaaagtcaagtaaagatcaaccatattttgttgaatacaagagttcaaatcagcaaatagcaagtggtcaaagagattataaagatttagatgctcgaatattacagtttatatttgatagggtaaaagctagtgatgagttgcttttgaatgagatttattttcaggctaaaaaacttaaacaaaaagctagctctgagttagaaaaactcgagtcgagcaaaaagctagatgaagttatagcaaatagtcaactatcacagatactaaagtctcaacatacaaatggtatttttgaacagggtacttttttgcatttggtttgtaaatattataaacaaagacaaagagcgagagactctaggctatatattatgcctgaatatcgttatgataaaaaactagataaatataacaatacaggcaggtttgatgatgataatcagctgctaacatattgtaatcataagccaagacaaaaaagataccaattgttaaatgatttagctggggtgttgcaggtatcacctaattttttgaaagataaaattggttctgatgatgatctatttattagcaaatggttggtagagcatattagaggatttaaaaaagcttgtgaagatagtttaaaaatacaaaaagacaatagaggattattaaatcataaaataaatatagctaggaatacaaaaggcaaatgtgaaaaagaaatatttaatttaatatgtaaaatagaaggttcagaagataaaaaaggtaattacaagcatggtttagcttacgaattaggagtacttttatttggtgaacctaatgaagctagtaaacctgagttcgataggaaaattaaaaaatttaactcaatatatagttttgcacagattcaacaaattgcttttgcagagcgtaaaggtaatgctaacagttgtgcagtttgtagtgctgataatgctcatagaatgcaacaaattaagatcactgagcctgtagaggacaataaagataagataatcttaagtgccaaagctcagagactaccagcgattccaactagaatagttgacggtgcggttaagaaaatggcaactatattagctaaaaatatagttgatgataattggcagaatatcaaacaagttttatcagcaaaacatcagttacatatacctattatcacagaatcaaatgcttttgagtttgaaccagcattagctgatgtaaaaggtaagagcataaaagataggagaaaaaaagcattagagagaataagtcctgaaaatatattcaaggataaaaacaatagaataaaagaatttgctaaaggtatatcagcatatagtggcgataatttagcgagtggcgattttgatggtgcaaaagaagaattagatcatataatacctcgttcacataaaaaatacggtactctaaatgatgaagcaaatctaatttgtgtaactcgtgatgataataaaaataaaggtaatagaattttctgcctacatgatcttgcaaataactataaactaaaacagtttgagacaactgatgatttggaaattgaaaagaagatagctgatacaatctgggatgctagcaagaaagattttaaatttggtaattatcgtagttttattaacctaacaccacaagagcagaaagcatttcgtcacgcgctatttctggctgatgaaaatcctatcaaacaagcagtcataagggcgataaataatcgtaatcgtacatttgtaaatggcactcaacgctattttgcagaagtactggcaaacaatatctatctaagagctaaaaaagaaaatctaaatacagataaaatttcatttgattattttggtattccaactataggtaatggtagaggtattgctgaaatccgtcaactttatgaaaaagttgatagtgatatacaagcttatgcaaaaggtgataaacctcaagctagctactctcacctaatagatgcgatgctggctttttgtattgctgctgatgaacacagaaatgatggaagtataggtctagaaatcgataaaaattatagtttatatccattagataaaaatacaggagaagtctttaccaaagatatttttagtcaaattaaaattactaataatgagtttagcgataaaaaattagtaagaaaaaaagctacagagggctttaacacgcatagacaaatgactagagatggcatttatgcagaaaattacctaccaatactaatccataaagaactagatgaagttagaaaaggctatacttggggaaatagtgaagaactaaagattcataaaggtaaaaagtacgatatacaacaattaaataaccttgtgtattgtctaaaatttatagataaatctatatctatagatatacaaattagtaccttagaagagttaagaaatatattaacaacaaataatatagctactacagcagaatactattatataaatctaaaaacccaaaaattacatgagtattatatcgaaaactataatactgccttaggttataaaaaatacactaaagaaatggagtttttgagaagcttagcttatcgtagcgaaagggtaaaaattaaatcaatagatgatgtaaagcaggttttggataaggatagtaactttatcatcggtaagattactttaccatttaaaaaagagtggcaaagactatatcgtgagtggcaaaatacaactatcaaagatgattatgagtttttaaaatcattctttaatgttaaaagtattactaagttgcataaaaaagttagaaaagatttctctttacctatttctacaaatgaaggtaaattcctggtcaaaagaaaaacatgggataacaattttatctatcagatattaaatgattctgattctagagtagacggaacaaagccatttattccagcttttgatatttctaaaaatgaaatagtcgaagccataattgattcatttacatcaaaaaatattttttggctgcctaaaaatatagaattacaaaaggtggataataaaaacatttttgctatagatactagtaaatggttcgaagtagaaacacctagtgatcttagagacattggagtagcaacaattcaatacaagatagataataattctcgccctaaagtcagagttaaacttgattatgttatcgatgatgatagtaagataaattattttacgaatcattctttattaaaatcaagatatcctgacaaagttttagaaattttaaaacaatcaactattatagaatttgaaagttcaggttttaataaaactatcaaagaaatgcttggtatgacattagcaggtatttataatgaaacatctaataattagtgaatacggtatatatcttggtttagagtctggcagattagttgtcaaaaataaagatgataaaaagtattttccattaaatcgtttagctacgctttctatagctaaaaagggtgtcagtttctctagtgatttagtagagcagttttctctgagggggattaaacttttctttttggattttagaggagttgctcactcgatgcttgttggtgctaatcaacatgctgtagttcaagcacggattaaccaatatcgctatattgatagaaatgctttaacattgtcaatcaaactaattgcagctaaaataaaaaatcaacgtgctacacttaactattttaataaacatcataagtcaataaatcttctaaatgctatagaagagctaaaaagagtagcacaacttatcaaaaatgctaaaactctaaatgatgtacttggttacgagggttatgcggctaatatatatttttcaagtttggctaaagataaatttttatcagcgagttttgccaatagggagggtcgaggctctcaggagattgccaatagtatgctaaattttggttatgctatcttatctagctatattctaaatgcaattacaaatgcaggacttgagccttatttaggatttttacatcaaaagagacctggaaagatgtcgttagttttagatctaatggaggagtatcgagcttgggtcgttgatagggtagttattaagttacgcgaacaatataagaataagcaatatatagatactaaattaaaatcgatactaatctcagagatacaagcaacgatagcaaagaaatatatttataatggtaaaaaacttaagttagaacacattatccaaaggcaggtatatagattatctggagaatttgctggtgaacataattataaaccgtatatttttaagtggtagaaaattgcaacagaatcgaaatttgcataaaaaagggatcaagatatacccaatcaagttgggtattaagataaaaataaaccgtaatcccgatcaaaatggtgctctctgagtatggtgatattattcagttaaatattattaacactaagaaactatgcaattaagaaaagaatatttaatagcctatgatatagaagataacaaaacaagaacaataatctataaacaacttctagcgtatggtcttaaggcggtgcaaaaatcagtattttggggctatgtcagtattgctgagcttaatgctatcaaaagattgtttgatagctcattaactatttcagataaggtatttattactagagtaaatatgcatgagcaaaaactagattatagctttggttacgatgacaaaactttcaaagactgggatgaatatggacatatttgataatgatttatctattcctgttaatttaattagacaatggtgtttttgtccgagaatagtttattatcaagaacttcttgcgattaagccgaacaaaccattatgggttgctcaaggtgaagaatttcataaaaaagtagagcaacttgagaaaagacgcagctttagcagatatggtttagagaatgcgatcaggcattttaatctaagtataaaaagtcagaaatataaactacatggtatagttgactgggttatagaaactgatactaatgtatatgtggttgagtataagacaaatcctaatccaaatagtttaggacataaactacaaattgcagcttatgctttgctagtacaggaatattttgctaaaccatgtaaaattacatttctaacctctgataaaaaatcatatgagataaaaataactgatgagttaatcaacaaacttataaaaactatcagtgaaaggctgttgagttaatctaagatttttcttatacctattgattttagatatttttagagaaatccaacttaaaaatccttattttgtgtttcatatcagcattttgtgctgatatgaatacacctatcccagttaagcgattaaatttacagcttttaaagcgttaaaacatatagcttttaacaaagcttgtgcatttacttttactgtagaaaagtaactagctctagcaaagttaaacttccttttcatcgtgccaaagcattgttcaaccttatatctaattttagatataagaatgtttcgtaatttttgtcttttagttagtggtttatttctaactgcttttttaagtacacgattattaattttgttagcttttagtaaatctctattagcagcagtatcatatgccttatctgctaatagatgtttacaattaatatcttctaacattgtttctaatctatgagcctcatagacttctgctgactctgtatgtagtgtttgtatgaaaccatgcttattatctacactagcaaaaactttatagccataatgactcttactacctttcttaatccatcttgcatctgtatctttaccatatgaaatattaggaatagaggttttgtcttcttttctatcttctactggattatcaatatgtttattaggtctgcctgcagactcaactaaggtagcatctataattgcacctttggcattatttatcgataaccctaatgcttctagctgtttgttaaattctttaagtagccttttatattttttcttttctattaataagtttctaaacttattaacagtactataatcaggtaagttagatgttggcgtaaaacctgtgaaatacatgaaatcaattcttagccttaaactagaggctaattctctatcacttagactataccactgtcctagtaacaaaagtttaaacatcattatacaatcataggcgggtctaccttgccttgtcatatcttgtgtatagatacctttaagtgttttcctaaacttttcaaagttaactaacttgtttagttttacaaacttattatcactaccaagtgactcttctaaacctaaaaagaaaaaatccataattattaaaatataaatatctactatatctatattttacaaaattcataaatttatttgcagattaaatcaacagtcttagtgatatccttagtactttagatagtggtaataagccagactcatctgcatcggatcatcaatgtatacaatgtgaatattacaacttttgtaatgatcgttgatagtaaaatctctaattgtcactgaaggcggaaatctcgcaaatatttagaaatctccatattaaatttctcagccatcttgatgtaatcgagctaagaaacaaacaagttatattaatttccaaactaaaaagccacttaggtggcaaatttttgctttttagttattcagacgtgtcaaacagaggtccgttcaaaatacttttaaatgattacagagcattaattatttggtacattaataattttagatattttttcgcaaaatgtctacgtttttttacaattagggtatttgcgaaaaaataccattttaaaaaactctcaaagccttgcaaacactaggtttgttttggctctaacagtagtttaccaaataattcagcaactgaaactgagcctcctcaaaagtagctaaatattcttgcctgctaacagtagtttaccaaataattcagcaactgaaacagtagttatacaagatgctagtgtctttggttctactaacagtagtttaccaaataattcagcaactgaaaccttctatctacaaacctgcagttgttaggctcatagctaacagtagtttaccaaataattcagcaactgaaacttcaaacaagtatctgaataaacctgtgcaactaatctaacagtagtttaccaaataatttagcaactgaaactaacatcgcaaacagtctcttttattccgtaccactaacagtagtttaccaaataatttagcaactgaaacttaattaattttgtaaattattcctaaaagtttctagttgggcacattgtatcaaataatataatcacgaaaacagttttacagcaaaatgttgatctcaacatactaccaaagcattcaaataataaaaataagtaggtctaaaagtgaattttctagctactttaaactaacacaagtacataccaaataatctaacaactgaaacttacagctaatctttttcatttgctttgataattctaacatagtttattaaatagtctagtttactaaaaaactcattaaaaataatttttcataagcttttatctaaatactactttcagaaatagacaaacaaagttttaatagactttaagcaatttattttatgaattaattaattttttgaatcagttttagaaaaaaaatagttaaaatgatatatcgctacaattagcttaacaatagctaaaataaagtagtataaagcatatagggttgctataaacgcgatagctaacaacaaaaatgtaaacataactaatattgagattatcagtatttataaagtataaataaaaagctcaaactaaccaagataaaagagtctttaaaataggttctgtgcacnnnnnnnnnnnnnnnnnnnnnnnnnnnnnnnnnnnnnnnnnnnnnnnnnnnnnnnnnnnnnnnnnnnnnnnnnnnnnnnnnnnnnnnnnnnnnnnnnnnnctcataagcatttttacagctgcgtaacatttcctgaataaattgatcatgcattttgattaagttatctagcaaatactttttactctcaataagaaaacaaatcattaatgcatatcgcttatgtccattaaaccttttgatgtctctagaattatagtttttagttagcttaaatatatagtctaagaattttgaatttataaaattgctattaattctttcaagattaaaaaaactaagcttttcatataattccaaatatgtgtttatagaagaagctgttgaatatggaggatattgttttagttgactaaaatatgacttagagtcattggacgaatctaatgcttcgtctatttgttctttaagatcagtaggcagactattataaattttttcaaatatttcactatgaactttattacaaatacttgttatagttctgtctaatactgatttacctggaataactattttatttttaagtagaaattcttgagcttcattatttaactcatttggcaacataccttgtctagcctcagattctatccatgcttcaaagcctgaaataattaaaccttcatatttttcaaattctaaatatgataataacttttgacgatgttctgtaatagttgctttacgagatggctcattaactatcaaagtaggtggcaattttaactgcttacttaagtagttaataatatcagcaggaatatcgttacaatattgaataaatttaccattgtttcgtaaagagcatagttgtatggataaatataatctgaattcagcttttacacttttaacttcgtttttatcatcttctgataatgtccaatttttaataataagttcttgagataatttcttttccataattttgtccatttagagtgtagtctattttgactgtcaggtgctatttcaaaaagtgtcaaatataaatatgtattttaatttattgacaaatatagtacaaactcttagactctttcctgacataaataatttttttgacaaaaatgcctggtaagaatattggttacattcgagtgagtacaactgctcaaaatcatgaaagacaattagaaggtttaaatttagataaaacttttattgataaggtgtcaggtaaaagtattgaacgtcctgaattaactaatttattagaatatgctagggatggagatactgtttttatccatagtatggacagactagctagaaatcttgatgatcttagaaaagtagtcattcaacttacatcgagggatgtaatagtaaaatttgttaaagaaggacttacttttacaggcgatgattctgctatgtctaatttattactttcagtaatgggagcttttgctgaatttgaaagagctttaattaaagaaagacagcttgaaggaatagctatagctaaaaagaaaggtgcttataaaggaagaaaacctagattatctgatgagcaaattactgaactaaaagaaaaaatagcaaatggtgagaagaaaactacagttgctaaatattttggtattagtagagaaactctctatcaatatttaaggaaataattatgagtaagcattttattgataagtcacgtaacattcgtaaaaagctaagacaaaatataaaaaatgagataattaaagagtactatgataaaggtagattatttactacaaatcactatgtaacacccgaatcttggtggatagatatatgttttttgggtaaagataaagcaactttctattcttgtgctctaacaacttgtagaatgattatccaagataaggctagtgatttagcctatgcagaagctgaaagcatagtgccatataattctgaattggaaggttatgatttaataaataagcataatggtcttagtcaattagagtttaagaaacaagcttataaaaaacttgatggattaactagatttgaatggtgtcaaaaaagagagcaagagctacttaaacatgttgatacaactgagtacattaaactagactatagctattcatatgcaataggaatgcatgcatctattaatagaatacttaataccgatagcattaaccaatttattattgatttcataaagaatgatgagaaagcatatacagacaataaagtaatttctctagataatacttatattccaaatcaaatgcctaattttaaaactgaagaagaaagtacagagtatcatatcaaaaatagttctatagcaactaaagaagcacctaaatttatattagatattttaaaaataaggtagagcatatgaaatatcaacccccttatacaataacgccaaagataatatctttagtagcagatataagccaagagataggtaagataacagctacttcacagatagaaagagatttaaggcttagaaagataaatcaggtaaagactataagaggaactttagcaatagagggtaataccttagatgaaagccacattacggctatattggaaggtaaaaggatattagccccacaaaaagagatcttagagataagaaatgcgataaaaacttatgataagttccaaattttaaactataaagaagaaaaagacttattgagtacgcatttaacgctaatgcagggcttagtggatgaagttggagtatatagatcaggttcagtaggagtaatggagggtaataatgtaatccatttagcaccaccagcaaaaaagctacgcgaactaatgaaaaatctatttgattggatagcaaatacagaagagcatccgataataagtagttgtgtgtttcattatgaatttgagtttatccatccatttgcagatggtaatggtaggatgggtagactatggcaatcactaatactaagccattggaataaactatttagttatatcccagtagagagtattgtatatgagcatcaaaaagcatattatgaagctatacaggaaagtactaataaaacagattgctatccatttatagaatttatgctagagatgttgagtatagcaataagagaaataacccctcaagtagaacaacaagtaagcccccaagttaaaaaactgatagaagtattgaaagataaggaattaaccagacaagagttacaagataagctcaagctcaaggataggaaatcatttgtagagaggtatttaaagccagcactagagcaaaaattaatagaaatgacgatcccagataagcctaatagtaaatcccaaaaatatagaatggctagaccgtaattttctgttcattcgctccctatggtcctattagagatttacttgaatgtaatatagatgtttattttacaaaaaatatgttgcatgcaaaagctgtacttgtagattctaatatcgcgatacttggctcagtaaatctagataatcgtagtttatttttaaattatgaagttgctacttttatatatactcgcaaacaagtagataaattatatcaatgggcagaaaatataattaaagattctgatagagatgcatcacatttgccaaccaaacgcagcagtttaattgttgaaagcattatgaaaatacttacacctctaatgtaataacttaatttaaggcaaaattttagataactaccgagaatattatctgtgtgttacaatttaggataatataagcttaacgctattataaatggaaaatttcttacttagtttactttatatcctcgaggcaaatattattttatttgtctgtcaagcactaacaatatttatcgttttaaagctaatagttgataaaaaatctgcttcaaatattttagcttggcttttagcaatattatttatcccatatattgccattccatttttctttatctttcaacgcaaagataaacgtagtttttggcaaaaagaagctatgaatattagtcaaccatcattagacctattctgcttagataaaagtgaaagttgtaaaaatctgcctaatgaaattatcaatgtttttgctaacatggatttaaatactcttacgactaaaaactcttttgaaatgtatacagatggagttaaatcattccaagcttttatgcaagcaattgaatctgctcagcaaaatatttatatccaaacttatgtatttaaaaatgataccacctctaaactagtaataaatgctttagaaaaaaaagctgctgaaggtgtagaaattaaaatgatgatagactcccttggttctttttatgtctatcgccataatagaaaaatattcaagaaattacgtgatttaggcgctaaagtagtattttttatgccggtgatatctaatcctttacgtaactatattaattataggaatcatagaaaaatatatatttttgataatcatactgtatttagtggcggtatgaatatcggtgatgaatatatgtcgcctatagaacatcaagggatgtgggatgatttactctttaaaattcagggtgaatcattaatctattttctaaaggttttttgttctgattggcactttgcgacaaatcaagaaatcgattttaatattgataatacaattatacaagagggttttgttcaagtaattccatcaggacctgacctaaaagaagatcaactttattctggattaatcacagcgattaattcagccaaagagaaattatggattataactccatatctaataccatcagcagaattatatcattcaatagttcttgctaagaaaaaaggtcttgaagtaaaaattatcacgccaaaaaaatcaaatcataagttggttgataaagctagagcaagttatataagagattttttagaagctaatatcgatattcatttcactaaaaacatgatacacgcaaaagcagtattaattgacgataatatcgcaatgctaggttcagtaaatttagatattcgtagcctatttctaaattatgaaattgctacatttttatatagtaaaaatgacgttgcaaaaatctatcgctgggcggaaaaaatcttagctgactcaacgcaaaatactcaacatatgacttcaagtcgtggtagtctgattgccgaaagtatacttaaaatacttactcctttaatgtagtaaagtaagttacgacaaaacgtaaatcgtaacaattatttttctacttttaaatatattttcagcaatatttttttatttgataaaagctaattaatatattgcttttataaattattatgtgcttgtttttgatttatttagtcaaactaaggagatattactattatgcaaaaacttaaaagcacatcaaaagcatcattaatattaggattagga

SEQ ID NO: 160 - DNA, 23378 bp, synthetic construct
  misc_feature 1..23378: note = Synthetic
  source 1..23378: mol_type = other DNA
ttagctgtgattcctattggttatggcgatggttttcctcgtgagttaggtgatagagggttcgttaatattaatgatgtcatgtatcctatggctggtagaatgagtatggatagtctgacagtatcgttaggaattaatgaatacgatgtcaaagtaggcgatacagtagagctaatatcagctattccacgcaatcgaaatagtgcattttcaatagcaaaacaaacaaatactatcgaatatgatattatgagcacattaaatgatcgtattataagaaagatcatataatattctaaactgtttacttaatgaattaatcacagtaaactcataattatagtttatcaatttgttaattaaaggataacatggaaaaaaagtctttctacttttagtcttgtggctatgggtgtcggtgctattatgggttctggttggatgtttgctgcccagtatacatcacaagaagctggtccaggatctgttatatcatggataataggcgcagttttaatggtttttatagctttggtatttgctgaagtttgtacaattgttcctgtcgaaggttctacgtcacggattccacatataacacatggaacgatgataagttatatgtttgcttggattacgtggatatcatatttagttttagcgccaatcgaagttcaagctgttattcaatatttagctgttttttacccatcattgattgatacaagtagagatggtgcattatccatggcaggtctacctttggcgatatttttccttttaggtttttgtgtaattaatttttattcgcttaagtggttagcaaaaataaataatatcgtaactttatttaaggttgctataccgatatttatttcgattgtttttataattttttgttttacattaccagcattaaaggatataaaaaccgaagagctttcattaatgccatttgggtttaatggtgttttagctgctgtatctgtaggtggtattgcctatgctttcactgggtttaaaactattgttgaactggctggaagtacaaaaaatcctaaaaaatctatacctgtagcaactgttggtgcagtattgatttgtctaataatatttttatttttacagtctgcttatttgttagtgatgtcaaagtttgtgcataataatgattggcatagtgtggttatgccaggtgcaagctcatctagctttggatcttttgcgataatggcacaaagctttggagtaaagtggataatgtacccactttattttggggcgattattttcccattaatggcaggtttaatctattttagtattgcattaaagtcacttggtgctatggtccataatggttatttaccaagtattttaggtaaactaagtcctattatgaaaaagcctatttatgctattagtttgaattttcttattgcactaattatgtttgcgccttttcctggttggaaagagatggcaacttttttaacctcattgatcgctctaacttatatcactggtcctacatcaactatggcacttagacatcatttaccggagcttcacagaccatttaggctcagaggagcttatttactatcagttctaggtatgtttgcagctactttagtgtttttatggagtggctgggctatagtatcaaaagcaggtatagctttgattattgctttagtaatgctaggtatatataggattttaggaaagatagatctgaagaaatacattggaattttagagaatcaatatggttctggatttatatcgttttagtaacaatggtttcatattttagctcatttggtggtagaggagatttagatttatattggagttctgcgattatattagtaattagttttattgttgttacaatcgcaaaaaatctatgtttaccagcagctgatatgcgtgatggtatccataaagctatcagtgatgataattatatctaagtaaatatttctatttttatcttgtatttcataatgtattatattttattagttaaatcagtttttaattttaagtaagtatattatgattaaagtatcttttcagggcgagcatggagcttactctgagcaagcaataactaattttttagagcagcagaatataaaagattttcaaacagttccatgctggtctttttctgatgctattgaacatactataagtggcaaatcaaattttgtaatgattcctgtagaaaattctttagctggttctgttgtaccagcatatgatgagttgattaagagtaatctaaaggttaaagctgaggttgttttaaaaataaaacattgcttgatgggactcaatgacgtcgaaatttcggaaattgaaagtgtgatatctcatcctcaagcattatcacaatgtgctaatagtcttaaaaaattaaagcttactcctgaggcatttgttgatacagcgggagctgctaagtatatctttgagaaaaataaaagaaatcacttagctattgctggagagttagcagctaaaacttatagactaaagatttttcagcatgagctggaagatgagcaatttaattatacacgttttttattgatgggttatgatgatatcaaagttaactcagctgataataagtataagacaactataatattttcagttgaagataaatctaatgctttagtaaacacattaaatgtttttggtaaatataatattaaccttactaagatagaatcccgtccatcaagaaatagagcatggaattatttgttttttatcgattttgagggaagcgatgatgattttaatgtacagcaggcattacttgaagttcttaaaaaaagtacatttctaaaagttttaggttcttataagagttatcactttagttagaaagttttattaatgaatttaagtaatgagttataaagttaagattatttatagggatgttgctaacctaaagatttctttaaataaagatggtttagtaacagtggtatcacctcaaaaggttactaagaaagaaattttcaaaattcttgagtctaaaaaagcatggcttgataaacatgctaaaagattatcagtaaatcaaaaatatgattatcaaaactataccttaaatgatggagattgtgtttattttcttgggcgtgaatatcctatcaaaattgttgagtcaaagcataatattgtcaattatcatgatgatcatattcaaattttattaaatccaagtgttattacaaatagaaaatttaagttacaactattagaagaattttataaagatcaagcagatattattcttaataatctagtggctaaatacttaaaaattactaatcaagaaattactagagttacaataaaaaaaacaaaaacacgttggggctcatgtaactatgtcaaaaaaactatcaatcttaattttaatcttgttttgcgagacatccaagcaattgaatatgtggttttacatgagatagcgcatttaactcatccaaatcattcaaaagaattttatgcttatgtggcaagctatatgcctgattggaaagttagggaaaaaaggctaaaatagagtataattattccgggtatctatcatcaaatttttaactttctggaggcattttatggaaagtacgtttgaacttttttctataggagttggtccatcttcatctcatactataggtccgatgagagctggttgtgatttcataaacttgtataaagataaactgcctcaaactaagagtgttaagattgatttgtttggctctcttgcgctaactgggaagggtcataaaacagattacgctgttgttttgggtgtgatgggttttttaccagaatcagtggatattgaattggcaaaaaaactctatgatgaatgtttaaggagtaaaaaacttaatttaggtcaagagtttgaaattgattttgattatgataaggatttagtatttcattataatgagtttttgccagaacatgctaatggcatgcgtttttcattgtttaatggtgaagaactactttgtgaaaaagagtatttttcgattggtggtggttttattgtcgataaaaaacaaattaaaaaagatactgttcccacagaggtttcatgtgataagccttataaattttcaactatggctgagttaagagagctttgtcagcgtgatggtaaaactattgatgagataatgtttgagaatgaaaagacagcttatggtgagcagcaatcattagataaactagccgagatatggcatgtgatggaaacctcaattgaaaaaggtttaacttgtgctgaagcaacattaccaggtggcctcaaagttagaaaaagagctccaagtatgattagaaagctcaaggaacaaaatattgtcaatactgactttaattatctaaatgcttttgcgatagctgtaaatgaacaaaatgcgtgtggtgaaagagtagttacagcaccaactaatggtgctgctggtgttattccagctgtgcttaaatattatttacagactcatgagattgttaatcaacaagagctcaaagaggtagtgaataaatacttattagtatgtgctgctattggtattttgtataaatcaggagcatcaatttcagctgctgaagtgggttgccaaggagaggtgggtgttgcctgttcaatggcagctgctggctattgtgcgctacttggtggagaccttgattctattgagtctgccgcagaaattggtatggagcataatctaggacttacgtgtgatcctattggtggtttagtacaaataccatgtatagagcgtaatgctatgggtgctgtccaagctataaatgcagctaaacttgcataccttgatacaggtgagaagcgctttgttggtttagattatgtaattaaagttatgtatgaaactggtttagacatgtctagtaaatataaagaaacttctttgggtggcttagctactaatgttccagtatgttagttaattcataatattgagatatctcagttttaagttagtttggcaaaattatactaatttagtataatttagaccgtatgagttctatagaaattttttgatatgtatgatgtaaataaaattaggcaagactttccatttttagcacaaaaaataaataataaatcggtacttttttttgacactggtgcctcagcacagaagccccaagctgttattgaatgtgtagctgaagcatatgcttataattatgcaaatgtacatagaggtgtatattctcttagtcaagaagctagcgagaagtatgaaaatgtccgtcaaattgtgcaaaagtttttaaactctaaatcagcagatgaaattgtaataacaaaaggaaccacagaggctattaatttagttgctagctctatcggtaaggggattattaggtctgatgatgaaatagttgtcacagaaatggagcatcatgctaattttgtaccatggcagatgctttgcgaggacaaaaacctagattttaaagtggctgcggtcaaggacaatggcgagttagacgttgataatttattagctttagttacagctaagactaaaattttagcaattacattatgctctaatgttttaggaacaatcaaccctgtgaaagaaattatcaaacaagttagagaaattaatccaaatataattgttttggtagatggtgctcaagctgttattcataccaaggttgatgttcaagatttagattgtgatttttttgtcttctctgggcataagttatatggacctactggggtcggcattttatatggtaaatatgagttgctaaaacaacttcctccttataattatggtggtgatatggttgacgaagtaacaatagcaaagactacatttgcgctaccaccatataggtttgaagctggaacaccaaatatagttgaagctattggacttggtagggctattgagtatgttgattcaatcggcatgattaacattgaaaaacatgagcaaaaattattagaatacgcgacagctgagcttaataaaatcgatggtctaactatatttggtcaggcaaaacacaaagctggagttataacttttgatattcaaggttgtaatgctggggatattggtgagctattggcaattaagggtatatgtgtgagaactggtaagcattgtgctcatcctttgatgtatcgaatgggagttacctcaacagtgcgtatgtcttttgggatgtataatacttttgaggaaatagatttgttcataatagcattgaaaaaagtaatatctcaattaaaataatttagcaaaaagaggcaagtatggtagaagtttttgatccaaatgctagtagcattttagaagttacagatgctgcagctaaacatttcaagaaacatctagacaagcatgatggttgtataggtatttatgtcggaactaaggttatgggttgttctggcttagcttatgatgttgattttgttaaacagcaaccacaagatacacagaaagtacagcagcatggcattaatttctttgtatctaataagtctatggattttcttaatgggctaaaaattgattatgttaagcatgattttggattatataagttagaatatacaaatccaaacgaatcagcacgttgtggttgtggtgaaagttttacagtttaggaatatataaataatgaaaccaacagatgtaacaataataagaagacaggtaaaagcaattgctgtaccatttggtaatgagattgagttaatgcctggtcaagaagttttagtaacgcaagataagggtggaagctttactttaaatgtaaacggtaatttacttcatctagatggtaaagatgctgatgcgataggtaagcaaatcgtcagatatcctgtagaggggtatgatattaagccaggtgatccaattaatatggatgctatttgggatcaaatgagaacagtttatgatcctgaaattcctgtcaatattgttgatcttggtttgatttataatattattactagaaagttagagaatggtaattttcatgtaataattgatatgacattaacagcacctggttgtggtatgggaccagtgcttatgacagatgttgaaaaaagagtagcaatgcttcctaatgttgataaagttgatgtagtaatggtttttgatccgccatggaattcagaaatgatgactgaagctgctaagttagagttaggtttattttagtaatttagcttatgaataagatagcaatttatccaggtacttttgacccaattaccaatggtcatgttgatctagtagagcgtgcattaaatatctttgatgaaatagttgttgcagtatctacagcttatggtaaaaatactctttttgatattcgtatcagagagcaaatgataaaagaagtattcaaagataatcaaagggtcaaagttgtaagctttcagggtctacttgttgatacagcagtcaaacataatgcttgtgctatagttagaggtctcagagcagtatctgattttgattatgaatttcagatgtcaagtatgaataataaattaaacagtgatattcaaactatattcttaactccgagtgagaagttttcatgtatttcctcgacattagttagggctgtagcgatacataattataagcgtgttgatgagtttgtacctgaatgtgtctttcgtgagataaagcttaaatattctaaggaataaaattatggcattattaattactgatgaatgtattaattgtgatatttgtgagcctgaatgccctaatgaggcaatatcacaaggtgaagagtattatgagattgatccaaacaaatgtacagagtgtgtagggcatttcgaggagtctcaatgtactaaggtttgccctattaggtgtataattatagatccaaataatatagaaacacatcaacagcttttagacaagtataatagcttagtatcctagtatcataaagctataaaaaactctttgatttttattttaaatcatgtagaatacttgaatcttatgtttcggcatgtgaatagttaaaaagtatttaaaggagtttttgatgagattaaaaagtattgttatagctacaactgtattattaggttcagctacagcatctatcgctgcaggttcagataatatcgatacatcagcaaacactaattcagctactacacaaagcagtggttttgcagctaataatttcattgctccttttgcaaatacttatagcgctttgactaacaaggacaatacttggggtcctcaagatagaactggccagtggtacttaggtgtagatgctaacggtctagctagaactcctaactctccatcaggtgctggtgctaacttcacaatcggttataacatcaataaatacttcgctgtacagtacaaccaattagttggtagagtatttgctggtttaggtgaaggtgttgtaaactttagtaataatactatgtttactccatatgctgcaggtggtgctggttgggcaaatctagcaggtcaagcaacaggtgcttgggatgtgggtggtggtcttaagtttgaactatctagaaatgttcaagcaagtgttgactacagatatatccaaacaatggcacctagtaatatttctggtgctaatggcagagcgggtactaacatgattggtgctggtttaacatggttctttggtggcaaagatactactaataatgacactggtaatattcaggataatggtgcgactacagctgctcaaactgttgctatgccaactattgatgagtctaagtatgttttacctgctggtattaagcaatgtgaaggcaactttaatctaactgaagatggtgtcgcgtgctatacagtaaatggtgatgatgtaacagtttacctagatactaagtttgcttatgataaagctactttaaatgctaaaggtaaaaaagctattgcatcttttgttaattttatcaaggatagtaacattagctctgtaacagttaaaggttatgcttctcaaggtcaaactggtagcgagtttgatatatataaccaaaaactttctgagaagagagcacaagctgttgctgattacatgaagcaattaggtttagatagtgagaaaataattactaaaggttttggctataatgatactttaggtggtattcataagtctgatccgcgtaaccagcgtgtagaagctagcgtatcagctccacttaaagaagctaactaatatcaattttttctaaaatctcttgatttctttacgtcattaataaatgttctaagcaatcaattaaagtattgtatctctaattattcaaatacctactactgaataaaattcaagcacacctttattttaatatcatactataggtattgatttgattgagattctgaaactagttgaggataagagaatgtggtactttacgcttagtaaatagttaagcgttatagcaatactaatacgttattacaacaaactatgttaaatttataacctataaagaaatttcagtgagttgtttactaaaattcatagaattattcatactgtctagaaatcaaataatatttacgtaaatcgtagctaatactgacaatatttctttcaaaatgatttataaaatttgtaattttagattagttttactattaggaaaattgatagttatatagagctttatgaagcagaattaatgtataagtttaaagagttttccattttttaatttgattttgattttaaatactggtttaatgctttattaaaccaatgataaacgtatgtgaagctagttcctaaaagcttttatccaagtttatagatttatgattaaaaatttatatcaaactattattctgtacagagtaaaagaggtcattttatgaatgtcaaaatattaccaatagcaatagatttagatgttaaaaatactggtgtctttagcgcattttatcaaaaaggaacttctcttgagaaattggataataaaaatggcaaagtatatgaactatcaaaagattcttatactttattaatgaataatagaacagcacgaagacatcaaagaagaggaatagatagaaagcagctagtcaaaaggctctttaagcttgtttggacagagcaactaaatttagagtgggataaagacactcaacaagcgattagctttttgtttaatcgtagaggttttagttttattactgatggttattcgactgaatatttaaatattgttccagagcaagtaaaagcgatacttatggatatatttgatgattacaacggtgaagatgatttagacagttatttaaaattagctactgagcaagaaagcaaaatttctgaaatatataacaagctaatgcaaaaaatattagagtttaaattaaggaaattatgtactgatattaaggatgataaagtaagtactaaaacacttaaagaaatcacaagctatgaatttgagttattagctgattatttagcaaactatagcgagagtttaaaaatacaaaaatttagttatacagataaacaaggtaatttaaaagagctaagctactatcatcatgataaatataatattcaagaatttctaaagcgacatgctactataaatgatgaaattttagatactcttttaactgatgattttgatatttggaattttaattttgagaaatttgattttgataagaatgaagaaaagcttcagaatcaggaagataaagatcatacacaagcgcatttacatcattttgtttttgcagtaaataaaataaaaagtgagatggcaagtggtggtcgtcatcgtagccaatattttcaagagataacaaatgtgctagatgaaaataatcaccaagaaggatatctcaagaatttctgtgaaaatttgcataataaaaaatattcaaatttaagtgttaaaaatttagttaatctagttggtaacctaagtaatttagagctaaaaccgctaagaaaatattttaatgacaaaattcatgcaaaagctgatcattgggatgagcaaaagtttacagaaacttattgccactggatattaggagagtggcgagtaggtgtcaaagatcaagataagaaagatggtgctaaatatagttataaagatctgtgtaatgaattaaaacaaaaggttactaaggctggtttgatagattttttattagagttagatccatgcagaactataccaccatatctggataacaataaccgtaaaccaccaaaatgtcaaagtttgattttaaatccgaagtttttagataatcaatatccaaactggcaacaatatttacaagaattaaagaaactgcaaagtattcaagattatttagacagttttgaaactgatttaaaagacttaaagtcaagtaaagatcaaccatattttgttgaatacaagagttcaaatcagcaaatggcaagtggtcaaagagattataaagatttagatgctcgaatattacagtttatatttgatagggtaaaagctagcgatgagttgcttttgaatgagatttattttcaggctaaaaaacttaaacaaaaagctagctctgagttagaaaaactcgagtcgagcaaaaagctagatgaagttatagcaaatagtcaactatcacagatactaaagtctcaacatacaaatggtatttttgaacagggtacttttttgcatttagtttgtaaatactataaacaaagacaaagagcgagagactctaggctatatattatgcctgaatatcgttatgataaaaaactagataaatataacaatacaggcagatttgatgataataatcagctattaacatattgtaatcataagccaagacaaaaaagataccaattgttaaatgatttagctggggtgttacaggtatctcgtaatcagttgctaagttcagttgaagagtggtttcaacaagcacaacgagttggtgaaatatcaaaatctcaagatgagcaaatatttgaatggttaaaaagctttaaaatagctagttattgtaaagccgcggtagaaatgcaaaaacaatatcgaggaactttaaaaaacgcgattcaaactgctatatttagacaaagtgaaaatataaacaaaaataaaaataaaaatactggtaatcaacaacaagcactttcagaaaattccaaagatgtaaaatcactaacagcggacgagaaaaaactcctaaaactaatagaaaatatagctaaagcatcacagaaaataggtgaaagtttaggactaaatgataagcaaattaaaaaatttaactcaatatatagttttgcacagattcaacaaattgcttttgcagagcgtaaaggtaatgctaacacttgtgcagtttgtagtgctgataatgctcatagaatgcaacaaattaagatcactgagcttgtagaggacaataaagataacataatcttaagtgccaaagctcagagactaccggcgataccaactagaatagttgacggtgcggttaagaaaatggcaactatattagctaaaaatatagttgatgataattggcagaatatcaaacaagttttatcagcaaaacatcagttacatatacctattatcacagaatcaaatgcttttgagtttgaaccagcattagctgatgtaaaaggtaagagcctaaaagataggagaaaaaaagcattagagagaataagtcctgaaaatatattcaaggataaaaacaatagaataaaagaatttgctaaaggtatatcagcatatagtggtgctaatttaactgatggcgattttgatggtgcaaaagaagaattagatcatataatacctcgttcacataaaaaatacggcactctaaatgatgaagcaaatctaatttgtgtaactcgtgatgataataaaaatatttttgctatagatactagtaaatggttcgaaatagaaacacctagtgatcttagagacattggagtagcaacaattcaatacaagatagataataattctcgtcctaaagtcagagttaaacttgattatgttatcgatgatgatagtaagataaattattttatgaatcattctttattaaaatcaagatatcctgacaaagttttagaaattttaaaacaatcaactattatagaatttgaaagttcaggttttaataaaactatcaaagaaatgcttggtatgacattagcaggtatttataatgaaacatctaataattagtgaatacggtatatatcttggtttagagtctggcagattagttgtcaaaaataaagatgataaaaagtattttccattaaatcgtttagctacgctttctatagctaaaaagggtgtcagtttctctagtgatttggtagagcagttttctctaagggggattaaacttttctttttggattttagaggagttgctcactcgatgcttgttggtgctaatcaacatgctgtagttcaagcacggattaaccaatatcgttatattgatagaaatgctttaacattgtcaatcaaactaattgcagctaaaataaaaaatcaacgtgctacacttaactattttaataaacatcataagtcaataaatcttctaaatgctatagaagagctaaaaagagtagcacaacttatcaaaaatgctaaaactctaaatgatgtacttggttacgagggttatgcggctaatatatatttttcaagtttggctaaagataaatttttatcagcgagttttgccaatagggagggtcgaggcctcaggagattgctaatagtatgctaaattttggttatgctatcttatctagctatattctaaatgcaattacaaatgcaggacttgagccttatttaggatttttacatcaaaaaagacctggaaagatgtcgttagttttagatctaatggaggagtatcgagcttgggtcgttgatagggtagttattaagctacgcgaacaatataagaataagcaatatatagatactaaattaaaatcgatattaatctcagagatacaagcaacgatagcaaagaaatatatttataatggtaaaaaacttaagttagaacacattatccaaaggcaggtatatagattatctggagaatttgctggtgaacataattataaaccatatatttttaagtggtagaaacttacaccagaatcgaaatttgcatacaaaagggatcaagatatacccaatcaagttgggtattaagataaaaataaaccgtaatcccgatgaaaatggtgctctctgagtatggtgatattattcagttaaatattattaacattaagaaactatgcaactaagaaaagaatatttaatagcctatgatatagaagataacaaaacaagaacaataatctataaacaacttctagcatatggtcttaaggcagtgcagaaatcagtattttggggctatgttagtattgctgagcttaatgctatcaaaagattgtttgatagctcattaactatttcagataaggtatttattactagagtaaatatgcatgagcaaaaactagattatagctttggttacgatgacaaaactttcaaagactgggatgaatatggacatatttgataatgatttatctattcctgttaatttaattagacaatggtgtttttgtccgagaatagtttattatcaagaacttcttgcgattaagccgaacaaaccattatgggttgctcaaggtgaagaatttcataaaaaagtagagcaacttgagaaaagacgcagctttagcagatatggtttaaataatgcgatcaggcattttaatctaagtataaaaagtcagaaatataaactacatggtatagttgactgggttatagaaactgatactaatgtatatgtggttgagtataagacaaatcctaatccaaatagcttagggcataaactacaaattgcagcttatgctttgctagtacaggaatattttgctaaaccatataagactacatttctaacctctgataaaaaatcatatgagataaaaataactgatgagttaatcaacaaacttataaaaactatcagcgatattcttagtactttagatagtggtaataagccagattcatctgcatcggaacaatgtgaatattacaacttttgtaatgatcgttgatagtaaaatctctaattgccactgaaggcggaaatctcgcaaatacttagaaatctccatattaaatttctcagccatcttgatgtaatcgagctaagaagcgaacaagatatattaattgccaaacaaaaaaagccacttaggtggcaaatttttgttttttagttattcagacgtgtcaaacagaggtccgttcaaaatacttttaaatgattacagagcattaattatttggtacatttataattttagatattttttcgcaaaatgtctacgtttttttacaattagggtatttgcgaaaaaataccattttaaaaaactctcaaagccttgcaaacactaggtttgttttggctctaacagtagtttaccaaataattcagcaactgaaacttaggttctgtgcacaaaaataaatattcatcgtaaccaaataaaagtacaagctaatttaatcattcctatatatgctgaaatggttttatcaaatctagagaatactcttctaaaatgcttaattttagaaaagaaattctctatcaaatgtctttctttatatacatgactatcaaaaggtatatggtttagagtatttgatttacaagggataacagcttcagaggatataccttgaatatgctgcctgatttcattagaatgatatgctctatcagcgataacttttgtattatatacattttttagtaaatctatagctactttactatcatgagttttatcctctgacaacaatatttctattggattacctaaagcatcagtcatagcatggattttagtggttatcccaccaactgatctaccaattgcttggttatcatctttatcatatcccgtagcacaagcatgtgctcttgctattgttgaatcaagcatgacttcttgtaaatcagggttttgtactgatttaaataatctagaaaatatatctttatcacatcaatctttaaaacgcttatgtattgatctatatttaccataataaaatggtaacattctccattgacagcctgtacgtaacacataaaatacagcttcaataaacaatcttaatttggcttcatcattggtatgtatacctttttgtgattttaagaatgataaaataattgaccagaatacttcttttatatgataattcatttgctaaaccattgatatttattgcttttcaactcttaaataacagcggtttagctattttcaatataatttaagttttttgtgcacagaacctattattttttatcatttttaattacttctaccggtccgtgatcatcacaatgatcaccatgagggtggtgtaatctaccatcaacaatatagtctatgtgatcaccatgtggtactgcttcatgaccgcagttaggtccatggacatgactagagcaatcttctttgattggatgacagccatctgggttcttttctgttacttctagggtatgttcatcatagtgaccattgtgctcatgatgaaggtgaccatcatgtaggtagtcgtagtgatcgccatgttttattttggtatgaccacaatcatcttggtgtttatattcgtggttttggtgtgttttacatttgctcatattgattatcctttggctttgctgatattacaatcttaatacttattataaaaaacatcaattgtacgatgatttgtaacttagcaaaatagacaaattttatataactaaaactatatacaaaaagtagagaaatgtactatttgacaaattgatatagaaaactatttgaatttaaactcttgatagtcggcttgtccaaagattgtatctgcttgatatttggctttggcaaaatctatcttactaagatcaactttacggatatcataattatcccaagtacggaaatagtaaatacgattgctaaggtcatcaactacagagtatgaggtaaactgtggcttagagcttacccatcgccaatatagagaaccctgtggtatatctacagtattgatcattgaccaagcatgatttacagctgttaaatcatctggtgtatttgctttagtagtattaaaagctaccatttttgcaaagcgaccttgaggtgaataatcaaaagcgataaatttatcttctttaatttcacgatcttgatattttttgagtaatttaagctgttcgtcataagcaggatcattggtaagaactttaattttattatcataaattttggttttaccatttataaactcaactactacagaattaccctgagcatcactaatcgcaaaatgtactgtaatttcaactttatctgagatctctggtaatacagaagtgtagaacttgtgtttcttgatgaattctacagcttgcgtaactgttgtggtattacctaaaacatatggcaatagcatagtaatattatagtcagcatcttttttatcaggatatttactaccactaagccaaagagcgcttactgctagactatattcattcataccatcactaaaattaccattatgactcatacctacaaagccatagtgagttgtaaagtttccaaacttatatcctcttggtactaaggtgattttagtatttaaatcgccaggccattccatagttctgccaataaaataatgtcccttatcattttcaaagctaaaccaagtacatccaaagctaaactgtagaaatgatagtataattaaaggagttattagtattttcttaagcattttaaatatttttttaaatgataattattgattattatacatatagatagagtaatttatatagccatgttttgatttttttaaaaagttatcttatcgaagtcgttggcgtaaaccctcaaataaatatatcgttgcagcttgagctacatttagcgactctatatcactaagtgtaggtatcatagttttttgacctacagaaaaatcttcgataccattagcttcttcaccaaaaactaaaatactattagcaagtttaaactctttagcatagcatgataccccttgatgtggtgtagttaaccatattttgcgctgctgtaatttagcgatattttttagcttggcaagatttgtaatatagccaaatttgagactaaactgtgcgcccataccagcccttatcgctttggggttaaatggatcaacagtaccattgattaagattacttcttttaatcctacagctatagccgtacgtagaattgtgccaatattaccaggatcttggattctatcaaatactaggataaagtcatcatcaaagctaagttgttcaagcttaggtttttcagctaagattaaaactccttgtggattttgtgtttgtgatagtgcttcgaaatctttctcagtaataatatactttttatttagcgggtagtttggattatctgctttctcagttaccaagatcgcgattatttgttgttgtggtaatcttttgagtgcttcttgagagcatctaagtccttcaatgacgtagtactgtgacttttttcgaccttgagaactatgcagtttttttatttctttatagagtttttggctaagatttttcattaaattaattagctaagaattttgttagttattgtatgttttttggcgaggtgtttaaatagctttactgtgtatttttgctatagtttgtcagaaatgttaaggtaaatatatatactaagaaatttttagagtaattttatgcaaagaaaaaaaggagcttatgctccggtattttatcctgctattgttatagcagctatattgtcattgttgggagtcttagtccctgtagctttcgctaataatattgatattatccaaaatttaattctggaaaagttcggttgggcatatattttagctatgtgtatatttgtttgtatatgtctgattttgatgtttagccgttttggcgatattaagttaggtcaggatcatgagctaccagagtatacaaacctctcatggtttgcgatgttatttgccgcaggtatgggaattggtttgatgttttatggtgttgctgaaccactaaatcatttcctaagtcctcctaatctttcgccagatagtctagaaatggtaaaacaagcaatgaatacaacttttttttattggggaatacaggcttggtctgtatatgctgtagttggcttatctttagcttattttgcatatagacatgatttaccactactaccacgttcggtactatacccaattttaggtgataaaatctatggggtaattggtcatgctattgatatttttgcaatattaggtaccttgtttggggttgcgacttcattaggttttggtgcgatgcaagtaagctcagggataagctttctaactggtattgccgatacccaaaatatgcaggttttatatattatcataattgtcgcgcttgcgactatatcggtagctttaggacttgataaaggtattaaagcattgagtaatttaaatgttgtattagctattttgctattagcttttatattatttctaaggaatactgacggactgatacgtgattatatccaaaatataggctattacctaagtaccattgttaatcagactttcaatctatacgcgtacaatcaagataatcaacaatggttaaaaaagtggactttattttattggggctggtggatagcttggtcaccatttgtagggatgtttatagctaaagtttctaaaggtaggacaatccgccaatttataataggtgttttatttattccggtagggtttacatttctatggatgactgtatttggtaattcagctattgagattgttatgactggcaaggcgcaagatttaataaatgctgccaataacaatataccagtagcattatttgaatttttgcagcatttcccatttgcaacaatattatcaattttagcagtttgtttagttgtgacatttttcgtgacatctgctgatagtggcgccttagtaattgatattttagccactggtaatgcacaaacatcaataactgttcagcggatagcatggtcagtattaggtggtcttttagctatttcactaatattagcagggggcttacaggcactgcaatcagcgactattatcagcgcttttcctcttttatttattttatttttaatggctatttcattaataaaatcactaaggttagattatctaaggatcaaaagtatccaaacacattctacagttgttcagtatgtcaaagcagatacatcttggcagaagcgcctagcagctatagctgctaaacctacaaaaaacacaagctattgagtttctacaacaggtagtaactccagcagtgctagaggtcgctactgaaatgcaaaaaaatgctataaatacagaaattactaaagatgatgaacatgtacaattaattatcagaatccaatcaggtgatgattttgtatatagtgttatgcttagatcgtatcaaacaaaagcagataatgatacttataatagggtagaagttttattaggtcacggtggccaatattatgatattatcggttattcaaaggaacaggtaatagcagatattattaatcagtatgataaacatctacattatttacatttagtagtagctgataaagatattgtcaattaagtactgcgtaactgaaattaagtatccatgcaaagcttatccataataaataaggtacaagcaaatatccagctagattgtttatttgtctaaatattatgatattccaagcaacaaatacccacagtattgacatttctaatagtgctaaatcaatattatgccaacagaaaaatataaagctccataagaaattaagtcctagttgtatcacgtagactataaaagctttttgtttgagttgatgttgttgaaatattagccacccagatatcgcaatcataatgtataagattgtccagactggtgcaaacacccaattaggaggggcaaagaatggactttctaggtagataaaccagcttggaatatttattgatgttaccatcccaacaaaatatccaatagttaagattactataataaataatacaagagatatcaaatttgtgattttgaattggctcattttaactccttaagtctgctaaaaaatacctttcaatttagactagatattgtagattagaatatactttttctaaagtttatatcataattattaacaattatttaacaaattaataaggtaagtagatgctaaaaactaagagcttaaccccacatgagtacgatattatcattaataaagctacagaaaaaccttttactggtagatataatgatttagatcaaaaaggcgtttatatttgtcgtaattgcggtacaccactatttagagctgatagtaagtttatctcagcttgtggttggccaagttatgatattcatattgataataatgtaaagcaacttcctgatgctgatggtagaagaactgagattttatgtaataattgtgatggtcatcttggacatatatttcatggcgaaggctatacaaaactaaatactcgctattgtgtcaactctgcttgtgtagattttatcccaatagaggattttggtactactgaagagattattgttgcagcggggtgtttttggggcgttgaatattatatgaaaaagcttccaggagtgctatttgctgagtcaggctactgcggaggtgatcagccatatcctgattacaaaaaagtttgtcaaggtgatacaggttatttagaagttgttagagttatatttgatactagtaaagtttcattacaacaagttcttaagtatttctttgaaattcatgattttgagcaagttgatggccaaggtcctgatatcggtgagcaatataaatctgctattttttactatgatgataagcaaaaacaaatcgcagaagatctaaaacatatattagctcaaaagggctataaagttgctacagagattagagcaatgaaaccatattatgtagctgaggattatcatcttgactattatatgaaaaaaggtactttaccttactgtcatagtcataagaaaatattttaatgatactgatttggaaaaagtctatgtttaattagtaaaaatagacatagcgaagctactataaagcctaattgttgtgccggtatacctatcattaattttgatattgataggaaactgagaaagaaatcagcaatcccagcaactgtaaatttaactagccttattacagcattaccagctgcaaatccctcttttaataaatctatgacttttgatgttgtggttatatttacaaatgctagcccaatcgttaataaagcatttagaaatataaagatatagatattatcaaaaatataagagcttaagatatttattattgtaatgatgatcgcaaaataatagccgttgagaattaattttctttgattatgtgcagttactttccttctaatataactactagcaaaaaccactccacaaatatttaaaccaaataatatacagtattgtgtataaccaagatgaaaatagccaataattaaatttgatgaagcagtgataaagctaaataaggcgccaaaacataagccaccagtcaaacctccaaatataaaaggaatattcataaaatgatttagataagtcttaaagcttattacaagattttttgagcgtttgtatgatggatgagtttctggcattattaatgtaagaattagtagtataactccgtagatagtcaaaaagtggaatatattctgccaactaccagttgtatatataatcagacttccaataattggtgcaactattggagctagcataaacaccataaccattgtagccatcattttcattagtttttgacctctgtaacaatctttgagtactgccattgccgctacaccagcaggagagtcgcccaatccctgcaaaaaccgcattaatattaatgtatcaaaacta

SEQ ID NO: 161 - DNA, 22250 bp, synthetic construct
  source 1..22250: mol_type = other DNA
  misc_feature 1..22250: note = Synthetic
tagctgtgattcctattggttatggcgatggttttcctcgtgagttaggtgatagagggttcgttaatattaatgatgtcatgtatcctatggctggtagaatgagtatggatggtctgacagtatcgttaggaattaatgaatacgatgtcaaagtaggcgatacagtagagctaatatcagctattccacgcaatcgaaatagtgcattttcaatagcaaaacaaacaaatactatcgaatatgatattatgagcacattaaatgatcgtattataagaaagatcatataatattctaaactgtttacttaatgaattaatcacagtaaactcataattatagtttatcaatttgttaattaaaggataacatggaaaaaaaagtctttctacttttagtcttgtggctatgggtgtcggtgctattatgggttctggttggatgtttgctgcccagtatacatcacaagaagctggtccaggatctgttatatcatggataataggcgcagttttaatggtttttatagctttggtatttgctgaagtttgtacaattgttcctgtcgaaggttctacgtcacggattccacatataacacatggaacgatgataagttatatgtttgcttggattacgtggatatcatatttagttttagcgccaatcgaagttcaagctgttattcaatatttagctgttttttacccatcattgattgatacaagtagagatggtgcattatccatggcaggtctacctttggcgatatttttccttttaggtttttgtgtaattaatttttattcgcttaagtggttagcaaaaataaataatatcgtaactttatttaaggttgctataccgatatttatttcgattgtttttataattttttgttttacattaccagcattaaaggatataaaaaccgaagagctttcattaatgccatttgggtttaatggtgttttagctgccgtatctgtaggtggtattgcctatgctttcactgggtttaaaactattgttgaactggctggaagtacaaaaaatcctaaaaaatctatacctgtagcaactgttggtgcagtattgatttgtctaataatatttttatttttacagtctgcttatttgttagtgatgtcaaagtttgtgcataataatgattggcatagtgtggttatgccaggtgcaagctcatctagctttggatcttttgcgataatggcacaaagctttggagtaaagtgaataatgtacccactttattttggggcgattattttcccattaatggcaggtttaatctattttagtattgcattaaagtcacttggtgctatggtccataatggttatttaccaaatattttaggtaaactaagtcctattatgaaaaagcctatttatgctattagtttgaattttcttattgcactaattatgtttgcgccttttcctggttggaaagagatggcaacttttttaacctcattgatcgctctaacttatatcactggtcctacatcaactatggcacttagacatcatttaccggagcttcacagaccatttaggctcagcggagcttatttactatcagttctaggtatgtttgcagctactttagtgtttttatggagtggctgggctatagtatcaaaagcaggtatagctttgattattgctttagtaatgctaggtatatataggattttaggaaagatagatctgaagaaatacattggaattttagagaatcaatatggttctggatttatatcgttttagtaacaatggtttcatattttagctcatttggtggtagaggagatttagatttatattggagttctgcgattatattagtaattagttttattgttgttacaatcgcaaaaaatctatgtttaccagcggctgatatgcgtgatggtattcataaagctatcagtgatgataattatatctaagtaaatatttctatttttatcttgtatttcataatgtattatattttattagttaaatcagtttttaattttaagtaagtatattatgattaaagtatcttttcagggcgagcatggagcttactctgagcaagcaataactaattttttagagcagcagaatataaaagattttcaaacagttacatgctggtctttttctgatgctattgaacatactataagtggcaaatcaaattttgtaatgattcctgtagaaaattctttagctggttctgttgtaccagcatatgatgagttgattaagagtaatctaaaggttaaagctgaggttgttttaaaaataaaacattgcttgatgggactcaatgacgtcgaaatttcggaaattgaaagtgtgatatctcatcctcaagcattatcacaatgtgctaatagtcttaaaaaattaaagcttactcctgaggcatttgttgatacagcgggagctgctaagtatatctttgagaaaaataaaagaaatcacttagctattgctggagagttagcagctaaaacttatagactaaagatttttcagcatgagctggaagatgagcaatttaattatacacgttttttattgatgggttatgatgatatcaaagttaactcagctgataataagtataagacaactataatattttcagttgaagataaatctaatgctttagtaaacacattaaatgtttttagtaaatataatattaaccttactaagatagaatcccgtccatcaagaaatagagcatggaattatttgttttttatcgattttgagggaagcgatgatgattttaatgtacagcaggcattacttgaagttcttaaaaaaagtacatttctaaaagttttaggttcttataagagttatcactttagttagaaagttttattaatgaatttaagtaatgagttataaagttaagattatttatagggatgttgctaacctaaagatttctttaaataaagatggtttagtaacagtggtatcacctcaaaaggttactaagaaagaaattttcaaaattcttgagtctaaaaaagcatggcttgataaacatgctaaaagattatcagtaaatcaaaaatatgattatcaaaactataccttaaatgatggagattgtgtttattttcttgggcgtgaatatcctatcaaaattgttgagtcaaagcataatattgtcaattatcatgatgatcatattcaaattttattaaatccaagtgttattacaaatagaaaatttaagttacaactattagaagaattttataaagatcaagcagatattattcttaataatctagtggctaaatacttaaaaattactaatcaagaaattactagagttacaataaaaaaaacaaaaacacgttggggctcatgtaactatgtcaaaaaaactatcaatcttaattttaatcttgttttgcgagacatccaagcaattgaatatgtggttttacatgagatagcgcatttaactcatccaaatcattcaaaagaattttatgcttatgtggcaagctatatgcctgattggaaagttagggaaaaaaggctaaaatagagtataattattccgggtatctatcatcaaatttttaactttctggaggcattttatggaaagtacgtttgaacttttttctataggagttggtccatcttcatctcatactataggtccgatgagagctggttgtgatttcataaacttgtataaagataaactgcctcaaactaagagtgttaagattgatttgtttggctctcttgcgctaactgggaagggtcataaaacagattacgctgttgttttgggtgtgatgggttttttaccagaatcagtggatattgaattggcaaaaaaactctatgatgaatgtttaaggaataaaaaacttaatttaggtcaagagtttgaaattgattttgattatgataaggatttagtatttcattataatgagtttttgccagaacatgctaatggcatgcgtttttcattgtttaatggtgaagaactactttgtgaaaaagagtatttttcgattggtggtggttttattgtcgataaaaaacaaattaaaaaagatactgttcccacagaggtttcatgtgataagccttataaattttcaactatggctgagttaagagagctttgtcagcgtgatggtaaaactattgatgagataatgtttgagaatgaaaagacagcttatggtgagcagcaatcattagataaactagccgagatatggcatgtgatggaaacctcaattgaaaaaggtttaacttgtgctgaagcaacattaccaggtggcctcaaagttagaaaaagagctccaagtatgattagaaagctcaaggaacaaaatattgtcaatactgactttaattatctaaatgcttttgcgatagctgtaaatgaacaaaatgcgtgtggtgaaagagtagttacagcaccaactaatggtgctgctggtgttattccagctgtgcttaaatattatttacagactcatgagattgttaatcaacaagagctcaaagaggtagtgaataaatacttattagtatgtgctgctattggtattttgtataaatcaggagcatcaatttcagctgctgaagtgggttgccaaggagaggtgggtgttgcctgttcaatggcagctgctggctattgtgcgctacttggtggagaccttgattctattgagtctgccgcagaaattggtatggagcataatctaggacttacgtgtgatcctattggtggtttagtacaaataccatgtatagagcgtaatgctatgggtgctgtccaagctataaatgcagctaaacttgcataccttgatacaggtgagaagcgctttgttggtttagattatgtaattaaagttatgtatgaaactggtttagacatgtctagtaaatataaagaaacttctttgggtggcttagctactaatgttccagtatgttagttaattcataatattgagatatctcagttttaagttagtttggcaaaattatactaatttagtataatttagaccgtatgagttctatagaaattttttgatatgtatgatgtaaataaaattaggcaagactttccatttttagcacaaaaaataaataataaatcggtacttttttttgacactggtgcctcagcacagaagccccaagctgttattgaatgtgtagctgaagcatatgcttataattatgcaaatgtacatagaggtgtatattctcttagtcaagaagctagcgagaagtatgaaaatgtccgtcaaattgtgcaaaagtttttaaactctaaatcagcagatgaaattgtaataacaaaaggaaccacagaggctattaatttagttgctagctctatcggtaaggggattattaggtctgatgatgaaatagttgtcacagaaatggagcatcatgctaattttgtaccatggcagatgctttgcgaggacaaaaacctagattttaaagtggctgcggtcaaggacaatggcgagttagacgttgataatttattagctttagttacagctaagactaaaattttagcaattacattatgctctaatgttttaggaacaatcaaccctgtgaaagaaattatcaaacaagttagagaaattaacccaaatataattgttttggtagatggtgctcaagctgttattcataccaaggttgatgttcaagatttagattgtgatttttttgtcttctctgggcataagttatatggacctactggggtcggcattttatatggtaaatatgagttgctaaaacaacttcctccttataattatggtggtgatatggttgacgaagtaacaatagcaaagactacatttgcgctaccaccatataggtttgaagctggaacaccaaatatagttgaagctattggacttggtagggctattgagtatgttgattcaatcggcatgattaacattgaaaaacatgagcaaaaattattagaatacgcgacagctgagcttaataaaatcgatggtctaactatatttggtcaggcaaaacacaaagctggagttataacttttgatattcaaggttgtaatgctggggatattggtgagctattggcaattaagggtatatgtgtgagaactggtaagcattgtgctcatcctttgatgtatcgaatgggagttacctcaacagtgcgtatgtcttttgggatgtataatacttttgaggaaatagatttgttcataatagcgttgaaaaaagtaatatctcaattaaaataatttagcaaaaagaggcaagtatggtagaagtttttgatccaaatgctagtagcattttagaagttacagatgctgcagctaaacatttcaagaaacatctagacaagcatgatggttgtataggtatttatgtcggaactaaggttatgggttgttctggcttagcttatgatgttgattttgttaaacagcaaccacaagatacacagaaagtacagcagcatggcattaatttctttgtatctaataagtctatggattttcttaatgggctaaaaattgattatgttaagcatgattttggattatataagttagaatatacaaatccaaacgaatcagcacgttgtggttgtggtgaaagttttacagtttaggaatatataaataatgaaaccaacagatgtaacaataataagaagacaggtaaaagcaattgctgtaccatttggtaatgagattgagttaatgcctggtcaagaagttttagtaacgcaagataagggtggaagctttactttaaatgtaaacggtaatttacttcatctagatggtaaagatgctgatgcgataggtaagcaaatcgtcagatatcctgtagaggggtatgatattaagccaggtgatccaattaatatggatgctatttgggatcaaatgagaacagtttatgatcctgaaattcctgtcaatattgttgatcttggtttgatttataatattattactagaaagttagagaatggtaattttcatgtaataattgatatgacattaacagcacctggttgtggtatgggaccagtgcttatgacagatgttgaaaaaagagtagcaatgcttcctaatgttgataaagttgatgtagtaatggtttttgatccgccatggaattcagaaatgatgactgaagctgctaagttagagttaggtttattttagtaatttagcttatgaataagatagcaatttatccaggtacttttgacccaattaccaatggtcatgttgatctagtagagcgtgcattaaatatctttgatgaaatagttgttgcagtatctacagcttatggtaaaaatactctttttgatattcgtatcagagagcaaatgataaaagaagtattcaaagataatcaaagggtcaaagttgtaagctttcagggtctacttgttgatacagcagtcaaacataatgcttgtgctatagttagaggtctcagagcagtatctgattttgattatgaatttcagatgtcaagtatgaataataaattaaacagtgatattcaaactatattcttaactccgagtgagaagttttcatgtatttcctcgacattagttagggctgtagcgatacataattataagcgtgttgatgagtttgtacctgaatgtgtctttcgtgagataaagcttaaatattctaaggaataaaattatggcattattaattactgatgaatgtattaattgtgatatttgtgagcctgaatgccctaatgaggcaatatcacaaggtgaagagtattatgagattgatccaaacaaatgtacagagtgtgtagggcatttcgaggagtctcaatgtactaaggtttgccctattaggtgtataattatagatccaaataatatagaaacacatcaacagcttttagacaagtataatagcttagtatcctagtatcataaagctataaaaaactctttgatttttattttaaatcatgtagaatacttgaatcttatgtttcggcatgtgaatagttaaaaagtatttaaaggagtttttgatgagattaaaaagtattgttatagctacaactgtattattaggttcagctacagcatctatcgctgcaggttcagataatatcgatacattagcaaacactaattcagctactacacaaagcagtggttttgcagctaataatttcattgctccttttgcaaatacttatagcgctttgactaacaaggacaatacttggggtcctcaagatagaactggccagtggtacttaggtgtagatgctaacggtctagctggaactcctaactctccatcaggtgctggtgctaacttcacaatcggttataacatcaataaatacttcgctgtacagtacaaccaattagttggtagagtatttgctggtttaggtgaaggtgttgtaaactttagtaataatactatgtttactccatatgctgcaggtggtgctggttgggcaaatctagcaggtcaagcaacaggtgcttgggatgtgggtggtggtcttaagtttgaactatctagaaatgttcaagcaagtgttgactacagatatatccaaacaatggcacctagtaatatttctggtgctaatggcagagcgggtactaacatgattggtgctggtttaacatggttctttggtggcaaagatactactaataatgacactggtaatattcaggataatggtgcgactacagctgctcaaactgttgctatgccaactattgatgagtctaagtatgttttacctgctggtattaagcaatgtgaaggcaactttaatctaactgaagatggtgtcgcgtgctatacaataaatggtgatgatgtaacagtttacctagatactaagtttgcttatgataaagctactttaaatgctaaaggtaaaaaagctattgcatcttttgttaattttatcaaggatagtaacattagctctgtaacagttaaaggttatgcttctcaaggtcaaactggtagcgagtttgatatatataaccaaaaactttctgagaagagagcacaagctgttgctgattacatgaagcaattaggtttagatagtgagaaaataattactaaaggttttggctataatgatactttaggtggtattcataagtctgatccgcgtaaccagcgtgtagaagctagcgtatcagctccacttaaagaagctaactaatatcaattttttctaaaatctcttaatttctttacgtcattaataaatgttctaagcaatcaattaaagtattgtatctctaattattcaaatacctactactgaataaaattcaagcacacctttattttaatatcatactataggtattgatttgattgagattctgaaactagttgaggataagagaatgtggtactttacgcttagtaaatagttaagcgttatagcaatactaatacgttattacaacaaactatgttaaatttataacctataaagaaatttcagtgagttgtttactaaaattcatagaattattcatactgtctagaaatcaaataatatttacgtaaatcgtagctaatactgacaatatttctttcaaaatgatttataaaatttgtaattttagattagttttactattaggaaaattgatagttatatagagctttatgaagcagaattaatgtataagtttaaagagttttccattttttaatttgattttgattttaaatactggtttaatgctttattaaaccaatgataaacgtatgtgaagctagttcctaaaagcttttatccaagtttatagatttatgattaaaaatttatatcaaactattattctgtacagagtaaaagaggtcattttatgaatgtcaaaatattaccaatagcaatagatttagatgttaaaaatactggtgtctttagcgcattttatcaaaaaggaacttctcttgagaaattggataataaaaatggcaaagtatatgaactatcaaaagattcttatactttattaatgaataatagaacagcacgaagacataaaagaagaggaatagatagaaagcagctagtcaaaaggctctttaagcttgtttggacagagcaactaaatttagagtgggataaagacactcaacaagcgattagctttttgtttaatcgtagaggttttagttttattactgatggttattcgactgaatatttaaatattgttccagagcaagtaaaagcgatacttatggatatatttgatgattacaacggtgaagatgatttagacagttatttaaaattagctactgagcaagaaagcaaaatttctgaaatatataacaagctaatgcaaaaaatattagagtttaaattaaggaaattatgtactgatattaaggatgataaagtaagtactaaaacacttaaagaaatcacaagctatgaatttgagttattagctgattatttagcaaactatagcgagagtttaaaaacacaaaaatttagttatacagataaacaaggtaatttaaaagagctaagctactatcatcatgataaatataatattcaagaatttctaaagcgacatgctactataaatgatgaaattttaggtactcttttaactgatgattttgatatttggaattttaattttgagaaatttgattttgataagaatgaagaaaagcttcagaatcaggaagataaagatcatacacaagcgcatttacatcattttgtttttgtagtaaataaaataaaaagtgagatggcaagtggtggtcgtcatcgtagccaatattttcaagagataacaaatgtgctagatgaaaataatcaccaagaaggatatctcaagaatttctgtgaaaatttgcataataaaaaatattcaaatttaagtgttaaaaatttagttaatctagttggtaacctaagtaatttagagctaaaaccgctaagaaaatattttaatgacaaaattcatgcaaaagctgatcattgggatgagcaaaagtttacagaaacttattgccactggatattaggagagtggcgagtaggtgtcaaagatcaagataagaaagatggtgctaaatatagttataaagatctgtgtaatgaattaaaacaaaaggttactaaggctggtttgatagattttttattagagttagatccatgcagaactataccaccatatctggataacaataaccgtaaaccaccaaaatgtcaaagtttgattttaaatccgaagtttttagataatcaatatccaaactggcaacaatatttacaagaattaaagaaactgcaaagtattcaagattatttagacagttttgaaactgatttaaaagacttaaagtcaagtaaagatcaaccatattttgttgaatacaagagttcaaatcagcaaatggcaagtggtcaaagagattataaagatttagatgctcgaatattacagtttatatttgatagggtaaaagctagcgatgagttgcttttgaatgagatttattttcaggctaaaaaacttaaacaaaaagctagctctgagttagaaaaactcgagtcgagcaaaaagctagatgaagttatagcaaatagtcaactatcacagatactaaagtctcaacatacaaatggtatttttgaacagggtacttttttgcatttagtttgtaaatactataaacaaagacaaagagcgagagactctaggctatatattatgcctgaatatcgttatgataaaaaactagataaatataacaatacaggcagatttgatgataataatcagctattaacatattgtaatcataagccaagacaaaaaagataccaattgttaaatgatttagctggggtgttacaggtatctcgtaatcagttgctaagttcagttgaagagtggtttcaacaagcacaacgagttggtgaaatatcaaaatctcaagatgagcaaatatttgaatggttaaaaagctttaaaatagctagttattgtaaagccgcggtggaaatgcaaaaacaatatcgaggaactttaaaaacgcgattcaaactgctatatttagacaaagtgaaaatataaacaaaaataaaaatactggtaatcaacaacaagcactttcagaaaattccaaagatgtaaaatcactaacagcggacgagaaaaaactcctaaaactaatagaaaatatagctaaagcatcacagaaaataggtgaaagtttaggactaaatgataagcaaattaaaaaatttaactcaatatatagttttgcacagattcaacaaattgcttttgcaaagcgtaaaggtaatgctaacacttgtgcagtttgtagtgctgataatgctcatagaatgcaacaaattaagatcactgagcttgtagaggacaataaagataacataatcttaagtgccaaagctcagagactaccagcgataccaactagaatagttgacggtgcggttaagaaaatggcaactatattagctaaaaatatagttgatgataattggcagaatatcaaacaagttttatcagcaaaacatcagttacatatacctattatcacagaatcaaatgcttttgagtttgaaccagcattagctgatgtaaaaggtaagagcctaaaagataggagaaaaaaagcattagagagaataagtcctgaaaatatattcaaggataaaaacaatagaataaaagaatttgctaaaggtatatcagcatatagtggtgctaatttaactgatggcgattttgatggtgcaaaagaagaattagatcatataatacctcgttcacataaaaaatacggcactctaaatgatgaagcaaatctaatttgtgtaactcgtgatgataataaaaatatttttgctatagatactagtaaatggttcgaaatagaaacacctagtgatcttagagacattggagtagcaacaattcaatacaagatagataataattctcgtcctaaagtcagagttaaacttgattatgttatcgatgatgatagtaagataaattattttatgaatcattctttattaaaatcaagatatcctgacaaagttttagaaattttaaaacaatcaactattatagaatttgaaagttcaggttttaataaaactatcaaagaaatgcttggtatgacattagcaggtatttataatgaaacatctaataattagtgaatacggtatatatcttggtttagagtctggcagattagttgtcaaaaataaagatgataaaaagtattttccattaaatcgtttagctacgctttctatagctaaaaagggtgtcagtttctctagtgatttggtagagcagttttctctgagggggattaaacttttctttttggattttagaggagttgctcactcgatgcttgttggtgctaatcaacatgctgtagttcaagcacggattaaccaatatcgctatattgatagaaatgctttaacattgtcaatcaaactaattgcagctaaaataaaaaatcaacgtgctacacttaactattttaataaacatcataagtcaataaatcttctaaatgctatagaagagctaaaaagagtagcacaacttatcaaaaatgctaaaactctaaatgatgtacttagttacgagggttatgcggctaatatatatttttcaagtttggctaaagataaatttttatcagcgagttttgccaatagggagggtcgaggcctcaggagattgctaatagtatgctaaattttggttatgctatcttatctagctatattctaaatgcaattacaaatgcaggacttgagccttatttaggatttttacatcaaaaaagacctggaaagatgtcgttagttttagatctaatggaggagtatcgagcttgggtcgttgatagggtagttattaagctacgcgaacaatataagaataagcaatatatagatactaaattaaaatcgatattaatctcagagatacaagcaacgatagcaaagaaatatatttataatggtaaaaaacttaagttagaacacattatccaaaggcaggtatatagattatctggagaatttgctggtgaacataattataaaccatatatttttaagtggtagaaacttacaacagaatcgaaatttgcataaaaaagggatcaagatatacctaatcaagttgggtattaagataaaaataaaccgtaatcccgatgaaaatggtgctctctgagtatggtgatattattcagttaaatattattaacattaagaaactatgcaactaagaaaagaatatttaatagcctatgatatagaagataacaaaacaagaacaataatctataaacaacttctagaaatatggtcttaaggtagtgcagaaatcagtattttggggctatgttagtattgctgagcttaatgctatcaaaagattgtttgatagctcattaactatttcagataaggtatttattactagagtaaatatgcatgagcaaaaactagattatagctttggttacgatgacaaaactttcaaagactgggatgaatatggacatatttgataatgatttatctattcctgttaatttaattagacaatggtgtttttgtccgagaatagtttattatcaagaacttcttgcgattaagccgaacaaaccattatgggttgctcaaggtgaagaatttcataaaaaagtagagcaacttgagaaaagacgcagctttagcagatatggtttaaataatgcgatcaggcattttaatctaagtataaaaagtcagaaatataaactacatggtatagttgactgggttatagaaactgatactaatgtatatgtggttgagtataagacaaatcctaatccaaatagcttagggcataaactacaaattgcagcttatgctttgctagtacaggaatattttgctaaaccatgtaagactacatttctaacctctgataaaaaatcatatgagataaaaataactgatgagttaatcaacaaacttataaaaactatcagcgatattcttagtactttagatagtggtaataagccagattcatctgcatcagaacaatgtgaatattacaacttttgtaatgatcgttgatagtaaaatctctaattgccactgaaggcggaaatctcgcaaatacttagaaatctccatattaaatttctcagccttcttgatgtaatcgagctaagaagcgaacaagatatattaattgccaaacaaaaaaagccacttaggtggcaaatttttgtttttagttattcagacgtgtcaaacagaggtccgttcaaaatacctttaaatgattacagagcattaattatttggtacatttataattttagatattttttcgcaaaatgtctacgtttttttacaattagggtatttgcgaaaaaataccattttaaaaaactctcaaagccttgcaaacactaggtttgttttggctctaacagtagtttaccaaataattcagcaactgaaacttaggttctgtgcacaaaaataaatattcatcgtaaccaaataaaagtacaagctaatttaatcattcctatatatgctaaaatggttttatcaaatctagagaatactcttctaaaatgcttaattttagaaaagaaattctctatcaaatgtctttctttatatacatgactatcaaaaggtatatggtttagagtatttgatttacaagggataacagcttcagaggatataccttgaatatgctgcctgatttcattagaatgatatgctctatcagcgataacttttgtattatatacattttttagcaaatctatagctactttactatcatgagttttatctctgacaacaatatttctattggattacctaaagcatcagtcatagcatggattttagtggttatcctaccaactgatctaccaattgcttggttatcatctttatcatatcccgtagcacaagcatgtgctcttgctattgttgaatcaagcatgacttcttgtaaatcagggttttgtactgatttaaataatctagaaaatatatctttatcacaccaatctttaaaacgcttatgtattgatctatatttaccataataaaatggtaacattctccattgacagcctgtacgtaacacataaaatacagcttcaataaacaatcttaatttggcttcatcattggtatgtatacctttttgtgattttaagaatgataaaataattgaccagaatacttcttttatatgataattcatttgctaaaccattgatacttattgcttttcaaatcttaaataacagcggtttagctattttcaatataatttaagttttttgtgcacagaacctaattattcaaaaaaatactagtagttatgttaatataaacatcaatgtaatttttttaaattaaacaaatgaaagattttatccttcaaataaaatcacagataaaacagcaagtgtatttagatggctcaaagagtatctcaaatagatcactgataatcgcagcgatggctcaaggtcaaacaaaatttgagaatttgcctaatagtgctgatgttttagcatgtattgcagctctaaaggagttaggttgtcagctagaacatagctgggattcaaaaactttagttattcaaggttgtagtggagtatttgcgaacttagatgtcaagatattttgtaatgagtctggtactttaacaagatttataataccaatgttagcagtgcagtctacaggtaaatattacgtatatgccaagcaaagaatgatggatagacccttagcagatcaactaaaaccgcttgaaaagttaggtatgctagcaaattaccatcaaaaggcttatgctatgcctttgacaataatagctaaatctttggatggtggttatatagaagttgatggcgagaagagttcgcaatttgcctcaggtttgctgatggcagcaccatttatgcaccgtggcttaagattaaactctatcacagaccacaagcaaccgtacttagatatgacaactaaagttatggcagagtttggtgtgacagtagatattgatgaaaatatctatactgccaacaaatctcaatatatctctcctagtaattatgtagttgaaccagatgtttcgacagcttcatatttttgggcatttgcagctatcaccggttcaactatcaaggttatgcatgttactaaaaactctaagcaaggtgatattaaatttttagaagtacttgagaaaataggctgtcaagttaattactacaatgatggtatagaggttacaggtaataatcagcttcgtggtatacaagttaatatgcgtaatttctctgatactttcatgacgcttgcagctattgcttgctttgctaaaggcgatacgcatatttcaggtcttagtcatacacgtggtcaagaatcagatcgcattgcagctatggcagagggacttagcaagcttggtatctatgtggagactactcaagatagtattttaatctcgccagctagaagtaaatttaagccagctgaagttgatagtcataatgatcaccgtatcgctatgtctttagcacttttaggcttaaaatatcaaggtgtaatagtaaataatgcagcggctgtaagcaaaacttgcccagattattttgatagaatgagagcattggtaggttagctatgataaaaaaggagcgtattataaccagatatctaagtcaaaggtggtataaaaaagctcttatcatcacagctacagagagtaattattttcataatataaatgtcttaaaattagtcgcatgttcaggatatctaaagaatcagtcaccattgggttgtatttttgatatagaggcttggccttttgaaaataaattttttgatcttattatccttgatgagagctttgtcagctgtccaaaacagatgagggctctatttaatcaattacatttttgtttgtcagatgatggtgaggtcatagtggcttgtgttggtggtattagtctatatggtttgttatcacgttttttggcaaacggctttactagtaaaaaagttagattaataaactatactaataattttatagtaaatattattaaaaaaataattagtaaaaattatgttgtagtctttaagaaagataattattttagggttgaccctttgaatgtcagcgaacttgttgataaaccattaaaggctaaagtctatagtggtggttgcgctagggaaatatatggaaattttcaaaaagaaaaatagggtcattgcctacacagatggtgcttgtaaaggcaatcctggaattggcggctggggagctatccttagttataatggtgtagataaagagatatatggtagtgaaaaagatactacaaataatagaatggagctaatggccgcaatcaaaacgctccaagcgcttaaaagaaagtgtgatataacaatttatactgattctaaatatcttcaaaatggtattaatgaatggttagcaaattggaaagctaatggttggaaaacagcagccaagaaagaagtcaaaaataaagatctctggcaagagcttgatagtctgacaaataagcataatgtaacatggggctgggtaaagggtcacagtggtaatgctggcaatgaaaaggcggatgagttagcaaacaaagctattgctgagctaatagggaaataaaatgaaagatcttgaaaatcgtgctaataaaaaaattttagttctatatactggtggtactataggtatggttagtactgaacaaggctatgatgtcaaacctggttatcttagcgagacaattgcgggtattagagatttttatcattataatatgccgcaatttgagattaaagagtacagtgaacttatagattcatcaaatattaatcctagaaaatggctttcattagctttagatattattaaaacttatgaggattatgatggctttgtaattctacatggtacagacactcttgcttatactgcttctgtattatcatttatgcttggtgaactgcaaaaaccagtaattgtcacaggatcacaaattccaatctcaaagatcagatcagatgcaatatcaaatattcttaatagtctaatatttgcttgtagtgatgatatcaaagaagtatgtgtatatttcaatcaaaagctaatgcgtggtaatagaactacaaaaatatcagcaactgattttgatgcttttgcttcaccaaactatcctgcattggcaagagttggtatagatatagtcgttaggcaagaaaaattatggcagcgtgctgatacctttagtcaacctaagttagaaacttttgctgtgccaaagattgctattttaagtgtctttcctggcatgggtaatgatattttagaagctgtacttgagccaccgttacaaggcttaattctcaagacttatggtgctggtaatatgattaatgatccaagtatacatatgacactaaaaaaactaatgatagaggtgttgtgatagtaaactgtactcaatgtttgtatggaagtgtgaaaatggatgcttacaaggctgctagaggacttgttgaagcaggcgtggtttctggttatgatatgacagatgaagcagctttaggaaagttattttatttattaagccagccaaatattacacaacaagatgtcaaagaagcttttaatgtttcattacaaggcgaagtaacgatataacttaaatataaatagtaaaaagcttatacttatagctagctaatactaataataatttcaaggagataaaatgagtgatatttctgagttgataaaaggcaatagagcatgggctgaagagatcaaaaaaacaaatccaggtttttttgaaactttatctaaaggtcagtctccagaatacctttggataggttgttcagatagtcgagtacctgcaaaccaagtttgtggtttgattccaggtgaggtttttgtccatcgtaatgttgcaaacgttgtttcacttacagatttaaactgtttgtcagtgttacagtttgctattgaagtcttaaagattaagaaaataatagtatgtggtcactatgcttgtggtggtgttgagactgttgtcaaagataagagctatggtctaattgataactggctaacgtctatccatgaagttaaagagcaaaacaaacagtttattgaagagtcattatcttgttacaaagataatcaagaagaatatatgaagaaaaaagtagatatgatgtgtgagctaaatgcacttcatcaagcgctaaatctttgtaaaactacagttgttaaaaatgcgtgggcaaaagggcttacctttactatacatgcagctatatacggtattggcgatggtaagctttatgaaattggtggtggtgtaggctcaagagcagagatggatactacttatgctcaagctattaaagacatcaaatctagatattgtagataatctaattctgttgattttttatatttgtcaaaataacttatattatataagtaatatatgactataaacatataaattcataagtgaatgaaattatagtctactaggtataaaagtagtacattctgtcttcttgaactagtttcaggattttaataaagtgagatgctgagataaacatttcctgaactttatttagtattcaatgtgatatttttatctgtagctattatatctatatattaaaatatcaattttattttggaatgagaatatatctaaaatcttaatatctgtttttatttctaagatatccatttgtaaagataatcgtcattataatatcaaagctaactggaagagttgctagagttacatcatgattataaaaagcattgtgtattatagctatagcggttgatataccaaaatatactgcttgaacaaaaagtccttggatacatttaattgctaataacgccaagccaataattccaagaatgtcaaataatagaaagtaagtaatttctattttagtaaaattgtcttcagaggttataaatattgttaataaaacaaaactagagataattactaataagaataatgatatataaactttattatattcagatatacttttagtcttaattgttaagcataatgaaataattaatcctaatacggctatagcaatattataatactcggcttcgagactatagaaatagttaataattgaaaagttattataaagaaaaaatgtactagaaccaataataatacttgtaatatagaacagccaagcatctttgctaaatttcgaacttctgatagcataaattattgccaagacatcagaaagtatatttataagtataaatgagctcattttaattatttatgattaacttaaatgtaatattatcataatgctatgtaatgatatataatgttactgtgaaaatctttgataccttgctaacatcgtttgattaccactgacaccgccacaatgaatatatatgattggttttggtagttggtgatattttgataataaagtacgccaagctatgggatcatagagtaaatcaaattcgatctttgtttctctaagtagttttaggtaaatattgtagttggctatatctaattgaccaaagttatttttaaaatttggtgagataatcttaggatgaactagatcagaatctatattattaaattgttcttttagataatctgagctaccgacacatgggattgtatagactttatatggtagatatttctcaagatataacgctgttgtacctgtaccagatgctacaataacactataatcatcgatattattttgtttgcagtattttttgatctctttagcacattcggcaataccttgctctgcaagagtatttctaccgccttgatcaaaaaaatagagactactatctgtatggtaatttgcttttattttttctaaatttagagagcttaaag

SEQ ID NO: 162 - DNA, 16395 bp, synthetic construct
  misc_feature 1..16395: note = Synthetic
  source 1..16395: mol_type = other DNA
ataaggtttggagaatgaaaaagtttatttttcttttatttattataaatttgtcttttgctcttgaagaaccaaaagaaccttcttcccctgttgttgaagagaatttttcaacagaattgccatcaattcctgatccttttaaggagataaaaacaaattcattttttcttattaaagcaaagattacactttatccttatcaatcggttgaaagggttttagctttttcaaatttacaaatagtagtaacaaacttgactaatttctcaatctatgaggttcagaaaatcgagataaaaaaatggaaggcaaaccatatatcaaacaatatgtatttatttatgccagaaaaatatgatttttatttttataataaaaaggaaccctttgaaataactggaaatattgaattatttaatattctttcaacaaaagaagaaaaattttactcttttttttatgattactggatttctggtaagaataaatattacagatggaaaaattctaaatcggttgtctttgattataatttcactcacccacttgaaaatgttgtttacaaaattgaatttttgtggtgaaatttatgaagataaaccatatgaaaaattttcaggtttttcatacctatgaggaatcaaactgtccatattttaaagactttagagtatgtaaagcagaaatttatttgtatgatgagagtgttttatttgatgcgtattctttgcttttatcagagggcttcaggagaataaaaaattttttttatagaaattcttgtcctgattgtagtgagtgcagaccattaagaatcgatataaagaattttaagcctgataagtctttgagaagaatattaaaaaaaaatcaagatattaaaattgaattgaaaaaatctgaaatagattttaaaaactttttcctctaccagaagtatattgccgagattcacaaaagaaaattgagaccgtcagatttaataagcgaatttgaatgcattcatacaggctatccttcaataatccagatgaattattatgctggcgagagtcttgtgggtgttggtatagtagatgaaactcttgatgctttatcttctgtttatttttactatgatccagatgtgagaaaaagagggcttggttttttcagtataatgaaagaaatagaacttgcaaaggaaatgaacaagagctatttgtatcttggatattatattaaggatgttataaaaatgaattataaaattagatttaaaccttatgaaatttttgatggggaaaaatgggtaaaatatttttaatactgctattttcatttgtaaatctatacagttttgatatagttcttgtaaaatatccgaaaggagattattataatgcaagaaagggggttaaaaattttatttctgaactaaaaaaaagaacaaatgtcaaagttgacgataaaatttatgaattatcacttgatgatattaatatttttgaacattattttttaattattaatgggcatgttcctattgaactttctgaaatagaaaagaagaatcttaaaatttttcttgaaaatggtgggtttttatttgcaaatgatgattatggtatggataagtcattcagaaagttgatgaaagaaatttttccagataaagaattagttaaagttcctttctttcaaagtatttataactgtttttataaatttaaaaatggcattccaaaaatccatgagcatgatggtggtcctccagagggtcttggtatttttataggtaaaagacttgctgttttttatgcttttaatactgatattatggatggctgggatccagaagaagttcataatgatccgttggaaaaacgtgaagaagcaattcgtatgggtgttaatatagttctatactctcttggtttagaatagatagttaattccgcaagatattactggcaaaggatattgattattccatgaaaatgaaagcccaccttctattaagaaggagaaagaactatttcttaaaatatgtattccagcaaatggaataaagttaactccctgttcaactcttccagaactgttaagaagaaaaatagatggatatctacctcttgcacctacgtatacaccgataattttgtataattctacatcaagaaatattgataaacctgtattaaatccctgtgttaaatcatacccaatttcaaacattccactaactgtaaaaggttctatctgactgataattcctttgaagtttaataaggcaccatttatgtaaacaaaagtccctaattctctcttatcatctaaaccataaccgctgtaaatagaaaggttatttaaaatagaatttgtattattaatatcataaagcacagagatattaaacttatttttaacaggaataggtgacactaaagtagaggcagcaaataagaaagctggaaacaataaaatgactaaaaatttattcttcatcaaccagtttatatcctataccaaagactgtttttatatatttgggctttttacctgtatcattgagtttttttcttatagaaactacgtttgtgtcaattactctttcggttatgtaagtatctccattccagacttcatttataatatcttctcttgatactacttttcctctgtttttatagagaagttgcaaaattccagcctctttattggtcaagaaaatttcttcattgcctcttttaataataagtctgtcgaaatagacttttgaatttccgattgttccagaactatagtctgtatctgaatatattacggctgctgattgatcttcttttttgagataagttaactttcttatgtgagcttttattcttgctaccacctcatgttctgaaaaaggaatctggatgtaatcatctgcacctatattgaaagcatagattttgtcctgaatgttcccagaatccgatattacaattatcggtatcttgaaatctgtttttcttatatcagagacaagctctatattattaatatttgagaagagaactatagctgaaaaatcattcttttttatgagatgcagtaaattatctgaactatctacctgaacatcataaccttcatatttaagctcagctattagctcttctgcttcatcttttttagattttattatgagaattttattcatacacacctcctcctatagtataggacagaaaataagctatttaaatgttaaacaattttttaatatttgtcaagccgttttttttaaaaaagtttaatttttgcaaaaaaatatgttataatttaaatagggagtgctaacatggcgatatttttttataacagtctgacaagaaaaaaagaagaattcaagccaatcaaagatggcgaagtaagaatgtatacctgtggaccaacagtgtataattaccctcatattggcaacttgagaacatttatttttgaagatttgcttcacagatggcttgaatacagaggttttaaggttattcaggtaatgaacttgactgatgtagatgataaaacgattaagaactcgatagcaaagaaaatgaccttaaaagaatatacagatatctataaaaaagccttttttgaagatattgaagccctgaatattaaaaaggcaacatactatccagctgcaacagagtatataaatgaaatgattgatatgataaaggttttaatggaaaaaggttatgcttatgaaacaaacgatggaatctattttaagatttctgaatttaaagagtatggtaaacttgcacatcttgaaaaagatgaacttaaagctggagcaagtggcagagtaagtcttgatgagtatgaaaaagagaatatttcagattttgctttatggaaaaaatggactccagaagatggaaatgtaaaatggaattctccttttggagagggaagacccggctggcatatagaatgttctgttatgagtatgaagctacttggagagacttttgatattcattgtggtggaattgacaatctctttcctcatcatgaaaatgagatagcacagagtgaggcttatagtggtaagaagtttgttaactactggttgcattctgtccatctgatagtcaatggagaaaaaatgtcaaaatcaaaggggaatttttttactttgagagacttgcttgcaaagggttattcgccaagggctataagatatgccttgataacaactcactatagaaagcctctcaattttacttttgacttacttactcaggcaaactcatcacttaaaaggatagatgattttatattctctttaaagaatgtaagctctactggcaaaattgatgattttcttgataaagttcttattaatcagattaaaaaatttgaagatgcgatggatgatgatttgaacatttctgaagcaatggcagcaatttttgagttgataaatagttattatgaaaattttgagaagattactcgagaattagccaataaagtcattgatacatttattaagtttgatactgttcttggatttatattctttgataaaaagcaggatgaattgtcagaagaagaaaggacattaatagaagagcgaatcaaggcaaagaaagaaaaaaattatgcaagagcagatgagataagaaacattttgctttcaagaggaattgaattacgtgatacaaaagatggagttgtctggaaaagaattaaataaaaaattattgttgttgagacttaaattgattgtttagccatttttgttttgcttctgtttcagatagagcctgattcatctttccgtattttcttctgagttcaagttcatagtcagaaagttttgctgtcatctcttctacatctttttgtttgtcttttattcttctatcgtttgcggttattctcatttgagtaaaactaccattacctattgctacccttaagttttggtttgcacttacagctacaccactttctttaacaagatctccgtcctgatcacttgcaaaaagctcttcaacaccgtcaagcctggattttaaaacacttcttaatttttcttgatcaacgtttaaaagtcccatttttgcactttcccattcttcggagttagccacgaaattgcccgttctttttgtatatataccaatctgttcaagtacagctatttctctctcatattttgtcttataagaatttgctgcaacctgtcttaacttatttttgagagaaataaagctattttcagcctgaaaaacccctttcttaagattttcctgatttctttcatgaagaggtgttttgtcaagatttggttctgttactatatgcaaatattccattgcctgattgtaggcatttacccagtcaaggatagcttcttcaattttttgataattataatccacctttactgtaacaggataatctgtttctctttttaaattaagtgttacaccatctataacatcatcaatattattatttttcctttttattttaacaccatcaagttcaaattctgcatcgcttgcttttgtgatataatttttgggtgtgaatttttcatcatcaggggtgctgaatatttttatatttgctatttttacttctttgtctgtattttgattttcgagtactattttttctatctctttattttttggtaaaccaaaggtataatttgcatttgagataaattgatagcttccttttgaaccgtcagaatagattattgtgaaaaagtcagtaaaattggtgattatttcttttggtttttcttcttcggttatgtccaaaatgagttttccacctccgactattacattgctaacagcaacagattccataagaaccaagtctccattgccatttgtgaaaaatgttttttcttttttatcttctgtgaaaatattgaattcaacattcaaagaaagaaagtaattttcttttatctgttctttcacagatttttctatttttgaggaaggagtcatagatacggcattttttgttattaaaggttctccagataatacatttacattgtcaaagtagatgtttttttcaaattttttctcatcggatttttttaagataccgatgttaagcaatgtgtcgagtttgccagaaaatgtgattttattttctgctccagtatttttcccggaaattactaaaatagcagtagtaggagtgtcatttactattcttgtttctaaaatttctggggctgcattttttaaaatttcatataaattatatatcgttccacctttgaaagttatttttatttcatcttttccaatctttattgtgaattcagatggtggaagaattttgtttctttctacagggtcgctcataaaagaatcgggttttgcaatttcatttattttgatcttgtaatcctgttttttagcctttcttgaagcaaaaatttctattatattttcatctggacttatgccttgcatttctttaaaaggggtctggtagtcataaagtctctttgatttatcatcaagatttctcaagtattttactatgtcttttattatttcgttttctatcttgtagtcttcaatttcaagttttttcttttcaatgggtagttgtttgacgtataaaagtttttgtatcacatcttctgtgtcaaacttttctttcattccgggaagaggaacatatacttttgaacttctttgtcccgacgttttctgtgattgagaaaataaagaaatgacaatacaaaagataagaaatattaaaaaaattttcttcatattttattataccacatctattattaatttcggaaatttttaaaatttaataagagatgcggtaaaaaaccgcatctctttttttatttactttaaaagtgccataatagctggagcctgccctgcactacctaaaacatttttgttctttgcgatatacatttgctttaatgcttctcttgcaggaccgagatattttcttggatcgaattcttctggctttgtagcaaaaatttctctgatttttgctgtcataacgagtcttccgtctgaatcaatgtttatcttacatacagcagatcttgctgcttctcttaattgatcttctggaataccgatagagtcttttaattttccaccgtatttattgatagtttcaacagcatcctgtggaacagaagaagaaccatgaagaacaattggaaaacctgggattctcttttcaatttcgtgaaggatatcaagtcttatttctggcttctgaccgggcttgaacttataagcaccatgagaagttccaatagctatagcaagagaatcaacacctgttttctttacaaaatcttcaacttcttctggctttgtgtaagaatggtgttcagccttaacatcatcttcaactcctgcaagaactccaagctcaccttctacagtgacatcatacttgtgtgcatattctacaacttttcttgtaagctcaacattttcttcataagagaggtgagaaccatcgatcattacagatgaaaaaccgctgtcaatacaggatttacagatttcaaagtctccaccatgatcaaggtgaagtgctataggaatttcacccaggcctttttcttttgccattcttttcatcatttcaactgcaccctgtcccatatacctgagcaaagtctggtctgcatattctctcgcaccttttgaaacctgtaatattacaggcgattgtgattcaagacaggcagtgactattgcctgaagttgttccatattgttgaagttataagcaggaacggcaaatccgttcttcatagcagcttcaaacatttttcttgtgtttacaaaacctaaatctttgtaactaaccatatctaaactccttaaaattatttttagagatcaaacagccatctggcatttttgtaaaatattaattcttctattgaataaccaagatctagtgattttattttttttatcatatttattgctctctcccacggaaaatcactaccaaaaagaatgtgatatgggctatgagcaaatatcaattctttcatctggtgattttcaagctcaccacaaaaggatgtatcaaaataaacattcataagaccaacaagggtatttccaacctcatcccacattttataaccacccatatgggcaagtattattttaagattctttatttttgcgacttctgcaaacctttttggtgttccatgaacagttttgaatgaaatatctttacctgcatgaaaaaatatgaatagtccatatttattgcatttttcatatatttcagtcatttttgggtcatcaggataaaaacattgatattctgggtggagtttaattcctttcaccccatttaaagttaaaaattcaatctcatcatcgagttcttcctttgatagctcaggatgtaaagcaccaaaagagataaaatttatatgaagtttattccattcaacaacttttctatttatacttttgacctgttctggctttgttgcaacaggttgattcatagaaaaatcaactccatcttctttcataaatgttaacaatgaatttaatgttccattaccataatatgtaagttctccatgagataaagatttcattgcattttcggctatattatctggaaatatatgagtatgaacatcgattattgtcacttttttatcctctatcttcctttcttatatatactcttggtactctttttgaaacattacaagttacttcataaggaattaatgaacaaattttagcaaatttttctacgctcataaactcattaccaaaaattatcacttcttcgccaatttttatatcttcaggcgattctccaagagaaaccattgtgtagtccatacatactcttccaaccactggatatgctttgttttttatagtaacataacctttgttggagtaggttgtaggtattccatcagcatatccaacaggtaaaacagcgatatattctttatctttctgaatcttataggtgcgtaagtagcttacggtttcatcttttttcatttttcttatttctattatttttgtcttaagttgcattgagtttgttaattcactatttttcgttgttgaatatccataaatcgcaagtcccggccttaccatattaaatggagcagtagcaactccttctatattgaaaattccagcactatttgcaatatggaaattctttatttttatatcaagcctttttgtttcttcaattatatggataaaactatcaagctgaaattttgaaaattcaatatcactgtctgccgaaggaaaatgcgtaaaaataccatcaattatcataccatttatgtttgaaatttgttctatttcaagtaaagcattatcaaatgggacaccaagtctacccattcctgtatctatctcaatatgaacctttggaaacaaacctctatatctataattctcagcaagctcttttgcgtaattgtaattacttactacaggataaatgttaaattccattagcttgctgaattcattgggttctactggcccaaacacaattataggaatagttataccatttgtccttaattcaattccctcatcaagcgttgcaactccaagataagtaatgccaagccttgtgagttcctgtgaaatctgcactgctccatgtccataagcatcagcttttacaatgcctattatctgaatatcaggatcgcacttttctttgatttttttaacattacttcttattacatcaatatttatctcagcccaagttggtctatgagattttgaagaatacattaaaccccctgtaaggtttactgactttattttaatatactataaaatttaattttatacaagttttttggttgataaattagggttaaaatctgttttcaaaaatttaaaattttattcaattaatctttacttgattctttaatttgaaaacatttattccgataaaattcaatattttaaaattttataatgggggaagtaaaatgaaatttgtcgtttcaattgatcagggagcaaaaaataccggtattgttatagctgaaacagagaaagatagcttaaagaatgttgaaggtaatgttattgtaattgatgaggcaaattttaagttatcacaacttgacagaagaacaaaaagacatcaaagaagaggttataagagaagaaaattagccaaaagacttttaaaattaatacttgaaaaagaatttaagtgggatttttcaaaattaaacaaagcacaaaaagacttcatttttggcttaataaatagaagaggttttaattacatcattgaggatatgaatgaagatattcttaataattttgattttttagattttattgttcgtctttttccagaatccttaaacaaagaggaaaaattaacagagcagattttgaaaaatagcagcaatccagactggttcaaaaaaattgtagataatgaaaattcaaaatttcttaccaaaaaagattcaaaacaatctgaaagattaacactaaaagaatattgccaaaaaaacaattttgaatattctgaagaacttcaggatttttatgatgaatttgtagacacaatttctcaattttacaacgaaatggttggtggtgcaaagccaagaaaaaaatattttgaagaaataaaagctgtaatttttgctgaaactcctattgatgatttatttaaagataattttaataaagataaattcttcaagcttgtagcacatatcagtaattttcaattgcgagtattaagaaaatattttaatgatgagaaaatgaaaaatggtgattattgggatgaaaagaaacttaaaaaaataattcttcgtgaggtaagaagctggcatacttctggaaacgaagaactgaaaaatagaagatcaaagttgataaaactgttaaaggaagataaaagtttattagatatatggtttggattagatccaatagagacaattcctccttatgaggatatgaacaatagaaatatacctgattgtcaaacactctatttagatccacaaaaacttagtgaaaaatatggaaattggaaagaaattgttaataaacttcttgaaaaagaatcagattctcatataaaagaaggcttactagaaaataaatgggtttctcttgaaaaacaaaaaatttcagatgatgacaaacttgccagaattttacagaggttttttgatagagtaaaggataaagacccatacaaattcagacttttgtcattatcaaaagataaatcaacagaagaatataagaaagcaattaattctttaaaacaaactataaataatgaaaaagatgttgaactattactttctatagccagaacttactttgtagaacaggaaaatgcaaaaaaaggcttgtgggatgcaaataatacaattcttaagaaatgtaatcttcatacaaaacataaggcaaacttatcccatattattattggtggtatactcgatgtaaaaatgaatcaagatgaagtcaataatttttataactttttaaagaatacaaaggtgaaaagaaaaacacttatgggtattgcccatgattgtagtgagcttgttaagaaggaaggtaataaattaagggcaaaacttgaaatggcattgaatgatgaaaaaaattgtaaaaaattagaaaaagaacaaaacggattattatcaatatataaagatgttattgaaggggcaaagaaaatttcagaatacataaaaaaagataatcctgatagatattcggatatatggagttttgctcagatatacaatgtacttgaaggagataggcatggtttttcaaaaatatgtgaaatctgtcatgaagaaaatgctttcaggtcaagtgagtttgataattcagtgatgtttacaagactctttgctgatagcgttcgaccttttgatggtgttgtagatagacttgttagaaaacaagcagatgttatttctaaattaatacttgaaaaattgaaaaataaaaaagttaaaaaagatgaaaagatagagataaattttatagctgaacaaaatgagttttcttttgaagaagaactaaaaagtataaaaggcaagccttcaaaagataaagaaaaatttgatgaagaaaaagcctttaatagcaagattgaaagaataatgagatttaattctctctgtccatatactggcgatccaattggtgaaaatggagatatagatcacattttaccaagaagctggacaaagaaacaatatggtgctgtttttaatgatgaaatgaatcttatctactcatcagtaagaggtaatagagaattaaaatcccgaggagaaaatggtctatgggaatttgatgaactatcaaactcatttcttaatgaactatatggtacagatgataaaaatgaaataaaaaaaattattactaacactttgactaagttaggtattttagagggcacatataaaggtaaaataatattttcgaggcttgataaagatactcaaagagatttaaggatagctctttttatcccagaatatagagaattacttgttaattatttaaataactctcttgcagcaagagttaatggaacacaatcgtatttattgaaactaatagtaaagaatataaaaaaagaatactcaaaagttagagtaaatatttcaaaagttgatagtgaattaattcaacaattcagaaaagatttggttacgggaaataaagagctaactaagaatagagaaggccagagtttatatagccatgttgtggatgcttcaatagcattattctttaatgtcgagagtggggattttaataaatgtttaccagaaggtataaaagttatagaggcaaaagccttgagttcaatacataaactcaaaaagaaagacttttattcgacaagtgtattcaaagatggaatatatggtgaaaaatttgtgcctgtaatattgtataaagaaaagctatattttggttttgacacaaaaaattgtgtaatggttaaaaaaaatgaagaaaatatcttcaatctgatttctccatatttaagatatagaaatggaaaaagttttattgacgctaataataaaaattttgatgagtggaaagaaatctcaaataaaatccctttaagattttttgtgaataaaaccaaaacttttgatttttttgcaaaaattgcgaaagaaccttttaatgaaaatgaaaaagccatctttaatattcttgaaggtttgagatacacaactcaaaaagttgaacttttatcacttcttacgaattcggataaaaaaaattatcttactaaagatgaaatctttgaatctgacaacttcaaaataaaaattttcaacaaagaattaacttttcctggaaggaaatttatagaaaatatattagaaagtaatgaaataaaagacaaacttggaaagccgattaaggataacaaaattgatattgatattataaaaaaatttttcaaaaatctctatggtggtaaatctattacagacccaagagttaaggcaagaaaagtcttttctgtaaatgtaataaaatcaccaagtggcggtttcagaataaaaagaaaagatttatatggggcaaaaacttatcaacttgtagaaataagtgatagggcatcaattggttttgaaattaaagatggtaaaattgataaagaatcttttgtattacatcctgttttgtattatgacaaaaatatagttcctgttggagaagtttataaaccttatccagaaaagtatgtgccaatggatgaatggagagagattgaactcacagataaagaaaaaagttatattaatagattatggatttgtcctggtacaaaaaatagatcttactatagaatacaactttctatagaacaatttgtaacaaacttgcttcctggaatagatgaagaattatgtaagattttggaaaataacaaaggaagtatttatcgacttttaatacctttagttaagttaaatcttgataatatttatttcttaaatgatgaagaaattaaaaagataattttaggaccaagatcagacaagaaagatggagtaagatatggaaaagtaaggattatagaggcaaataaagataatgtattagttgaatatgaagctaatggatttatgccagaggaggcacagagaaggtatgtgaaagcacaaaaataagggggttaagatgaaacatattcttattacagattatgctgaggctttaaggcttgatcataatatgcttgttgtgtggcaggataaggaaaagaaactcgaatatccactttcaaaaattaaaacaataactatatgcagtaaaggtgtaagtttatcttctgatctcattttgcaatgtgcagaaagaggaattaagattttctttcttgatttcaggggaattcaagtagcaggggtttctcctttgaataatcattcgataagccttgtaagaaaagcccaattcaaatttgttgagtctgttgaagcaagagaagtcgcaagagaatttataatagggaaaatacataatcaggagagtgtaataaaatattttgccaaatatataaataggagtagtgaagaatacaaaaaagaaataataaacaaaggtttaactgaaattgaaaaaatattaaatgttcttgaaaatataaaacttgatagagagaactggagagatataattttaggtctggaaggtaaagcagcagacatttattggaagacattgaaagaaacaaatcttttgtcatctgacttttatgaaagagagggtagaggtgcaaaaacaatttccaatcaagcattaaattttggttattctatacttttttctgttatatggcattgtgttgttaatgcagggcttgaaatttatgaaggtattcttcacactttcaggccaggaaaaccagcacttgtgcttgatataatggaagaatatagagcctgggttgtggatagagtgataataaagttcagaaatttttttgataaaaaaacagaacttgatagggattgtaaaaatttgattttgactgaaatccataagacaattggcaaaaaatatccttatcataataaaagagttaaactcgaaaatattatacaaagacagatttataaactttcagcgacttttcaaggagctaaaaaatacaaaccttatttgttcaggtggtaattatggaaatagaaaaagaagtcttaatatgttatgatatagaatcaaataagaagagagaaaaacttcgtaaagaattgaaagaacttggctttgtgtctattcaaaaatctgtaatgtggggatttgtttttccagcagaaataagagctgcccaaagaatattgaaaaaatatgttaatgatgagggtgactgtgccttcattgtaaatacaaaactttcagaagatgatctttatttccagattggacatgaaaatatgtttaaaaaatataaggagccgtatcttgttgtttgaaatacctataagtttgataagacagtatactttttgtccaagaataccatattttattttacttggttttggtcatccagcagaacctctctgggtaagacagggtagtgaacttcataaagaatctgtacacttatttttaagaagaacattggtaaagtttggacttgaaaaagcagagaaaaaattttatgtaaaagtttattcaaaaagatatgggcttattggagaaatagatatggtattaaatgatggaaaatttatttatccagtagagttcaaaacatacggtcataagccagaaaaaagtcatattttacaacttacagcttatggaatttgtcttgaagaggtgacgggattatcttttaaaactggttttattgcttatagggatcaaaataaagtgcatagaatagatgttgatgaaaaatatagatttaaagttataaaaataactgaaaatatcaggaaagacttagaaaaatgcattcatcctgacacatcagcaactgctaaccaatgtgttcagtgtgaatggataaatttttgcaatgataggttataaaataaaaaaaccctccatgctcggcagagggagggccacatcgtgcttttaatgatttcagttcatcgaaccagatattttttcggaaaaagttcgcaaaaaattaacttttttatacaaaaatagatttgcgaaaattttgttaaagtaaatttttttaatttattgttagactggacattaagcccagcctaacaataaaaacttaatggttctgagaactgaaact

SEQ ID NO: 163 - DNA, 16695 bp, synthetic construct
  misc_feature 1..16695: note = Synthetic
  source 1..16695: mol_type = other DNA
tgggcgcgggtttaatattattatggtaaattccttgcgtgcaagcggtgatgcgcgttttccttttattgttggtgcgatttttatgtggggcgttagcttgcctgtggggtattatttgggcatagtttgtgggtatggcatagttggtatttgggctggattttgctgtgatgaatggggtagggcgattttaaataccttgcgctggaaaagtggcaaatggaaaaataaagcccttgtttagctttaaaattttaatgttttgcgcgctagattgcgatttgttagggctaggcttatgccttcgcgcaagccatcatctattacaataaacggcacatttaaattagctaaaagctcacccagtagcaaaattcccccaagcactaaatttgctctatccttacctactaaaagttctggcgagcgcgcactagcaattatctgggctgatttttctaaatcagttaaacttaattttatgccattaattagcctagcatcataattagcatagctaatccttttaagcacggctgctacgctagttggcacgcctgatgtgagtattacgcattctaaatcaaagctattagcataatttttggcctcgctaacgcaatttttggctaagtttttagcctttaaaagctctttattttgtgggtttttgcttgaaaaagccttaaataaatcaatatcaaaaagcgcgttttggctaaaagtaactatgccaaaatcaaaacttttaaaatgtgcgttgtttgaaatttccgtgcttgcgccacctaaatcaacaaaaagcgcgtttttaaaatttatgcctaagatacacgcgcgatttgcgataccttgtcttgttagcgctgcttcggtgctagcattgatgatattaaagctgattttaagctcgtttttaatttctttaaaaaaatccttggcgtttttagaaattctaaaagcttgcgtagcagcgccatagtaataaattggcattattgtatttgaaattttattaaaatttttgtagggattgctagctaagctttggcttaaatgctcgctggtatttttaaaaaaatcatcaagccaggatttaagctcggccttaaactcgccaagagcttttttaatgcgtgctttggcatcatctgctaggccgttttggctaaggtttttagctgagcctacaatgcgctcaaagctaaataaaattttttcatcttgatttattatgcaagctcttagcgtgtttgagccaaggtcaatgcctaaaaataaggcttttttatgcgcgtttgctcttgcgttaatggcgattttttgggcattttctatggcaaggcttttttgctttgggcttagatttttaaaatttgcgctgtttatatttatgctaagttttttatcgtagatttttagtttttttgctttgttaattagcgcgctagtatttaggccaagccactcttttaatggcattttaagggctaattttaataaatttttagtgcttttgctttttaaaatgggctgttttagcgcgctttcatagccttttattatgttaagatttggaaatttcacactcaaatcatataaaaaacaaagcggattttgcgtgattttatggtgagcgttggcggttttggcaaaatttaatggaattttaacgccaaagattttttcatctaaattaagctcttttaaagcttttacgcctttaatataatttttagcattaaaaaatttataaagctccattctaatgcgctcgctgcttaaatcgctaatatcaatttggcgcattatttgaatgctttttgcatctatgttaaggttaaaacgcgaggcaaattggatcgctctaagcacgcgcaggctatcatctttaaagcttttttcatcaacgatttttaaaattttatgttttagatcattaatcccatcgtaaaaatccagcaactctccattaaaaatatttaccataatggcatttatactaaaatcgcgcctagaactagctttgcgctcatcatcgcatacatttacgctaaaagccttgtggcctaggccgtttttgctctcaactcgcgccaaggctagatcaaaatttcgccacttatacacaaaaaaacttttcccaacgcccaaaccgccgtgcttttgcataagattttcaaaatcttttgggctaatatcgtaaatttcgatgtcaaaatcaacgcattctatgccaagcaggctatcacgcacgcatccgcccacaaaataggcgcgtttagtgtgtggcaagagtatgtttaaaagttcgccaagatcgctattttggcagattttcaagtcggttttgtatttttgcaagtaaaaattccaaaaatcttatcgttaaatctaagcgcacggccgtgttttcatcatttgcgttaagccctgcaaaaagcacttcaatacgctcttttaagtttattaaaaattcttgctcattatctggctcttggctttcttgcgtggctggattttgctgtgatggatttaatttttgcgtatttgcttgggcgatggatttaatgggtttggcaccattattttgagcgtttgagctagcgttattttcgcttgtgcttataggctcgctgatattttgagagttattttttggatttgtttgatttgaaatttcatttaaaggtggagttttagcatcttctaagatgccattatcaaactccgcgcttatttcttcaatagctaattttgcgatatcttctatattgctcataaactcaccaaccattttttaagcttttgtatatcatcatcatttaaacgcaaaaaatgcccgagcatagcgtggttgctatgctgcgcgcttaaattatctaagttttttttagccacggcattatttggatcgcgccttaatatatttttataaattagcaaagcttcgttaattaagccttgcttttcatacattaatgcttcacagattgtgttagacataattaaactttttgaatgtaatcgctaattattgcgcccatttctgatgtggtgcatatttcttttgcatcgtaatttgctaaatccttggtgcgataaccatcttttagcacggcagctactgctttttgtatgcattgtgcggcttcttcttgtgctaatgcgtagcctagcatcataccagcacttagtatcattgctattgggtttgctatgccttggcctgctatatctggtgctgagccgtggataggctcgtaaattccaaccttagcgccaattgacgcgcttggtaaaagtcctatcgaaccacacaccatacttgcttcatcgcttaaaatatcaccaaaaagattttcagttaaaatcacatcaaattgcgatggattgcggattaattgcatcgcggcattatctacatacatatactctaagcttacatcagggtagtttttgcttacgcttgctactacatcgcgccaaagctggctagtttctagcacatttgccttatcaactaaacatagttttttacggcgtttgctagctgctacaaagcctacttttgctatgcgctcgatttcttctgtgctataaaccatagtattataagcgtgggtttgctcttttgcccttggggtgccaaaatacaatccgccagtaagctcgcgcactattaaaatatccacgcctttaatgatttgaggttttatagtgcttgcgtttattagctcatcaaaaattattgcagggcggagatttgcaaaagcttctaagctttttctaagttttaataatcctttttcagggcgaatggctggatctaggctgtcccattttggcccaccgattgcgccaaatagcacagcatcgcttttaagggctgcatttagcgtttcatcaggcaaaggctcaccaaaaacatcaattgctgctccgcccattaaaaagtattcataatttaagttaaaaccaaaacgagaacttacgctatcaagggcttttatcgcctcgtctgtgatttctgggcctataccatcgccttttattacgcagatattatatgtttgcatttttactccaaatttaatgatttttttgcataatttatcaacccgccagcacgcacaagttcttgcataaactcaggtataggcgcaaatgtgtagctttcatttttgctttcattttttataatgcccgcatttaaatctacgcttaaattatcgcccccactgattttatcggtatcggcacattctaggattaaaagcccggtattaaagctattgcggtaaaaaatcctagcaaaacttttagctattaccacatctatcccagcagccttaatggcaattggcgcatgctctctgctgcttccacagccaaaattttcgcctgctacgattatatcacctgcgctgatttttttgctaaaatctttatcaaaatcctccattacatgagaggctaaatacgaagggtcgcttgtatttaaataccgcgcagcaatgattacatcggtgtctatgttatctgggaatttccaaaccttatgagcgctcatcttagatccttagaataaaaaaatggcgagattttagcagataaattttaaaataagattatttttatatataaaaatgttataaaaatattatattttaaaatttgcgtcttttactatttttttgttattttttattaaaaaaaagttttttaataaaaaattaaagtctttttggttagcattcgccctttaaatcaccactttataaaattaaggcgtatataatgaaatcattacgaactcttttgctctcatcaacttttgcgagcattatactagccgctcctacacaagaagtagatattcaagctctccaagagcaaataaatgctctccaagctcaaataaacgagttaaaaaacgctcaaaatgacaaaataagcaaagtagagctagacaaagaaatagacactctccacgagcgcgtagatgaaaatgaattacaaaatgcgcttaataaagtaaaatttggcttagatttttcaaatgccgtaactagcctgcgcgctactaatgataccgatggcacaggtggcaaaagacataataatggcaaattcgccacagaattacatttaaatatgaacgctcacatcaacgatcgcacaaaatttaccggtcgtttatctatggcaaaatattggggtaatttaggcacttatggtggcgtttatgattttgatggtggtagagatcctaatggtaactcagttttatatgtaagcagggcgtatttggattatgatattattccaggcactttaacagccacagtagggcgtcagccagccaccgatggcccaggctcaaatttacgcaataactcagttagaatgagcacttatcctgccttgctagtaaatgctatgagcgatgctattgtttttacatataagccagaatctctaagagattataaatttgcttctcgccttggttatgtgcgtttttatcaaggttcagagtttggacgctctgatggtagaagcttgcttggcgtaagcgataagcaagatggcaccgtttatatggctatggcagaagcacagttgccactaggcgatatgggtaaaaacttatttatgcttagttatggacatgttgaaaattactcatcacctctaagagcagaaatgctaggccataccgtgctaaatagtgtgtataatattggcgattttgatgtggctaatttacactttgaaaattacgaaacctttgatactccgctttcttggtttatttcagctagttggcataaaggcaaaaatggtacagataacacgaaaaaagccgtggctgaggccatagattcaagtggtggccaaaccttacagcaactaaaactaataagtgctatggctggcgatatggctacatataaggcctatgaagcttatggcaatatgatggaggcgcaattaacacaaacttttaacaaagcattaaaatggaatgaaaaacattcttgggcggtgcatttgggtgctagatatgattttacaaaagaatttaagcttggtgctgagtttttccatggtagtaaatactggtattctatgagccgtactggcattagcgatccgctagattttcgtaatactcgtggaaatgtctatgatatttatggaatttggcaacttgatttcaaccaatatttgcgtttaagctttactcatatagattatgattacacaaacaacggcagaggcataggcggtactgaaaaaacaaatgatagagcagatattatatctttaatgtatgatgtgagattttaatggcgggagtgtctatgtttaggaaatttttattattaggttttgcgcttattagcttgtcatttgggataaattgcgaggcgcttatcgctaaatatgacgcgccagatccttctacaaaaacaatggcgcaaatttctcgttggatagagcgcaaggtgggcgataatccagccgatgcaaaagaattagaatcttgtctaattgcagaagcagccgacaatcctaataaagagcaagtagcaggcagatagcaacttgctatcttgctagattagtaagtgttttattcaaattatttattttatttttgctaagcgtttaaattgcaaccaggctagttttgctagcctaaaactcttttattataatttttatcaataaaatttgcatatccatttttaatacaaatattttatgttacaaaaaattaacaatcaaataattagcttaaattttaaaattttaaagcatttttgggctgtggtgcgttttgtgtgctaaattttaatttatgtttttaaaatattttggtagtgattaaggtttgttagctgttttgacagttaaattttattagtaaaaatactctcttggcttaaagcataaatttcaagatttaaatttttaaaatttagcccttaatttttctttatctaagcttagtcagcaaaatctctaatgtgattttattttatttttacaaaaattattataagatttcgtttttttaaggattagagatgtttgatgaaatttttgaaggctcattaaaggataattgctttgatgtgctttttgctgctaatcgtagcgttacgcagattgaattagagcgtttatttgctgagctagtcgcccttagagaattaagcgcgcgcgcaaatgtaagcaatgaagaaataaataattttatttttaataacaacggccagatggagcagggtttaagcgatttgtatatcgagcttacaagttcaattttaagccaaaatgaataaaatcaataaaatatttttgtgcgctttttgtgcgcttttttggcttagctttttaagcgctagcgagcctgagtttgcatttgagcgcatttttaaattgaaaaaagatgaaaaagcttatttatatatcactgaaaaaaaaacgcaaattaaagaaattttcgagttttcttggaccttatatgatgggttaaatctagtaacgcacactaaattccgcaaatatccacgccaaataatgctttctacgcgccgcgcgttatcgctgtatagccaaagcgttttgcctactatggctaatccttacacagatgaagtgcgcgtgtatttagagtttgtgaaatttcaaaatggcagggcgtatttaaagctattagtgcgcgatttagccaaaagagtggatttagaataccacccactatatgagctaaatgataattaaaccaaaagggagaatatgccactacaaaaaataaacgcaagaatgcaagaaatggtaaaggatttagcttatgagcgtgctagcaagatgtttgctagcttaaatagtggcaaaatgctgcgctcaaagcttgtgctaaaaatcgccggccatagcgataggactattgatttatgcgctattattgaattgattcatcttgcaagtttattgcacgatgatgtgattgatgatgcgatgctaaggcgcgctaagcctagcataaacgcacaatatggcacaaaaaacgcaattatgcttggtgatattttgtattctaggggctttatgcaattagcaaattttaatccaaatattattattgcgatctctggggctgtttgtaagctttcagtgggcgagctaatggatgtggatttaagtcaaaatttcaacgataatctccaaaaatatctacaaatgatagagtataaaacagcagcgctaatccaagctgctagtagctcagctgctatgctagcagggcttgatgataaaccctatgaaatttatggtaaaaatttaggccttgcttttcaaataattgatgatattttagatatcacaggcgatgaaaaaagccttggcaagcctgcgatgaatgattataaagagggtaaaaccaccttggtttatattttattataccaaaagctagaaaataccgataaaatcaaactaaaaagcctatttaaaaaagaattaagccctgatgaattagcctggctaaaagataaaatttcaaagcacaacataataaatgaatgcaaaaaaatcgctcatcaatacagccagctagccatacaagccacgccaaatactgagctttcaagcattgcagcagatatgataaataggagtttttgatgcattatcttatcgctagctggacgcataaaaatacagatattaaattgcgagaaaagcttgctttaaacgatgagggcaaacaaaaagaaattttgcgtttagtgtgtgctaactcaaatatcagcgaagcgatggcgctaagcacttgtaatcgcgttgagataatagtttgcgctgatgatattaaaaaagctacaaaacatatttttaattcactttctcttttaagccaagttagcccgcaaattttacaataccgcgccacaatttatgaaaatgaaggcgcggtgcatcatttgttttcggtggctagttcgcttgatagcttggtagtgggcgaaaatcaaatcccaggacaattaaaaaaagcttttaaatttgcttataatagcgcaaacgcggctggggaaatttttagcttaattcattttgccctaaaaacagcagcgaatgtaaaaaatctcactcaaatatctaaaaatccagtttctgtaagctctgtggctgtgataaaagctaagcaaatttatgagcaaatcaataaaagcttaaacggcgcaaatgccctagtaatcggcgcaggacaaatggcaagcttggtgtgtaagcatttggtagcaaataatacaaatatcacgctagtaaatcgcaccgcacaaaaagcgcaaaatttagcacaaaatttaaatggagttattaaagtagaggatttttcaaagcttgatgaattgcttaattctcacaggctaatttttgtggcaacttctgcttgtgaggctattattaaagatgaattaattaggccgtgcgagtttaggcgatatatttttgatatttgtgtgccaagaaatgtggcattaagcgagcaagataatgtagaggtgttttttgtagatgatttagatgagattgtgcgccaaaacttagaattaaggcaagatcaagcaaatgaagcttatgccatagttagagctggcgtggtggagttttataaatggttaaaggctaaaaactcagcaccagccataaaggccttgcgcgataaagctaggcaagtttgcgagcaagagctaaaaatcgccattaaaaaaggctatttgaaaaaaagcgatgaaattgaagctaaaaaattacttcaccaagcatttaaggcttttttgcattctccaagcgtggcgttaaaaacgctaaatgataaaactacgctaaatgcgctagaaacgctctttgatataaaaattaaaaatgatgatgaaattgtttgattttaaaatttgaaaggataaaaatgaaaaaattttctatcaatgtagatatgggtgctaaaaataatggcgtgtttttagctagcgtagaaggtgctagcgcaaaaattacgaacaaatcggcctttaatattaagattgataaaggggaaaattttgtgcttgatagggctaataggcttgctaaaaggcatactcgccgctcttttgatagagattgttttgttttgcgttttgccgggcagatttttgatcttgataaattaccaacaagaaaagaacttttagaaaaaatagaaaatcaaaaaatagagtataaaaaagaattaaaagaaccaaaagaattgatttttggcctatttaaaaatcgcggttttaattaccagaatataaagattaaggatgaagtatttgatgatgaaaattttatttgtttgcttgaaaagtttaattgtttaaaagaatatggctatgaatttagcgagtgtagatgcttggaggattttgaaaattttataaatcaaaaagccgatgaactttcaaatagcaatagttttaaagatgatatgcttaattttttaaatgaacaaagcaaaattataaatgatattaaagagttttatgatataacaaataatttaagcgataaggtcttaaaaaacaacgcaaaagccatagagatagcgcaaaaagaaataaatgcgcttggcaatgatgatgaaaacttagcaaatctacaaacaaaactagaaaatttacaaaaaaactatccaaaatttgtagaaattttaaaagataaagaatttatagaaattttaaaagttaaagatgaagataaagaatcagtcttaaaaaaatttgtgaaattttttaacgaattaataaacgccgcaaaaagcgaattagaacgcaataataagcaccgcaaagcatatttaaaagacataaataaagaacttaatagtagtgataataaaattttagcttgggagtatgatgaaatttttaataatttgcgcgataaggttgagggcaaaaaatggagcaaggatgagttttataagtttgtaggcaatgtagcaaatatccaaactagggtgtggcgcaggtattttaatttcgcaaattataaaatgccaaattttgataaagataaactgaaaatttacgatgatagcaaacttgccaagcaaattttaagaaattttagagattttcgctacgaaaaaaagcacgaaaaagacacttttgaaaaaataaaaccaattatgcaaaatttaatgaaagagctaaaaagtaaaaaagagcaaaaaagccttttagcgcttacatttttaaaaagcacagatccggttttaactataccgccttatgaatcgcgcattaacaaaaatcctagggcttgtaacgcaatgagcataaaaccagaatcaaaaataattactccaaacctaacaaatattacgaaaaaaatttttgccaataatgagtttggctttttgctaattaatgaaaatggcgagattacaacgcctgattttaacgatactaaaatcacagcaaagtatttacaaagatttttagatatttcaaaatcaaagctaaatgatagcgatttgtatcctagaaatttaatccaagacaacgcacaaaaaattgaaatttttaagagattttttgcattaagtgatgatgaaataacaaaatttgtagaattttcaaaggcttattatgacgaagttgatagtgctaaaaaaggcgttgtaaagggtaaaattttaaaaatttgtggcttgcatactccgcacaagcacaaaaataaagccgaacttatttcagcactttttatcaaaaatatcaaaaatcacgggcaaatttcaagcgaagaatttgataaattatgcgattttatgcaaaatactggcgaatataaaagcaaagcaaaaaatactaaacctagaaaaattgctaagttttttgaggatttagatgaggttagaaaatcttatcaaaatgccttttttaacgaggctttaaacactttaaaagctttgaatgaaaataacgataaaaatttagatgccaatttaagaaaaattgtccaagattacgaaataatagctaagagtatccaagaaaatattaacttttgtaaatttcaaactccatttgaggcttcaaatttagctacaaacttaaactatctcttacagcttggggatataatttttagcgataaaaacgctggatttttgaaaacttgtaaagagcatactatggagaatttactgcgctcaggcggtgaagctatggcttcaaggctgcctagcaactcaggcaagctaataaatggcaagatagaaatgtatttagaccgcttagcttatgaaattatcaagcaaagtcctaaatttgatgattttgacgaggtagaaattaatgtagagatgaataaatttgcttttgaagaaaatgcggttgccgttggtttaaaaaagcaagcaaaaaaaactaaaaacgcaaaatcttggatttgcccttatagcgttaaagttgaaaatattagcgaaagtaattgcgaatacgatcatatcatagctagaaatgataagggctttaatatcgtgtttaactctacggcaaatctaataccttgtaaatcatctgcaaatttagaaaaatcaaataaaatttataaacttgatgatttacatccaaaacatctacaaagcgtttttggcactagcaataaggctgaaattaaagattttattagcaaaaatttagccaccatagatgaaaaaacctacacaaatttttacaatcttagtaaaaaagagcaaatcgcttttcgttatgctttatttttgcgtgaaggccaagattttggcaaagctgtgagattattaaatcaagataaaatcaaaggctactcaaatggcactcaaaaaagatttgtgaatttgctgatagaaaaaatcaaaaaattaagcaaaatacaaaaatttagcgtaaattttatagatagcaaaatgcttagtgctacgcgcacagaattatcaattatgcgcgaagatataagaaaacaaaatatccaagatagccatagccactgcattgatgctagtttggtttttcatttggtaaattccaaattaattaaaaatagcaatagccaaagagaatttttatatgattattttgatgaaatttatcttagccaaagcgagataatcacacctaaaaataagcaatatttagagcttaaaacaaatattgctagaaagcgtttgtttgatgatagtgtgtatagcttggtgtatgaacaatgcgataatggcaaatttattagcataaaaaatttaaaaattttgcgcgatttaggcttgcttcatacgcgcaaaaatggtaaaaaaatacaagtgccagctggccaagctatcgatgaaaatgctctaaaaaagtattttgttagcacacataaagtttttgataaaatttttggatattttgaaaacaaaaatatcgctgggcttgaaaaattaaaatttttagataagtatttgaaaagctataagcgcgaggatattacagacatctttggcattggtaatgataacaagattattataaaaaaagaaaaatatgctacaccaaatataactaaattttatcaaattttaaaagagaacgaagagaaaattagccgtatagaagatggtaaagttaaaatcgatgaaaatgccataaaatcgctttataaacagacttttgataagggcgaaaaacgcaaacgcaataaaactcgttgcgtttattcattgagtatgattgccgataatagccaatatgtaatacgccgaaatggtggatatatggggctaaaaggagataaaattgctgctaagaattatctttttaaaaataaaaaaggcgagtttgacatacaaagcgtgcctttttatagcaaaaatgttttgcctaaaaaaattagtgatattttaacaattttaagtttgccaaaagatgccttgcttgtttatgatttcacagatataattttagccaaaatttcgcccaaaattatgcctgaaaatatcgctaaacacatcgctaagcttgattttgtgatttcacaagcagccagacacataacaaggctttatttgcgcaaaaatagctttgatgatataaattttgacgagctaaaagattttacattatcaaataaagaatttgtaaaactttatgaaaactacgataatttatttaaatctgttttaggcactccaagggttgaaaagcaagagctatctagtgcgaaaattttacaaaacgatagcgaaattttgggctttgaatacacagcaagcaactcagcaagttttaaagccttaataaaagaacttttaaatgaaacatctagtgctaaatagctttggcttatttttgggtttaaaatcagagcggttgatagtttataaaaataaagaaattataaaagaaatcgctctaaaatcaattaaaaccattcacataaactcatctggcattagtttatcaagcgatttggtatttgcttgctctttgcgtggaatcaaagtgttttttcaaaattttgatagtttttgtgctacgcattcattatacgagcataaaggcgtaaatgtcttgcgccagcagtttaatagcgaaaataacggcaaagccataaatctagccaaagaatttataatcggcaaaatcaaaaatcagcgcgccacgattttgtattttacaagaaacaaaaccttgccagaaaaatttaaaattttaaactacttaaatggcgcaatttatgctttaaagcacgatacaaagcttaataaagataaaatatttggcattgaaggtagcgtggctagtgcgtattttgagtttttacgcacgcaaaatcttttgccagctagcttttgggtgcgaaccaaaagaaatagcgatgagatcacaaataaagcgctaaattacggctacgctatacttttaaatataatttataaaagcgtaataaatgctggccttaatccgtattttggcgttttgcatactatgcgcagctccaaaccatcgctagtgcttgatataatggaagaatatcgaagttttgtagtagatagaaatatcatcaaaattcgcgcaaatctaaaagatgattttagccaagatattaaaaaaataatcgccacaaatatcttaaactcacttggcaaaaggctgatctacaatcactcaaaactaagccttgaaagcataattcaacgccaaatttacaaaatcagcgcatttttatgcgaaaatgacaaaaaatataaatcatacatttttaggtggtaaatgcaatatttaatagcttatgatattgaaaacacaaaaaaccgcacaaaattatttgaaaaattaaaagattttggattaaaaccagtgcaaaaatcgcttttttatggcgagttatcaaatgctgaaaaattaagcgttaaaattttcttaaaaaaatactgcttagatggcgataaagccataataaccgctgctagcttaaaaatagaagatacgctaggctatgaaaaagacgattttacaaagaaagaatttgaaattttatgattttaattctagctaattgcgctattacctaagaaaacttagtatttacaaagaaagaatttgaaattttatgattttaattagccacattaggcaatttatgttttgcccgcgcattttttatttttataatttttgcgatattaaattgaattacccagaatatgtaaaagccggagtggaatttcacgcaaagcaagatgaattatttaaaagcagaaaattttctaaatttcaaatatcatacattaaaatttacaataatttttatcttgaaaataatgaattgtgcggagtggcggattttattttagaatgcgatgatgaaattatcgtggctgagtttaaaaatcaaggcactttaaggctaagcgcaggttctaaaatgcaattaattgcgtattctaaactagctagcgagtttttcaataagccatttaataaaataattttatgccacggcaagaatttgaaatttaaaatttttcaaataaaccaagcagatatagcaaattttaataaaattttagagcaaataaaaggaattttagaaaatgaaaatttcccaaatagctcagctagcttagcagcctgcgctcaatgtgagtttagaaattattgtgatgatagagaataaaatttggctaagtgttaaacttagccaatcaccccggtgactatgcagaaacggggtccgaacacaccttatggtgatttcaaacgctttgtagttttataatataatttgcgatgggattatagctaaattttccacaaaacggttgcaaattatatcacaaaactacgtggtttgaaaccccatcgcgccatttagcagaccgcccacaccttgacgttgcaaattatatcacaaaactacgtggtttgaaactttttagcagcccacataacagcgcaagcagttattgttgcaaattatatcacaaaactacgtggtttgaaacataagactagggcttaatgagcttgacaggatacaaggttgcaaattatatcacaaaactacgtggtttgaaactgcttgctgagcttgcgcatcttgcgtggattgttt

SEQ ID NO: 164 - DNA, 16231 bp, synthetic construct
  misc_feature 1..16231: note = Synthetic
  source 1..16231: mol_type = other DNA
ttaaagctgattttaagctcgtttttaatttctttaaaaaaatccttggcgtttttagaaattctaaaagcttgcgtagcagcgccatagtaataaattggcattattgtatttgaaattttattaaaatttttgtagggattgctagctaagctttggcttaaatgctcgctggtatttttaaaaaaatcatcaagccaggatttaagctcggccttaaactcgccaagagcttttttaatgcgtgctttggcatcatctgctagaccattttggctaaggtttttggctgagcctacaatgcgttcaaagctaaataaaattttttcatcttgatttattatgcaagctcttagcgtgtttgagccaaggtcaatgcctaaaaataaggcttttttatgtgcgtttgctcttgcgttaatggcgattttttgggcattttctatggcaaggcttttttgttttgggcttagatttttaaaatttgcgctgtttatatttatgctaagttttttatcgtagatttttagtttttttgctttgttaattagcgcgctagtatttaggccaagccactcttttaatggcattttaagggctaattttaataaatttttagtgcttttgctttttaaaacgggttgttttagcacgctttcacagccttttattatgttaagatttggaaatttcacgctcaaatcatataaaaaacaaagcggattttgcgtgattttatggtgagtgttggcggttttggcaaaatttaatggaattttaacgccaaagattttttcatctaaattaagctcttttaaagcttttacgcctttaatataatttttagcattaaaaaatttataaagctccattctaatgcgctcgctgcttaaatcgctaatatcaatttggcgcattatttgaatgctttttgcatctaaattaaggttaaaacgcgaggcaaattggatcgctctaagcacgcgcaggctatcatctttaaagcttttttcatcaacgatttttaaaattttatgttttagatcattaatcccatcgtaaaaatccagcaactctccattaaaaatatttaccataatggcatttatgctaaaatcgcgcctagaactagctttgcgctcatcatcgcacacatttacgctaaaagccttgtggcctcggccgtttttgctctcaactcgcgccaaggctagatcaaaatttcgccacttataaacaaaaaaacttttcccaacgcccaaggcgccgtgtttttgcataagattttcaaaatcttttgggctaatatcgtaaatttcgatgtcaaaatcaacgcattctatgccaagcaggctatcacgcacgcatccgcccacaaaataggcgcgtttagtgtgtggcaagagtatgtttaaaagttcgccaagatcgctattttggcagattttcaagtcggttttgtatttttgcaagtaaaaattccaaaaatcttatcgttaaatctaagcgcacggccgtgttttcatcatttgcgttaagtcctgcaaaaagcacttcaatgcgctcttttaattttattaaaaattcttgctcattatctggctcttggctttcttgcgtggcttgattttgctgtgatggatttaatttttgcgtatttgtttgggagatggatttaatgggtttggcactattattttgagcgtttgagctagcgttattttcgcttgcgtttataggctcgctgatattttgagcattttcgcttgtgcttataggctcgctgatattttgagtgttattttttggatttgtttgatttgaaatttcatttaaaggtggagttttagcatcttctaagatgccattatcaaactccgcgcttatttcttcaatagctaattttgcgatatcttctatattgctcataaactcaccaaccattttttaagcttttgtatatcatcatcatttaagcgcaaaaaatgcccgagcatagcgtggttgctatgctgcgcgcttaaattatctaagttttttttagccacagcattatttggatcgcgccttaatatatttttataaattagcaaagcttcgttaattaagccttgcttttcatacattaatgcttcacagattgtgttagacatagttaaactttttgaatgtaatcgctaattattgcgcccatttctgctgtggtgcatatttcttttgcatcgtaatttgctaaatccttggtgcgataaccatcttttagcacggcagctactgctttttgtatgcattgtgcggcttcttcttgtgctaatgcgtagcctagcatcataccagcacttagtatcattgctattgggtttgctatgccttggcctgctatatctggtgctgagccgtggataggctcgtaaattccaaccctagcgccaattgacgcgcttggtaaaagtcctatcgaaccacacaccatacttgcttcatcgcttaaaatatcaccaaaaagattttcagttaaaatcacatcaaattgcgatggattgcggattaattgcatcgcggcattatctacatacatatactctaagcttacatcagggtagtttttactcacgcttgctactacatcgcgccaaagctggctagtttctagcacatttgccttatcgactaaacatagttttttacggcgtttgctagctgctacaaagcctacttttgctatgcgctcgatttcttctgtgctataaaccatagtattataagcgcgggtttgctcttttgcccttggggtgccaaaatacaatccgccagtaagctcgcgcactattaaaatatccacgcctttaatgatttgaggttttatagtgcttgcgtttattagctcatcaaaaattattgcagggcggagatttgcaaaagcttctaagctttttctaagttttaataatcctttttcagggcgaatggctggatctaggctgtcccattttggcccaccgattgcgccaaatagcacagcatcgcttttaagggctgcatttagcgtttcatcaggcaaaggctcaccaaaaacatcaattgctgctccgcccattaaaaagtattcataatttaagttaaaaccaaaacgagaacttacgctatcaagagcttttatcgcctcgtctgtgatttctgggcctataccatcgccttttattacgcagatattatatgtttgcatttttactccaaatttaatgatttttttgcataatttattaatccgccagcacgcacaagttcttgcataaactcaggtataggcgcaaatgtgtagctttcatttttgctttcattttttataatgcccgcatttaaatctacgcttaaattatcgcccccactgattttatcggtatcggcacattctaggattaaaagcccggtattaaagctattgcggtaaaaaatcctagcaaaacttttagctattaccacatctatcccagcagccttaatggcaattggcgcatgctctctgctgcttccacagccaaaattttcgcctgctacgattatatcgcctgcgctgatttttttgctaaaatctttatcaaaatcctccattacatgagaggctaaatacgaagggtcgcttgtatttaaataccgcgcagcaatgattacatcggtgtctatgttatctgggaatttccaaaccttatgagcgctcatcttagatccttagaataaaaaaatggcgagattttagcagataaattttaaaataagattatttttatacacaaaaatgttataaaaatattatattttaaaatttgcgctttttactatttttttgttattttttattaaaaaaaagttttttaataaaaaattaaagtctttttggttagcattcgccctttaaatcaccactttataaaattaaggcgtatataatgaaatcattacgaactcttttgctctcatcaacttttgtgagcattatgctagccgctcctacacaagaagtagatattcaagctctccaagagcaaataaatgctctccaagctcaaataaacgagttaaaaaacgctcaaaatgacaaaataagtaaagtagagctagacaaagaaatagacactctccacgagcgcgtagatgaaaatgaattacaaaatgcgcttaataaagtaaaatttggcttagatttttcaaatgccgtaactagcctgcgcgctactaatgataccgatggcacaggtggcaaaagacacaataatggcaaattcgccacagaattacatttaaatatgaacgctcacatcaacgatcgcacaaaatttactggtcgtttatctatggcaaaatattggggtaatttaggcacttatggtggcgtttatgattttgatggtggtagagatcctaatggtaactcagttttatatgtaagcagggcgtatttggattatgatattatcccaggtgttttaacagccacagtagggcgtcagccaggcactgatggcccaggctcaaatttacgcaataactcagttagaatgagcacttatcctgccttgctagtaaatgctatgggcgatgctgttgtttttacatataagccagaagctctaagagattataaattcgcatctcgccttggttatatgcgcttttatcaagattcagagattggacgccctgatggtagaagcttgcttggcgtaagcgataagcaagatggcaccgtttatatggctatggcagaagcacagttgccactaggcgatatgggtaaaaatttatttatgcttagctacgggcatgttgaaaatttctcattgcctctaagagcagaaacgctaggccataccgtgctaaatagtgtgtataatatcggcgattttgatgtggctaatttacactttgaaaattacgaaacctttgatactccgctttcttggtttatttcagctagctggcataaaggcaaaaatggtatagataacacgaaaaaagccgtggctgaggtcatagattcaagtggtggccaaaccttacagcaactaaaactaataagtgctatggctggcgatatggctacatataaggcctatgaagcttatggcaatatgatggaggcgcaattaacacaaacttttaacaaagcattaaaatggaatgaaaaacattcttgggcggtgcatttgggtgctagatatgattttacaaaagaatttaagcttggtgctgagtttttccatggtagtaaatactggtattctatgagccgtactggcattagcgatccgctagattttcgtaatactcgtggaaatgtctatgatatttatggaatttggcaacttgatttcaaccaatatttgcgtttaagctttactcatatagattatgattacacaaacaacggcagaggcataggcggtactgaaaaaacaaatgatagagcagatattatatctttaatgtatgatgtgagattttaatggcgggagtgtctatgtttaggaaatttttattattaggttttgcgcttattagcttgtcatttgggataaattgcgaggcgcttatcgctaaatatgacgcgccagatccttctacaaaaacaatggcgcaaatttctcgttggatagagcgcaaggtgggcgataatccagccgatgcaaaagaattagaatcttgtctaatcgcagaagcagccgacaatcctaataaagagcaagtagcaggcagatagcaacttgctatcttgctagattagcaagtgttttattcaaattatttattttatttttgctaagcgtttaaattgcaccggggctagttttgctagcctaaaactcttttattataatttttatcaataaaatttgcatattcatttttaatacaaatattttatgttacaaaaaattaacaatcaaataattagcttaaattttaaaattttaaagcatttttgggctgtggtgcgttttgtgctaaattttaatttatgtttttaaaatattttggcagtgattaaggtttgttagctgttttggcagttaaattttattagtaaaaatactctcttaatttaaattttgaaaatttattagcactaaacacgctagctaaataaattttaaaatttagcccttaatttttctttatctaagcttagtcagcaaaatctctaatgtgattttattttatttttacaaaaattattataagatttcgtttttttaaggattagagatgtttgatgaaatttttgaaggctcattaaaggataattgctttgatgtgctttttgctgctaatcgtagcgttacgcagattgaattagagcgtttatttgctgagctagtcgcccttagagaattaagtgcgcgcgcaaatgtaagcaatgaagaaataaataattttatttttaataacaacggccagatggagcagggtttaagcgatttgtatatcgagcttacaagttcaattttaagccaaaatgaataaaatcaataaaatatttttgtgcgctttttgtgcgcttttttggcttagttttttaagcgctagcgagcctgagtttgcattcgagcgcatttttaaattaaaaaaagatgaaaaagcttatttatatatcactgaaaaaaaaacgcaaattaaagaaattttcgagttttcttggaccttatatgatgggttaaatctagtaacgcacactaaattccgcaaatatccacgccaaataatgctttctacgcgccgcgcgttatcgctgtatagccaaagcgtcttgcctactatgactaatccttacacagatgaagtgcgcgtgtatttagagtttgtgaaatttcaaaatggcagggcgcatttaaagctattagtgcgcgatttagccaaaagagtggatttagaataccacccactatatgagctaaatgataattaaagcaaaaagggagaatatgccactacaaaaaataaacgcaagaatgcaagaaatggtaaaggatttagcttatgagcgtgctagcaagatgtttgctagcttaaatagtggcaaaatgctgcgctcaaagcttgtgctaaaaattgccggctatagcgatagggctattgatttatgcgctatgattgaattgattcatcttgcaagtttattgcacgatgatgtgattgatgatgcaatgctaagacgcgctaagcctagcataaacgcacaatatggcacaaaaaacgcaattatgcttggtgatattttgtattctaggggctttatgcaattagcaaattttaatccaaatattattattgcgatctctggggctgtttgtaagctttcagttggtgagctaatggatgtggatttaagtcaaaatttcaacgataatctccaaaaatatctacaaatgatagagtataaaacagcagcgctaatccaagctgctagtagctcagctgctatgctagcagggcttgatgataaaccctatgaaatttatggcaaaaatttaggccttgcttttcaaataattgatgatattttagatatcacaggcgatgaaaaaagccttggcaagcctgcgatgaatgattataaagagggtaaaaccaccttggtttatattttattataccaaaagctagaaaataccgataaaatcaaactaaaaagcctatttaaaaaagaattaagccctgatgaattagcctggctaaaagataaaatttcaaagcacaacataataactgaatgcaaaaaaatcgcacatcaatacagccagctagccatacaagccacgccaaatactgagctttcaagcattgcagcagatatgataaataggagtttttgatgcattatcttatcgctagctggacgcataaaaatacagatattaaattgcgagaaaagcttgctttaaacgatgagggcaaacaaaaagaaattttgcgtttagtgtgtgctaactcaaatatcagcgaagcgatggcgctaagcacttgtaatcgcgttgagataatagtttgcgctgatgatattaaaaaagctacaaaacatatttttaattcactttctcttttaagccaagttagcccgcaaattttacaatatcgcgccacaatttatgaaaatgaaggcgcggtgcatcatttgttttcggtggctagttcgcttgatagcttggtggtgggcgaaaatcaaatcccaggacaattaaaaaaagcctttaaatttgcttataatagcgcaaacgcggctggggaaatttttagcttaattcattttgccctaaaaacagcagcgaatgtaaaaaatctcactcaaatatctaaaaatccagtttctgtaagctctgtggctgtgataaaagctaagcaaatttatgagcaaatcaataaaagcttaaatggcgcaaatgccctagtaatcggtgcaggacaaatggcaagcttggtgtgtaagcatttgagtgcaaataatacaaatatcacgctagtaaatcgcactgcacaaaaagcgcaaaatttagcacaaaatttaaatggagttattaaagtagaggatttttcaaaacttgatgaattgcttaattctcacaggctaatttttgtggcaacttctgcttgtgaggctattattaaagatgaattaattaaaccatgcgagtttaggcgctatatttttgatatttgcgtgccaagaaatgtggcactaagcgagcaagataatgtagaggtattttttgtagatgatttagatgagattgtgcgccaaaacttagaattaaggcaagatcaagcaaatgaagcttatgccatagttagagctggcgtggtggagttttataaatggttaaaggctaaaaactcagcaccagccataaaggccttgcgcgataaagccaggcaagtttgcgagcaagagctaaaaatcgccattaaaaaaggctatttgaaaaaaagcgatgaaattgaagctaaaaaattacttcaccaagcatttaaggcttttttgcattctccaagtgtggcgttaaaaacgctaaatgataaaactacgctaaatgcgctagaaacgctctttgatataaaaattaaaaatgatgatgaaattgtttgattttaaaattttaaaggataaaaatgaaaaaattttctatcaatgtagatatgggtgctaaaaataatggcgtgtttttagctagcgtagaaggtgctagcgcgaaaattacgaacaaatcggcctttaatgttaagattgataaaggggacaattttgtgcttgatagggctaataggcttgctaaaaggcatactcgccgctcttttgatagagattgttttgttttgcgttttgcccggcagatttttgatcttgataaattaccaacaagaaaagaacttttagaaaaaatagaaaatcaaaaaatagagtataaaaaagaattaaaagaaccaaaagaattgatttttggcctatttaaaaatcgcggctttaattaccaaaatatagatattgacgataaaatatttgatgatgaaaattttatttgtttgcttgaaaagtttaattctttaaaagaatatggctatgaatttagcgagtgtagatgcttggaggattttgaaaattttataaatcaaaaagccgatgaactttcaaatagcaatagttttaaagatgatatgcttaattttttaaataaacaaagcgaaattataaatgatattaaagagttttatgatacaacaaataatttaagcgataaggccttaaaaaacaacgcaaaagccatagagatggcacaacaagaaataaatgcgcttggcaatgacgatgaaaacttagtaaatctacaaacaaaactagaaaatttacaaaaaaactatccaaaatttgtagaaattttaaaagataaagaatttatagaaattttaaaagttaaagatgaagataaagaatcagtcttaaaaaaaatttgtgaaattttttaacgaattaataaacgccgcaaaaagcgaattagaacgcaataataagcaccgcaaagcatatttaaaagacataaataaagaacttaatagtagtgataataaaattttagcttgggagtatgatgaaatttttaataatttgcgcgataaggttgagagcaaaaaatggagcaaggatgagttttataagtttgtaggcaatgtagcaaatatccaaactagggtgtggcgcaggtattttaattttgcaaattataaaatgccaaattttgataaagataaactgaaaatttacgatgatagcaaacttgccaagcaaattttaagaaattttagagattttcgctatgaaaaaaagtatgaaaaagatacttttgaaaaaataaaaccaattatgcaaaatttaatgaaagagctaaaaagtaaaaaagagcaaaaaagccttttagcacttacatttttaaaaagcacagatccggttttaactataccgccttatgaatcgcgcattaacaaaaatcctagggcttgtaacgcaatgagcataaaaccagaatcaaaaataattactccaaacctaacaaatattactaaaaaaatttttgccaataatgagtttggctttttgctaattaatgaaaatggcgagattacaacgcctgattttaacgatactaaaatcacagcaaagtatttacaaagatttttagatatttcaaaatcaaagctaaatgatagcgatttgtatcctagaaatttaatccaagacaacgcacaaaaaattgaaatttttaagagattttttgcattaagtgatgatgaaataaccaaatttgtagaattttcaaaggcttattatgatgaagttgatagtgctaaaaaaggagttttaaagggtgaaattttaaaaatttgtggcttgcatactccgcacaaacacaaaaataaagccgaacttatttcagcgctttttatcaaaaatcatgggcaaatttcaagcgaagaatttgataaattatgcgattttatgcaaaatactggcgaatataaaagcaaagcaaaaaatactaaaactagaaaaattgctaagttttttgaggatttagatgaggttagaaaatcttatcaaaatgccttttttcacgaggctttaaacaccttaaaagctttaaatgaaaataaaaatttagatgctagtttagtaaaaattgtccaagattacgaaataatagctaagagtatccaagaaaatattaacttttgtaaatttcaaactccatttgaggcttcaaatttagctacaaacttaaactatctcttacagcttggggatataatttttagcgataaaaacgctggatttttgaaaacttgtaaagagcatactatggagaatttgctccgctgtggcggtgaagctatggcttcaaggctgcctagcaactcaggcaagctaataaatggcaagatagaaatgtatttagaccgcttagcttatgaaattatcaagcaaagtcctaaatttgatgattttgacgaggtagaaatcaatgtggagatgaataaatttgcttttgaagaaaatgcggttgccgttggtttaaaaaagggagcaaaaaacgatgaaaaagctcaaaaagctaaaaaaactaaaaaaactaaaaacgaaaacgatttgatttgcccttatggcggcgaaggtattagccaaagcaattgcgaatacgatcatatcatagctagaaatgataagggctttaatagcgtgtttaactctacggcaaatctaataccttgtgaatcatttgaaaatttaaaaaaatcaaataaaatttataaacttgatgatttacacccaaaacatctacaaagcgtttttggcactagcaataaggctgaaattaaagattttattagcaaaaatttagccaccatagatgaagaaacctacacaaatttttacaatcttagtaaaaaagagcaaatcgcttttcgttatgctttatttttgcgtgaaggcaaagattttggcaaagctgtgagattattaaatcaagataaaatcaaaggctactcaaatggcactcaaaaaagatttgtgaatttgctaatagaaaaaatcaaaaaattaagcaaaatacaaaaatttagcgtaaattttatagatagcaaaatgcttagtgctacgcgcacagaattatcaattatgcgcgaagatataagaaaacaaaatatccaagatagccatagccactgcattgatgctagcttggtttttcatttggcaaattccaaattaattaaaaatagcaatagccaaagagaatttttatatgattattttgatgaaatttatcttagccaaagcgagataatcacacctaaaaataagcaatatttagagcttaaaacaaatattgctagaaagcctttgtttgatgatagcgtgtatagcttggtgtatgagcaacgcgataacaaaggcaaatttattagcataaaaaaattagaaattttgcgcgatttaggcttgcttcatacgcgcaaaaatggtaaaaaaatacaagtgccagctggccaagctatcgatgaaaatgctctaaaaaagtattttgttagcacacataaagtttttgataaaatttttgaatattttgaaaataaaaatatcgatgggttcaaagaattaaaatttttagataattatctacaaagctataagcgcgaagatattacagacatctttggcattggtaatgataacaagatgattataaaaaaagaaaaatatgctacaccaaatgtaactaaattttatcaaattttaaaagagaacgaagagaaaattagccgtatagaagatggtaaagttaaaatcgatgaaaatgccataaaatcgctatataaacagacttttgataagggtgaaaaacgcaaacgcaataaaactcgttgcatttattcattgagtatgattgccgataatagccaatatgtaatacgccgaaatggcggatatatggggctaaaaggagataaaattgctgctaagaattatctttttaaaaacaaaatacaaagcgtgcctttttatagcaaaaatgttttgcctaaaaaaattggtgatattttaacaattttaaatttgccaaaagatgccttgcttgtttatgattttacagatataaatttagccaaaatttcgcccgaaattatgcctcaaaatattgctaaacacatcgctaagcttgattttgtgatttcagaagcagccaggcacataataaggctttatttgcgcaaaaatagctttgatgatataaattttgacgagctaaaagactttacactatcaaataaagaatttgtaaaactttatgaaaactacgataagttatttaaatctgttttaggcactccaagggttgaaaagcaaaagctatttagtgcgaaaattttacaaaacgatagcgaaattttgggctttgaatacacagcaagcaactcagcaaattttaaagccttaataaaagaacttttaaatgaaacacctagtgctaaatagctttggcttatttttaggtttaaaatcagagcggttagtagtttataaaaataaagaaattataaaagaaatcgctctaaaatcaattaaaaccattcacataaactcacctggcattagtttatcaagtgatttggtatttgcttgctctttgcgtggaatcaaggtgttttttcaaaattttgatagtttttgtgctacgcattcattatacgagcataagggcgtaaatgtcttgcgccagcagtttaatagcgaaaataacggcaaagccataaatctagccaaagaatttataatcggcaaaatcaaaaatcagcgcgccacgattttgtattttacaagaaacaaaaccttgccagaaaaatttaaaattttaaactacttaaatggcgcaatttatactttaaagcacgatacaaagcttaataaagataaaatatttggcattgaaggtagcgtggctagtgcgtattttgagtttttacgcacgcaaaatcttttgccagctagcttttgggtgcgaaccaaaagaaatagcgatgagatcacaaataaagcgctaaattacggctacgctatacttttaaatataatttataaaagcgtgataaatgctggccttaatccgtattttggcgttttgcatactatgcgcagctccaaaccatcgctagtgcttgatataatggaagaatatagaagttttgtagtagatagaaatatcatcaaaattcgcgcaaatctaaaagatgattttagccaagatattaaaaaaataatcgccacaaatatcttaaactcacttggcaaaaggctgatttacaatcactcaaaactaagccttgaaagcataattcaacgccaaatttacaaaatcagcgcatttttatgcgaaaatgacaaaaaatataagtcatacatttttaggtggtaaatgcaatatttaatagcttatgatattgaaaacacaaaaaaccgcacaaaattatttgaaaaattaaaagattttggattaaaaccagtgcaaaaatcgcttttttatggcgagttatcaaatgctgaaaaattaagcgttaaaattttcttaaaaaaatactgcttagatggcgataaagccataataaccgctgctagcttaaaaatagaagatacgctaggctatgaaaaagacgattttacaaagaaagaatttgaaattttatgattttaattagccacattaggcaatttatgttttgctcgcgcattttttatttttataatttttgcgatattaaattgcattacctagaatatgtaaaagccggagtggaatttcacgcaaagcaagatgaattatttaaaggcagaaaattttctaaatttcaaataccatacattaaaatttacaataatttttatttggaaaataatgaattgtgcggagtggcggatttgattttagaatgcgatgatgaaatcattgtagctgagtttaaaaatcaaggcactttaaggctaagcgcaggttctaaaatgcaattaattgcgtattctaaactagctagcgagttttttaataagccatttaagaaaataattttatgccacggcaagaatttgaaatttaaaatttttcaaataaaccaagcagatatagcaaattttaataaaattttaaagcaaatgaaaagcattttagaaaatgaaaatttcccaaatagctcagctagcttagcagcctgcgctcaatgtgagtttagaaattattgtgatgatagagaataaaatttggctaagtgttaaacttagccaatcaccccggtgactatgcagatacggggtccgaacacaccttatggtgatttcaaacgctttgtagttttataatataatttgcgatgggattgtagctaaattttccacaaaacgcaatgtttttgcagttttttttaaagtggaaaaaatcagcattttatgataccatctaagccccaaaatatcggtattttgtgaggctgttgcaaattatatcacaaaactacgtggtttgaaacatctcggcatttttctcaaatgctgacttcatttgagttgcaaattatatcacaaaactacgtggtttgaaaccaattagcagtgattacgcgcaaataagcaccgcgttgcaaattatatcacaaaactacgtggtttgaaacttaaaaaagataaaactatttatggcgagcttggcggttgcaaattatatcacaaaactacgtggtttgaaacataaatcgctcaaaatcgcttattttggttgctcgccgttgcaaattatatcacaaaactacgtggtttgaaactgagcaaacgcttttttcatcgcttttataaatcttgttgcaaattatatcacaaaactacgtggtttgaaacctaaatatgaaagatgttaaagatgatactaaataggttgcaaattatatcacaaaactacgtggtttgaaactatgcgttcgtctatgacgagctccacgctgccaaagttgcaaattatatcacaaaactacgtggtttgaaacaattacttaaaaacaattttaagcccgggcgagttggttgcaaattatatcacaaaactacgtggtttgaaacgaatatttaagcgcggtagtgctccacgat

SEQ ID NO: 165 - DNA, 16203 bp, synthetic construct
  source 1..16203: mol_type = other DNA
  misc_feature 1..16203: note = Synthetic
ctctataagttttacgatttaaagataacattaaagctacaacatgctcggcaattgcatacggagagtaggctggcactcttacaacatgtaaacctaaatcagcagcagcttttaaatcaacattattgaaacctgcacaacgtagggcaattaacttgacaccatttttagcgaggatttctaaaacctcacgatcggctctatcgttaacgaaaatgcagacagctttagcacctaatgtctgagaagcattatgtatatctaagaaagaacgatggtattgtaattcgaaattataatttttgctttcattgatttctgtgaacagatgacgatcataactgtgtgtaccaaagaaagtaatcttttctgacataactgcctccgcgttatttgtttgtataaattaaaattaaagctgtaccagtagtatggcaatctttatttgtaaacttcttggcaatatagtttatcttattgaattttatttaaataactttgttttatactgctttaattttgtgcaatatgtctatttggctagattgtgctgattttgcgggctaattttacgcttttttgagaagcttaggtacaaaaaattttttttgacaagatgaggctagatttaaaaaagttaagtacaaattgactaattgtttaaatgttaaagaaaaatagtaaaatagacgtagttagctttgaataaatagttaaagaaaaagcaatctatcgggtattaaagatgaacaatattaaaaaatctgtgttgggtctaggtctcttagcatttacatcagtagtgatggcccatactcaatttaccttaaagacaggggagcgactttatggtgaagagcaggtctacaatatcgaaaaatctggaaccactaccttagagtatgtagctgctaaatactctttaggtttatctaatatgatcgaagctaatcctgaggtagatccaattgttcctttaaagggaacttctcttgtcattcctaatcgtttgattttgcctgatactgttcatgaggggattattttaaatacagctgagatgcgacttttttattatcacgacaatgttgttgaggtctatcctatcggtattggtcagttaggcaaagatacccctaaaaattgggttacaaaagttgagcgtaaaaaagcaaatccaacttggactccaactgcagcaatgcgtgctgaatatgcagctcaaggagagattttacctgctgtagttcctgctggtcctgataatcctatggggctttatgctttatacataggccgtctttatgccatacatggtactaatgctgaatttggtattggtttgcgtgtaagccatggttgtgtgcgtttgcgtaatgaagataatgaaaccttattccacaaggtaccggtaggtacacgggtgcagtttataaaccgtgcaattaaatacgccattgaacctaatggcagtatttatattgaagttcatcagccactttctcgctctgaagaggagtttgaaaatttcgatagtaatactccatttgagtttactcaagaagatctagatttctttaataatccagaaatcgatcaagatatcttaaagcaagctttacatgagcgttcaggacgtccggtactattaaatccggctaaattttaggatatgcggtgttaaaaaagattgtcattgcttttctatgtatttctacagctttagctaaaggagctgagattcatgatagcagtatgcttcctaaacttttatatcaagctaaagaagcatctggtcaattacaacgcaatggcaatatttttgaaattgtaaattatgaagatattgtagatcttaaaagttcttacgcccctgagaataaacaaggcttaaaaaacttaaaattagaggcagtcaattctaataatgtctctttaattatgttatcaaggcttttttcttcaatagatcatcaagaaaaaatcaagctaccttttattttttatgaggggaattttaaagagcaatttaagctttttgatggtttttatcaggaaggagaatgtaaaggcttaggattttttgaggccaaatacaagggtaaatgtataagatctgattatgaacctttatttgaagcctctgcaaagcttttaactaatgaaaatcttttaaattaccatttatatcgtggcttgccccaattattaggttttagaagttatgcaaattcgcagggctttactcaagtgctttcgcctgtagatgagcacctttattcattagagcttgatcgcaatataaaacctcaagataaatatatagatcttttttctaattgcaaaagttcagaatgtaatctttttgagtttaaatcagaagctcttgagattttaaattacgtgcatggaaaaaaagataaagttgttaattttcctttatatacggttataaataaagatggcagttgcgagtttaaactacgcaataccctgttatcagatagcgagtttgtcaattacgatttttactctgagatagagcttgcagccttgcatgatcttggttttagcattattcctcaactttattatggcaatagtatatatagctcgggaactgttgatgagcgccagaaaattgtcttaaataaaggttatttttcctgggataatagccttaaaatttatgatgaggataaggtttcctcagtccctttgagtgttggtacgcatgtctatggcaattataatgaggtaagacagcaagcggcaattgcctctgtaggttatggagctacaggtgtgcgtattgatggtgttggcaatagtttaatcctgcctaagcaatctgtaatcattgaaaatggtattaactctacaggtattgcagttaactatggttcaaatactgaattagatattaatggttttgtctcagcaaaccgcaatgatggtgtcgcggtagctttagattttaaagaaaacatgcgtacagatgctcatgaatatcaaggctcgtttgtgcgcgttagaagcaatgattatagcaatgacatactctcaaaaagacaagcttcagctttagaagttcctgcagaacttaaaggtcctttagtgtctgttatgaatgtctcaggatctttaatcggtcaaaaagctgccatctatattggtgatactgcttgggttaaagagataaattttttagatagagctacggtaaagggagatattatcagtgattacagtccctatattgatggtgattggatttatcttgataagaaaaatccgcaattattaccagctcgttttcagttaaaacctcaggccaatttcttagattatcaaggaaataagagcttttttgaaaaattatgtactacgctaaacttcggtagtatcagatctcatgattctacgcacggaccaatgtccgatcttgatagtggaaattctaaagcccttattgatatcaatggcaatattaagggtaaaaatttaatactcaatgtcttaggtggggttacttcggttaaaggtcgtattgaggttaaaaggctaacagtatcagatgcttcgttacatttatcgtctaaagataaagaggtgcatattgtagattctctttatcttgataatggcgctgctttgaatttagctgatgggcgagggaatatctttacggtaaataaaaatgcttttatcgctcaaaactcgattataaaagtcgataccgatgaagaaggtaatatcttagataatattgttattaaaagatatttagctactaatacaggtcaaattcatattgaaccatgtttaagctatgctcagattaaacaatttaatgccgatcctaagacacttttaagttatatttcaaagtttgtagttaacgctaataatcttttagcaccttataaaatttcagtatattttccaagtcacctttggcataaatcaggacttatgggacgcaaaattaaatgcactgctagaggttgtcgaattggtgattttgtcggggcacgtaagatcatgttttacgaaaaattgcctttatggagaatttatttaagtttaggcggttgtatagttttagtctttgctacagttttcttaagtcgcagaattaaagaaaaaaataaaaataatagcttgtaaacaattcacctcctaaaaaggaggtgaacttaaaaatagacttagataaggttcatgcctaaatctttgcactctttgcgcatttcatcaggccaaatactagcttgaatttcaccgatatgagctttatgtaaaagcaccatacataaacggctttgaccgataccgccaccaatagataaaggtaactcgtcatttaaaagctttttatggaaataaagctctttgcgatcgtttttgttttcaagatcaagctgacgtaataaagcttctttatctacacgaatacccatagaagagagttcaatggaacgatttaaaatagggtaccaaattaagatatcaccgtttaaacctatctgatttgcttcattgacagttgaccaatcatcatagtcaggagcacggccatcgtgtttttcgccatttgaaagcttgcaaccgataccagttaaaaatacagcaccatattttttacaaattgcatcttcacgctctttaggagttttatcaggatacatttgtaataattcttcactgctaataaaagtaatattctcaggtaagaaaggttttaagcttgggaaggcttcgcaagctaagtactcagttcttaagatagcgctataaatacgatttacgactttctttaaataggctaaggtacgatcttctttaccaacaacaacttcccagtcccattgatcgacatagagggaatgaaggttatctaattcctcatcagcacgaatagcattcatatcagtatagataccaaaacctttagcgattttatattcagctaaagataaacgcttccacttagctaatgaatgtacaacctcagcttttgcatcatttagatctttgacagggaaggttacagcacgttcaatgccgttgagatcgtcatttatacctaaaccttttaaaacaaataaaggagctgtaatacgacgtaatcttaaagaggtagcaagatttaattggaaaaaatccttaattaacttaataccatgttcagtttggcagggatctaaaaatgcctgataatcaattggttttattactttactcatagttttaatttagttcttttataaaaaaggtgtaatgaattttagtatagcattctagcttaaagtattgcggagcattaaccatttgagtgcaaataaagttcggggcaaacatacgttttttctaaaaatgaatgtatttttaataaaaatatatatataaatcttatagataaaagttaaattttattttttttcttttatatctgtatcttaaatgagtctttaataataaattttatttaattttatgcaaaaacatgtgctatagttagctatggcgaacttataatgtgatcacgatcaattttacccctaggacactttagatggctgtttttaaaaatcttctaaaaaaagtaggccttccttatgatgatgtcagtttcatcttaaataagatagtcattgcacatatgattccaggacgcattcgcgttgtttacaaagaactatgtaaaaacgatgcaatttacacaactatctatgagcgtcttagtgaattaaaagatatcaaaaaattcagcattaaccgcattacaggctcagtaatcattgaatatgagagcaagagtgttgagaaagacagctttttgggacgttttcttgaaggtgctagcgttaaatacaagcaggagaaataaaagatgaggaatatgaatccttttatggctggcaagattgtaggtgaaactattcgccatatttttgatggcaacgctggtatggttatcgccagtcgcataaaaaacagacgtcgctatacctgcaaaaatatcaaaaaccaagttgaactttgccaagttctagaaaatctaattgctgattttcctggaatcaaaacagtgagtgtaagtcctattacaggctcaattatagttacctatgatcaagatgaggcctatatagatgcgctttttgatgcattatctcaccatttatcaggaaaacatgcggttcaagaacgtaccattattcccacaaggatgcttacagtctctgataatatcaatgacaccttcagatatgcaaagaaaaaggtaactggtgttttcaatcacactgagcctgtgttcttaagtcgcatggccggattagctttatttgcttatggcttaaatcgtattttcttaaaaggggataggcctgcaggaccgcaattgtttttatggggtttagcactgttaatgcgccagtctcatccagatccacgcaaaattttaaatgctgaatctcaacaaaattaggtcagagtatgaaaagttataaatttcccttagggataaatttagattatcgctccgcctctaaattagaggctctaattagagctcgtttagatgtgaaagctgtaagttgtgctcatggcaatattgtattgtggactgataaagatagctcttatgcgaagattgccttagagttatctaagcttttgggaaataaacttatcaccaaaactaaagctgtcactgtacaagcaaaagaattagctaaagttaagtcttctaatatttcaaaagaattgcaagaacataaacgttcggcgttgatgtcattaggtttctttgtattttttgaaattttaaagagatctaatcctacagcttttgcagcaagtgtttatcttagatctctatgtgtactattgatgtcagaaaatttgattcgagagggcattttagaggcttttaaagaaaaacgtcctaatgcagatactttaactatgacagcggttttgtcatcagtgatagcaaaacgtcccgaatcatcttttactgttttagccttgtcaaatttttctgagatgctgacaaccttagcggcacagaaggcgcgacagaatatatcctccttagttgctttagatgtacaagaggtttggattaaaaatgaagatggtgttgatgttaaagttcctatcgaacaggttaaacctggtatgcagatttctatacatacaggcgagaaaatctgtgttgatggtcgtgtaatttcgggaaaagctgcagtcgatcaagccgccattaccggagagtccattcctgttgaaaaaaatatcaacgatcgggtttttgctggttctaatattcgtttaggagatcttgtaatttctgttgaaaaggtaggagatgatacctctttagcaaggattgtacacatgatcgaagatgcgcaaaacagacgtgcaccgattcaaaattatgccgataagatgtctacggccttagttccgatctcttttataagtgcagctatagtttatttatttactaaagattggcaaagagttttaaacatgctctttattgacttttcttgtggattaaaactctctacagctacagctatgtcagcttctataagtcgtgcagctaagagtggcatattagttaaaggtggttcctacatagaaaaggccagtgaaattgataccatagttttagataaaaccggaacaattactacaggtaaaccttcaattacaaagataaagcttacttcaaatctagacgaagatacggttttaaaattagctgctggagctgagatgcattcatcgcatcctttagctgtatctattttagatgagcttaaaaaacgcaagcttttaatgcctaataatcttaaatctaaaactattattgctcgtggtattgaggccactttagctccatttgacgatcttgatgggggtgaagtcttagttggttctaagattatgatgctagaacatgaggttttaggtttagatagttttgattttaaaggaacttttgaatctagctctttaatttatgttgcctatcaaggttatctagtagctattttagagatctgtgatcagataagacctgaatttaaacgagcaattaatcgcttgcgctatagcggcatcgaagaaatagtgatgttgactggagacaataagcgagctgcaaaatctatctcagagcaattagctttagatgattttaaagcagaggttttacctgaggaaaaagcctcatatgtagcacataagcaagctaatggtaatgttttaatgataggcgatggtatcaatgatgcccctgctttagcttattctgatataggagttgccatgggatctggctgtacagatacagctatggagactgctgatgtcaccataaatagtgaagatcctttaaaaattcctgagtttatcaatatcagtaagacaactatgcatcttgtgcatcagaattttgccgccaccattgctttaaattcagcagcaatgatgttaggtgccttaggtgtaataaatccattaatgtcatctgttatacataatgccactaccttaggtgtggttttaaacagtgccagagttttgttacaaaaaaagaaaacagcgatttaatccataagattgaggaaaaaatatgataaataaaagtttagtttttagctttgctgcaggtgttgttgtgggagcattaggtcttaagatctataacgaaaacaaagatactatcgatgcaaaattaaaagaaattaagctcccaggtttagctaaccctgctgaaactgagagtacttcagaggctacagaggatttaaccttagaggagcttatgtctcaaaaagagcgtttagaggacttaattgctgaatataactctaaaaaggatgctcaataatgattcctaccattccttctgtaactaagaatatggttctagcttttggtgcaggtgttattgtcggtgctttagcttataaatatgttaaggttgagaaaaagctcaatatcgacgagttaactgataacctaaaaaaacttgctaataacgttgcctctaaaggacgaggcaaaggccctaatctctaataagaatttaagtaaatttttttaataaagcccctaaatgtattttcaccataattgaaaaaacatttaggggctttgctttattaataatttgtaatcaattttttattaaaaatgggatgtgtagaataaaaaaatattaaataacctactacaattaatctaaaaattattttttactccacagtaatataaaggttataaattttataatggggttattatgaaaaaaattgtaatattaaatatttctttgaatttaggtgtaaaaatcactggtttatttttatgtatatcttataaatttacttcaagggaagaaaattaatctatgatatgtaaatatgcctgatttacaaatgaagcgtgtagtaataaatgaagcatcaaaaagacataggagtagatctttagagtattaagaatctactgtttcatgaattttggaatgataacttaaataagaactataagatctaactttttaagcccttatgatagtagatgaattatattggctcctgtattgaaaattgttgctttaataacttttacttttcctacgattttttatctaataaatactctgtcctagaccatataaataaaagaattgatgggacttgtaacagcaaaaaggcaatacgctgttgatttattctttttcaagcaagaacttcgtcatggcgttaactgataaagaaaagtatttttaataaaatctattagataaaaagttgtttaaatttgaccttaaatattagttatataaaaaactaaaaattagatatgtatagtaaaattttattaaaattattactataattaatttagtttaaaatttaagtaaatacatcaaagtatatagtatagaatttataataaaatgaacactatgaaaaatattatcaaatcaaatcttgctttggatttaggtggaaaatttactggtttaatttcatatacttcttgtggattaccctcaagagatgaaattcaggctgtgattataaatatgcctgattcacaaatgaattacacagtaaaaagtagaacatcaacaagacatttggtccgatctttagatcgttataaaaaagctcgtaaacttatatatattttggttgctgaatctttaaaaagagagcttagtgatgatgaaaaagaagctttatcttctttaatgctacgtcgaggttataccaggcaagaaacagaactgtcagatgaagctttagataattgttcgatagatgactttgttaataatgcaaactttactgatttattcaatacttcatcacaacttaaagagcagttttataagttaattgaagataaaaataaattagaaggactatataaaagcattaatgagactggcataaaaaatattccgaaagaatatagaagtatagctaggtgcatgagtgatatttgcaatgatattattcagcaagataattttggtcataaacatcgcaaaaaatattttgaagatataactatagacttaaaacatgactcaagattaaaaaatatcagagaaaagattggcgagacgcaattatttaatttaattggaaatatttctaatttgcaattaagagcgctgcgttggtattttgatgatcccaaaatgcagggtgcaggtatatatgacagtgataaattaaaaaatgctttaattagagcatataaatttttccattataagacctctgaggagcgttctaatattagaaaatttatagattctataaataagagtaaaaaggagcataaagatgctttggagcttttatttaatactgatcctttaataacaattcctccttatgaggatcaaaataatcgcaatcctccggaagatttaaccttacttttaaatcctttagctttagacagaaaatatcctagtaactgggaaaaatgggctttaagctttatttctaacttggattttatcgatggtgagctttgcgaaattgttaagttaaccgacagaaaaagtcgtttaaatccaaagttatcctcagcatatacccaagaaaaattaaggttatcttatgtattgcagcgtgtttttgatttaagtcgaaatgaagataaagtttttacaaaaatcagagcttgggcaaaagatcctttatcaagaaaggttgctgatgtaaatgcatatctactctcattaatttgtgatgatgaaataggcgattttgagaatttggctagggaatattatgaagaaattgagttggctaaaaaaggaatttggtcaactgtagaagagcctattttagaaatttcaaatattcatcctcaaatgaagaataaagttttggcagatttagttgctaatgttctttgtttacatgaagattttgattttgataattttaagaataatatttggacagccaaaataggtagaagtacagttagatctatttgtgcaaacattgagaaaataagaaaatcttataaaaattattttaatcatttttatgaagctgcagtaaaaaaatatcttggcaataagaataatgagctagataagaaagataaagagcttatacaaatatataaaaaagttaatgaagtatcaaaagttattgcagaaaaattatatttagatcctttagatggacttaaatttaaaaatccgttttctcttgcacaactttataatttgattgagacagatatctctggtttttcaagcaattgcttagctgttattaaagaaaacaattatagaatgcgcaatgattttagtaacggagctttatgtacaagattggcagcagaatctgtacgtccttttgatggcgcgttaagaaaaatactcgaaagacaagcttatgaaatagctaagatcaaatcacaagaaattaagtctttgccgagtatttgtaatagtcaaatagatttgaatattttagttgaagaaaatagttttgaattttcttcatcaatagaaactttgaaaacaggaaaaaaacaaaacgaaaaagaagatagccttaaaaaagaattttttgtttcaaagtatgagcgtataaaaaaagattccttagtttttacaggttctgaaaaagcaatttgtgcatatacaggcgagtttttaggtggggagaataattgtgaatttgatcatataattcccagaagcaagacaacgtccaatatggggactatttttaattctgaattaaatcttatttatgtatcgcaaaagggaaatcagaaaaaaagagagtctgagtatacattgtacgatttgtctaaagaatatttaaataatgtttttggcacatacaatattaatgaaattaagttaaaaatagaagaaaccgttaataaacttaaagaaacaaatcctagatttttagttgatagcatgacaattgatgaacgtatttgtgctcgtcatgcgttatttatgcctcattctaaagaatacaatattgttgttagggctctctcaagaatttacagtacaagagtaaacggtactcaagcatatttagttaagtcaataattagcaatattaaggaaatgctatctctgtggactaaagaacataataatgttttaacttttgatacttggaatatcagttcaaaagagactcatgatataagagaaaatctatcaggtgaaaattcttgtttaaaaaaacaagaaatacaaccaatcacatctcatgcaattgatgcgctatgtgtatttgctgcagcttgtgataataaaagtatttcccagaaattatcaacttgtgatggttttgaaaatatttctaaaccagaaattttaaatacacttgttccagaagaatttgttattaaaaatatttcaagaaaagattttattcaaaaagataagccagcatcaaaaaagttatataaagatacaatttatgcggagcattttttaccaattatagctaaaggagaaaaggttaagataggttttgatttctataaaaatgctgtagaagtaaaaaaaggtggggaaaatttattgtgctttttgacgccattttttaaagatgaatataaatactctgaagagttaaaggtatatcatattgttaacagaaaagtctttgatttcatagataaaaataaagaaagctcagattctgatgaatttaagagacttgtatatatttttgatgctttacgatataccaccttaaaaacagaacctttagaattaattaaaaaagctgaaaaaaatgccaaaagtataaaaaatgaggcagaaaaacaacaaaaaatcaggactactatagaagattctttttgtataaatctaaagaataagtcgactatatcaaagataagtcttgctaataatacaaaaataatattgccaacatacaatgaatttaaaattataaagagggacttagatttatttttagaaaaggatcctgatgctaaaagggaagatttttttgaaactttcaataaaacaactaaaaacaaaaaagctaatagtgcattagagcatagaaaatgcaagcgtaattatagcattcctgtaatatcagctccttctggaggaattagagtcaaaagaaaaacagcatcttctgattatgtatatcagttaattgcagcaaacactcccgatacatctataaatcaaggtgttattttagaaaacaatcaaatagactttgaaaaaaaggctgtttttgttgacatatatactgaaaaaaatattgtatttagtccatataaatcttcaagagtaaaagcttcccataaggatttcttgcccatggacgaacgcattttgttagtagacaacgaaaatataaaagttgaagcttctttatcaacagcggatcgcagaaaagtttttgtaactgtttcttttgacgagttcaatattggattaaaaaataagttctcgtcttacttggatttaaaagaagagtatacattgaaagataattgtagtgatttatttgaatatttagagtctttaattgacgataagaacataaatatcagtaaaccgagaaataaaaaaatctcatttactgttattggtaagactttatgttttagttataacactgatagtgatataaagagatcaattagttataagttatcaatgtagatatgagatatttaactgtgacgagctttggtagttttcttggactatctggccaatgcttagttgttaagcaaaatggtgaagtgtttcgagaaattgctttgtcacatttaagaggtataaacatagcaaagtcaggggtatcaatatccagtgacttagttcaagcttgtgcaattcgtggcattaagattttctttttagactttagatctagagttacatctgctgttattggccagaatcaacacgcaacagttgccttaagaaagtcacagtttaaatttatctcaaataatagttgttgttttgaactctcaagagagattgtcttaaataaagttaaaaatcaaagagcggttcttctatatttttctaagtatttgcgtagtgaatcaagtgataagaatcaatttttgttattcaatgtaagaaaaatagattctcttatagaacaattaaagatccttcattttgatgaaaatagaaattggagaaattctcttttaggacttgagggtttaagtgcgcgtttttattttgagactttggcaagtacatcattatttccaaatgattttataaatcgtgaagggcgttgggcaaagagtattacaaatcaagctttaaattggtcatatgcaattttagaaagttatgtgtggcaagctttggataatgctggtcttgaagtatttgcagggatttatcatacagataggccaggaaagccatctcttgttttagatcttatggaagagtaccgcgcttgggtagtagatagaaatatcattaaactaagagataccatatcttctttttcaagcttgaatagtaagcttaaagtgatattaacaaacgcagttcatcaaactatgcaaactaaatatccttacaataacaaaaaagttaagttagaaaacattctacaaagacaagcttataagcttgcaggagctgtttctaacagtaacaaatataaaggttatatttttaaatggtaagtcaaaatcgattatattctagatatgtaatttgttatgacattgaaaatgttaaaaccagaaaaaaactttataaaagttttaaagattttggtttaacacctattcaaaaatcagtattttttggagagttaactagagctgaaatagcgtcaataaaaagaattgttaatgaacttttaaataaaaaaactgataaatgtttatacatattaaatagtttgacagagcaagatattagaaataattgttttgggtataaagattttaaatatgtttcagttgatggattcgaaaccatatagcgttcccatatcgctacttagacaattttgtttttgtcctcgtattcctttttatcaagcatgtatgcagatagatgtgaaatatcctgtgtgggttagtcaaggtgttaatgagcatgatcgctatgagatgttaagtaagcgtagaaatttaaataaatttggccttgatactttgcaatacaatattagacataatgtttatttacatagcgaagatttgagaatgcatggagtatgtgattcgattttatctacagattcagataagtatattgttgaatttaaattaagcgatagagaaaagctaaatttggcagagaaagttcaacttacagcatatgctattgttgctgaagaaatgtatggcttaaaaatagcaaaaggctttattctgattggcaaaaaaggaaagacctttatcgttgatatagataaaggattaagagataaaactctttctataagagatcatgtaattgatattgttgaaagaggcataatgcctaattcagcagctacagaagggaagtgttgtcagtgcgaatacttcaatttctgtgctgacagattttaaaattcgtgctaacccatacaataaaatgtatgagtttagctacaaaataaatacccggat

SEQ ID NO: 166 - DNA, 24230 bp, synthetic construct
  misc_feature 1..24230: note = Synthetic
  source 1..24230: mol_type = other DNA
aatcgcctcgaccacgcgaacgcagaccgtgttgtcataggtgcggttatcgcccatcacgcctacgcttcgcacattcagaagcacggtgaacgcctgccaagttttgtcataaaagccactctttttgagctcatcaagcatgatcacatctgcttttctcaaaagctccaaatcttcaaagttgacctcgcccatgatacggatagctaaccccggtccggggaaaggatggcgcatgagcatctctcttggcatcccaagctccgctccaagcgccctcacctcatccttgaagagctctcttaggggctcaatcagctcaaaggtcatccaatcaggcagtccgccaacattgtggtgggacttaatcgtcttgctggggcccttgacggagaccgattcgatcacatcaggatagagcgtgccttgagcaagatattggatgccatcatgctttttcgcctccacatcaaacacctcaatgaaggtctcgccgatgattttacgcttcgtctctggatcgctcacccctttgagcttgccaaggaaaatctcgcttgcatccaccgtgatcagaggaacatggagattctctttgaacatcttctcgaccgcctcgcgctcacctgccctcaaaagcccatgatcgacaaaaacaggaatcagcttctccccaatcgcgcgatataaaagcgcagccactacgcttgaatcaaccccacccgagacggcgcagagcactttgcccgacttgacgcgctcttgaatctttttgatctgctcctcggcgaagttatgcatattccaatcattttcgcagccacagattcctagagcgaaatttttaagatagagcgctccctcttcagagtggacgacctcggggtgaaactgcaccgcataaaaaggcttctcttggtgggcaatcgccgcaaagggagagttcgtggagtgggcgattcttgtgaatccttcaggcaatttctccaccttgtcgccatggctcatccagaccactttgccgctatggcacccttcaaaaagcttcgactcactcccctcaagggcatcaaaaatcacctcagccttgccatattcatgatgctccgccttggccaccacaccgccaaagtagtgggtcatgagctgcattccatagcagattccaagaacaggaattccaagctcaaaaaccgccttatcaatcaagaaagcatcctcttcatagacgctcgctggtcccccgctgaggatgattcccttgggttcgcgtgctttaatcgcctctagcttctcgtggtaggggacgatttcgcagtagattccatactcccttagtcgccttgcgatgagctgagtgtattggctcccaaagtccaaaatcagtagcgaaaccttatcgtgtagttgaatactcatccattcctctctatgcgtgaatttaaccgatcatgtagtgagcgccaagggattcttggcgcgccaatgcccctttgatgatctcttgggctgtcaataggcgcaggcgcaacatccgccccacccctgtgcgaagcatcacttccactccacctagggcttcattgagcccgcttctctctcttgcgattcctactttgttccacatgagcgagcgaagcacccctttgagttcattgtcatattcgcgctctagattctcctcggtgaggcgaaactctctaggcttgaaatgggtctctttgcccatgatatgctccgccgccatttgagaaaagaccaatccctctagaagtgagttgctcgctaggcgattagctccatggactcccgtccttgcacactcaccgacggcgtagagattctccattcccaaaacgcgcgcaaactcatccgtctcaattccccccatgcagtagtgaaacgctggtgagatggggattttatcctcagggattctaaagccataggaggtgagattgcgataaatattggggaatcgctccctaaaaaagttctctttaaaggaggcgaggtcgagatagacctcgctttgcgtccgttttttgtaatcaaaaatcgccctagaaatcacatctctgggggctaattcaccgcgtgcatcgtaatcgactaaaaatcgccgacccgattcatcgaccacctttgccccctcccccctaagggcttccgagagaagaatctttcgtgcatgactgctcttgacaaaaacggttggatggaactgtaacatctccatgtcgcggagcttcaagccatgctcaataatcatcccgtgcaggtcactgctgatggtgtgagcattggtatggtattcaaaaagcgctcccacaccgcctgtagcgataatcacttcattagcgtagaggttgtagttgcctcgcttggtggtgacgctcacgccatggcagcgcgtgtcatccaaaagcaaattagtgacggtggcattcttccaaagcgtgtgatgaatggatcccatcagatggctatgcaccacgcgccccgtcccatcgcctcctgcatgaacgatccttgagatggagtgcgcgccctcttgggtgtagaggagatttccctccaagtcccgatcaaaaggaactcctcgacgcaatagatcagccagcacccctaggcttttttggctcagggtctccactgctttaacatcgcaaagtcctacgcccgcacctagcgtgtcactcacatgaagaggcacatcctcttggtctttggcgagggcgattcctccttgggcatagaaggtgttgcattcccaaggttggtctttacagagaatgaggacttttttatccttggggagctggaggctcgcataaagccctgcgatccccgccccaataataatgacatcataaaccatcaagaggaaaccttttgggtgttttggggtttataaaaggggtcatctttgtaaccgcagccacttagggcaagaagggcgtatgctataatcaccgcatgaaaaaggcgaacgaaatcgtggctcatctgtcagaggctcctcaatatacgaaactccaaaagcaatcaacatggaatcgcttcaaaaacctcttgcctttcagccttcggcagtcgattctcttcatgtatgagcgaggcggtgtgctctttttcgccctcaatcatcccggttacttaaaggagtttaattataagctctctttgataaagtcgttattaaaagaggcagccgcactcctccctgatcttcgctccatcaacgatgtgaaggcatttgtgagccatcaagcccttggcacagaggagaaggatagccttagcgactaccactacacagagaattctcaagccaccttctccaatttggccaccacccccgaaatccacgacaaaatcgaagagatacgagagattatccattgcaatcagaaaccctcctagagacccttcaaaatctccccgatcaaagtggagtctatcactacttcgattctcgctccaagctcctttatgtgggtaaagccaagagcctcaaaaagcgcgtgaagagctattttcaattcacgccgactcttgcgccctcacccaagctctcccctcgaatccacaaaatgatcagcgaagccgccttcatccgctacatcgtagtggagaacgaacacgatgcactcatccttgaaaactccctcatcaagcagctcaaacccaaatacaacatcctcctgcgcgatgacaaaacctacccctatatctattttgacgaaaatgaatccttccctcgcctagagatcacgcgcaagattctcccccacaaaggcgtgcgctactttggtccctacaccacaggagctagagagctactagagagcctctatgagttgctccctttggtgcaaaaaaaagggtgtcttaaagcccaaaaggcgtgccttttctatcagatccatcgctgtctcgctccttgtgaatccaaaatctccaaagagcgctatggggagattttcaaagaggctctagggcttctccaaaaccactccaagctcatctcccgcctcaaagagaggatggaaaaactggcagagaatcttcgttttgaggaggcaggagagctgagggatcgaatcgaaaagatcaaaagaatcgaagccttctctggaattgatctcgctagattagaggatctcgatattctcgccattgccactagcggcaagcactccatgcttacaagactcttcatgcgcgaaggcaaggtggtctctagcaccagcactccgctcaaagcccaagaggggctggatgaagaagaggcctataggcgtgcgattcttcactattacgactctttcatgcccctcccccccaagcagattcttcttcctttggagcttgaatccaaaagagagcttgaggctcatcttgaggggctttttggacgaaaaatcccccttcatcaccccaagcaagggagtaaaaaggctctcatcgaccttgctttgaaaaacgccgaagagcttttgagattggagggggaaaaagaggagattccccttttagaatcgcttcaagaacttttggggctcgaatcgctcccaagaagaatcgaagcctttgacacctcccacctaagaggcgaggcgtgcgtgggcgcgatggtggtctatgaggaggggttttgcaaagagagctatcgccgctacgccctagaaggcagggatgagtattcacaaatgagagagatgctggggcgccgcgctgaagcatttgatcgagaatcgcctcctgatttgtggcttcttgatggcggattgggtcagattcgactcgcgcaagagatcattgagagccttggagccaatgtcgaaatcatcgccattgccaaagagaagattgacgccaaagcccatcgcgccaaaggagctgccaaagatattctacgcacccccaccgaggagattcgcctccttcccagcgacaaacgcctccagctgctacaaaaaatccgagatgaggtgcatcgattcgccatcacctaccatcgccaacaaaaactcaaaaaagatcgccaaatcgatctcctggagattaagggaatcaaaaaaggcaaactcaagcggcttttggacttttttggaagttttgaggccatcagagaagcgagctttgaagagctttgcaaagtggtgagtgagggcgaggcgagagctattttggaggcttcattttaggaagtttgcttcaaaagtaacatttttagctatagtgatcttttgggtttctattttcatgcgttgtcaccatttgacctttttttgaatgcacctcaaggagagctttgacccgaagctcatcccgctctatccttgcccgtgatcttttcctaatccttccatgatttcgccacctctttaggcaagaccccaaaatgcctaaagaaagcggcgctaaagctcgactgttgggcgtatcccacctctttggcgacttcgcccacgctaaagattccctcttctaaaagacctctggcgcgttgcattctaaagagaaaaagcatctcataaggagccacgccaaagagccttttaaacccaaacttgagcttgaattcgttgagatgaatcgctctggagagctcgatcaaagaggggggattcttgagattttgctccaaaataaccctcgctttatgaagcgcctcaagatcatatcccgaaagcttcactcgctccatccctcctctcgtctcctctctttgaagctcgcatgaaagaatctccaaaatctggctctccactctcagtctatccgcatcgctctgggcgcctcctcgcccttgatagaggcttttggcgatccattcgactttgggattagaggggagcagtcgaggctctttggcgatctttttccactcgatttcacgagatcgtaaaaaatcctcgtgaatatgaatcccaatgctatgcacgctcacccctctcgccactctagtgattccgctgggatgcaaagcctccatcgccgtggtgtatccgcgcctgtattcaaaagagcctttgggctggctcgtctcaaaactcacgccgccttccagcaccacatgaataaacgccccaccaaaaaaagcgctctccttttgctcgatgaccacctcatcttcggctctcaaagtgcatttaaacagggtgattcctgatgcgatccactctttttgggctctatagattcccctcttttgcggaaagaccaaatgctcacaagaatcactcgtctcactcatgaattctctaagattctcaatattcaagcgatacgacacaaaatccctcccaagaaaaaaataatccttcacgcctaaaagagtggttgattttgatattcattcccaattatactccgattcgataaaatccaactcacaggaatcaacccaaatgaaaactgcacactctctcttctcttcacttgtggctctctccatgctgcacacctcagctcttgccaacgatgaggctttaagccttgagaatgtcaccattaccgctcaaaaacaaaaagagaatctccaagaggtccccttgagtgtcaccgtttttcaagagagcgatttagaagatcgcaacatccgctccctccaagagctcgccccctatgttcccaactttttcctttttgatcttggcaacatgggtgccctctcgcccacgattcgaggactcagcaccaatgtcacgctaggctctcccacggtagggctctatgtcgatggcgtcccctacacaagcaccatcggatatgatgtcatgatggaggaggtcgagcgcatcgaggtgttgcgagggcctcaaggctcgctctatggcaaaaatgccgaaatgggcgtagtgagtgtcatcaccaagcaaccaaacaacgaatttcgtgccaaagcaggcgtcactctagggagcgacaatcttcgtgaatataccgcctccgcctctgggccacttgtccgagatagactctacctaggaatcgcgggcaaacattatgaaaaagatggcttcatcgacaacacttacacgggcgaaaaatatgatgaccgtgagcacaactacggcaagattcagcttcgatatactcccagcgaatccctagatatttcactcatctcttcgcgcctcaagtatgatgacaaagccctctccatgaacgcctatcccgttcttgataaacgaaaaatctccagtgatgcgggctttaacaagtctgtagtcgagactcacgccctccatgtcaaatacgcacccaacgactaccaaatcgaatcaatcaccacctacaaaaaagaccgcgattatcgcctctcagatatggactttacctcttctgtgggctatcacacgctccaagatgtggctcagcgcaacctctcagaggagttgcgactcagcacccaaaaagatcactacaactggcttcttggtctctatggcgaccatggaaaaagccaaggaggctatgaagccttctcgccttggccgggatacgcaggagtctttcgccaaagccaaaagagccgatcccttggaatctttgcccatgcaggctatcaatttgattcgcactggaaactaagcggcggcgtgcgttatgatcgcgacaaaaaatcaatcgatgacccaagctatggagtgcagggcgatgagagctttagcgaggtctcccctaaaatcgctcttgagtatcgattctcccctgaaaccagcgcctatatctccgccaccaagggctatcatagcggcggattctatgtctattctgccccgggctactccaaccaatacgataaagagacgctctggagctacgaggctggggtcaaaaactccctctttgggaatcgtctcatgctcaatgcctccctctactatatggatattgacgatatgcaggtgctctctgttgtcaacagctatggacaaggctatgtctctaacgccgccaaagcaacctccaagggcgccgagctagagctagcctttcgtgcgagcgagagcgtgactcttttggcgggggcgggctacaatcgcaccacttttggagagtttagcgattttgcgggcgactacaaaggaaacaccaatccttttgcccctcgatacaactatagcctcggagcacaataccgatccattgagggattttatgcaagagtggactggatggggtatggcaagatgtatcttgataatgccaacgcctacgaaaaagacgcctatggcttgatgaatgccaaagtaggctatgaggccgattcttttgatctctatctctatgccaagaatctctttgataaaaactacgattcagagggttattacggaagatacacctacctctctaagccaagagaagtgggcgttcagggtgtctatcgattctaagttttgccgctaagagactcctcttggcgagcaattttcggattgctttgcttggcatctttccctatactcgccacctatcactttagagaaaggatggcaaaaatgcaacatcgcaccaaaacacacctcctcaccaaagaggagatcaaagaggcgctcaaccttgcccaagtcggtcgaatcggaatcgtctgcagcgatggattcccctatgtcctaccccttcactttgtctatgccgacgagaagatctacctgcacggactccccaaaggaaaaaagatcgaagggataaaacaaaatcccaatgtctgttttgagattgatcaaatggtctcacttctaaaggagggagttgagaatccttgtgatgtcaacaccgagtttaatagcgtgattctgcagggaaaagcctctttggtgggcgactttgaagagaaaaaaagcgcgctaaagagaatcgtagaaaagttcacgcctcttttaatcaaccaagagattcccgacaaaatgatccaaggcaccgccatcatccgaatcgacatcctcaactctacaggtcgatattatcgctaaatccaaaggagcccttctctctaatgtcatccaaaagagagagagcggctccccgctcgatacgccatcgatgaccactcatggcgccgcttcttgagataatcccgcaacaaggaatcaacccctccactcgatcttcaaggtgtctagagagattaatgagcgctttccatgcattcacttgagaattggttccaagattccacggtgacccctcctcgcctctatcaaaaatatatccgagatatttttgagcggctttttcatcatattccaaaatagcctctccccaaagctcatagaatcggccgaggatttcaagcttgttgtcgctcatcaagccgagataacatatccccttgtcggtgaatccaatcaaagcctcaccaaaaggagtctgcccaaagccataggtgacaagaacacctcttcctcgttctcgccactctctgggcgtgacaccgataagattgacaaaaagctcatgaagtcggctggagctggaaagcccaatgtctaggctactctcaagaatcgatcttgattctttgatatgctctttggcgtagttgagcgtcacgcaatggaggaattgctttggggtcactcctgcatactccttgaacactcggatgaagtggtatttgctcatccctacattttgggcaatctcgtccacggaagggtgtgctctgaagttttcatcgatatatgttatggctttttcaatctgtgcgtaacgatgctcaagaggtatcatctcccttctgtgcccctctcttggtttgagattctatcctcaaaccctaccctaattcttcaaaaatagctacttaaaatagttgcttcatttttagaaagagggattctgcaccttcgatctttaaagaaaaaatgtacatcaagggttgttttaaaatattcataaaaaataaaaatatgcttatctaagtttaatagtatgaagggtagtatattttccacactaatttcagggggtcttaatgcttgtctctcccatttcagtcgacctaggtggtaaaaatacgggttttttcagttttacggattctttggataactcacaatccggcacggttatttatgatgaaagctttgtactatcgcaggttggcagacgaagcaaaagacactccaaaagaaataacctaagaaacaaacttgtcaaaagactgtttctgctgattttacaagagcaccatggcttgtctatagatgttttgccagacgagatacgggggttatttaacaagcggggctacacatacgcagggtttgagctagatgagaaaaagaaagacgcactagagagcgacacgctaaaagagtttttgagcgaaaaactgcaaagtatagatagagatagcgatgtagaagattttttaaaccaaatagcttcaaatgccgaaagcttcaaggattacaaaaaaggatttgaagctgtttttgcctctgcgacacattcgccaaataaaaagctagaactaaaagatgagctaaaaagtgaatatggtgaaaacgcaaaagagcttttggctgggctacgggtcacaaaagagatacttgatgaatttgataagcaagaaaatcaaggtaatttgccaagagcaaaatattttgaggagctaggcgagtacatagctacaaatgaaaaagtaaaaagcttttttgattcaaatagcctaaagctaacagacatgacaaagctaatcggcaatatttcaaactatcaactcaaagagcttagacgctactttaacgacaaggaaatggaaaaaggcgatatttggataccgaataagcttcacaaaattaccgagagatttgttagaagttggcatccaaaaaacgatgcagacagacaaagacgggcagagctaatgaaggatctaaaatccaaagagataatggagcttttgacaacaaccgagcctgtgatgacgataccgccgtatgacgatatgaacaatcgtggagccgtcaagtgtcaaacacttagattaaatgaggagtatctcgacaagcatctcccaaattggcgagatattgccaaacgcttaaatcacggaaagtttaacgatgatttggcggactccaccgtaaaaggctacagcgaagactccacactactccatcgtctgctagacacctcaaaagagatagatatttacgagctacggggtaaaaagccaaacgagctgttggtaaagacgctaggacaaagcgacgcaaataggctgtacggatttgcacaaaactactacgagcttatccgccaaaaagtgcgtgcgggtatttgggtgcctgtgaaaaataaagatgatagtcttaatcttgaagataattcaaatatgctaaaacgatgtaaccacaacccgccgcacaaaaaaaatcaaattcacaatctagtagccggaattttgggtgtaaagctagatgaggcaaaatttgcggagtttgaaaaagagctttggagtgcaaaagtcggcaacaaaaagttatcggcatattgcaagaacatagaagagctacgaaaaacacacggaaatacttttaaaatagatattgaagagttgcgaaaaaaagatccagcagaattgagcaaagaagaaaaagcaaaattgcgcctaacggatgatgtaatactgaatgaatggtcacaaaaaatagcaaacttctttgacatagacgacaaacacagacagagatttaacaacctgttttcaatggcacaactacacaccgtaatagacacgccacgaagcggctttagctctacttgcaaacggtgtacggcggaaaatagatttaggagtgaaacggcgttttataatgatgaaacgggagaatttcataaaaaggctacggctacttgccaacgcctccccgccgatacccaaagaccttttagcggcaagatagagcggtatatcgacaaactaggatatgaactagccaaaataaaagcaaaagagctagagggcatggaggcaaaagagataaaagtgccgataatactcgaacaaaacgcttttgagtatgaggagtcgcttagaaaatcaaaaacaggctctaatgatagagtaataaactcaaaaaaagatagagacggtaaaaagctagctaaggcaaaagaaaatgcagaagacaggctgaaggataaagacaagagaataaaagcctttagcagtggtatatgcccgtattgcggcgatactatcggtgatgacggagagatagaccatatattacccagaagccatacgcttaaaatttacgggacagtgttcaaccctgaaggcaatctgatatatgtccatcaaaaatgcaatcaagcaaaagcggactctatttataagctctcagacatcaaagcgggcgtatcggcgcagtggatagaagagcaagtggcaaacatcaaaggctacaagacttttagcgtattgtctgccgaacagcaaaaagcgtttcgatatgccttgtttttgcaaaacgacaacgaagcatataaaaaagtagtggattggctccgcaccgaccaaagtgcaagggtaaacggcacacaaaaatacctagccaaaaaaattcaagagaaactaacaaaaatgcttccaaacaagcatctatcttttgagtttattttggcggatgctacagaggttagcgagctaaggcggcaatacgcaagacaaaatccactcctcgcaaaagctgaaaagcaagccccgtcaagccacgctatagatgcggtaatggcttttgtggctaggtatcaaaaggtgttcaaagacggcacaccgccaaatgcggatgaagtggcaaaactggcaatgctagatagctggaatcctgcatccaacgagcctttgacaaaagggctatcgacaaaccaaaaaatagaaaaaatgataaaaagcggcgattacggtcaaaaaaatatgagagaggtttttggcaagtcgatttttggagagaacgcaataggcgagagatataagccgatagttgttcaagagggcggttattatattggctacccagcaacagttaaaaaaggatatgagctaaaaaactgcaaagtggttacttcaaaaaacgacattgcaaaactagaaaaaattattaaaaaccaagacctgattagtttaaaagaaaaccaatatatcaagatattttcgattaataaacagactataagcgaactgtcgaatcggtatttcaatatgaattataaaaatttggtcgagcgagacaaggagatagtcggcttattggaatttattgttgaaaactgtagatactatacaaaaaaagtagatgttaaatttgccccaaaatatattcatgaaacaaaatatccattttatgatgattggcgaagatttgacgaagcttggagatatttacaagaaaatcagaataaaacaagttctaaggatagatttgtaatagataaaagctcattgaacgaatattatcaacccgataaaaacgaatataaacttgatgtcgatacccaacctatatgggatgatttttgcagatggtattttttggacagatacaaaactgccaatgacaaaaagtctattcgtataaaagctagaaaaactttttcgcttttggcggaaagtggcgttcaaggtaaggtatttagagctaaaagaaaaatacctaccggatatgcttatcaggcattaccaatggataataatgtgatagctggagattacgccaatatccttttggaggcaaattcaaaaactctatcattggttccaaaatccggcataagcattgaaaaacaacttgataaaaaattggatgtaatcaaaaaaacggatgttagaggattggcgattgataacaactcgttttttaatgccgactttgatactcatggtattagattgattgtcgagaatacaagcgtgaaagtaggcaactttccaatatcggcaatagataagagcgcaaaaagaatgatttttagggctctttttgagaaagaaaagggcaaaagaaaaaagaaaacaaccatttcgtttaaagaaagtggcccagttcaggactacctgaaggtatttcttaaaaaaattgtaaaaatacagcttagaacagatggcagtatttctaatattgtagttagaaaaaatgcggcagattttactttgtcgttcagaagtgaacatatacaaaaactcctaaaatgaccaaacacctctacatcgacgaatacggctcgttcgtcggcaagacaagcgagagactgacggtctcgcagggcggggagttaaaggctgaaatcccgcttagtcgcctaaaaagcgtcaatattttaaagggtggaatatcgttatcaagcgatattattgaggcttgttctcttcgtggaatcaagatatttttccttgattttcgcaatgtcgcccacacggctatcacaagcacagccaaccatgcagtagccaatgtgcgcaaagcacaatttttgactatcgaatcaaaccatggtagagaaatagcaagaacactgatagttggtaagctcaaaaatcaaagagccacactccaatacttttataaatatcttaaaaacacagacaaacagagcaagaagctagaaagtgcaattgaaaaaatcaaagaaacaatagaatctctaaagaatatcgagctttcaaacaacaaacactggtcacaaatcattatgggcaaagagggcgggatggcggcaatatactttgacgctatcggcgcagagcttttagaggagtgtgattttaccactcgtattggcagaggcgcagaggatataatgaactctgccctcaactatggctatgcgatactaacaagttttgtttggcaatccattatcaatgcaggacttgaggcttatgcgggagtcctccacacaaaccgccctggcaagccatcgcttgttcttgatgtcatggaagaatacagggcatgggtggtggatagaaatatcatcaaactcagatcctccctcgcgggcaaaaaagaacttgacgcggagctaaaaaagaaaattatcacagaaatcaatgccacaatgaataaaaaacatctctacaatggtaaaaatctctcattacaaggagtaatgcaaagacaagtttatcgcctagttggtgctttcatgcagcaaaatcgctataaaagctatatttttaaatggtgatgtatgaagctattttttgaagttattgtctcttatgacatagaagacaatagaaatcgtaaaaaactttttgaggaactaaaagacatgggactatcgcctattcaaaaatctgtcttctggggacacctcaagctagcagagataaaaatccttccgaatcttttttgcaaatattgctctgatggcgataaagcattctttgtaaaagctcggctatcctccgagatagttaaaaatggttttggctacactagtaaaatctttgaaatcaaagaatatgacatcatataaactaccaataaatcttattcgtcagtatcttttttgccctagggttgtctattttttagaggtactaaatatccccaaggcatctccagtatgggtaaaagaaggtagtgcgcaccatagaaaacaaactgaacttttcaaacgccgcacactcgctagatttcatcttgagaacgccaagctatctacaaatgtgatgctctttcatgaaaattttaacttttatggtatatgtgatattttaattattagcgaagagagtgtctatcctgtagaaataaagttacacggcgagaagataacaaaggcacaaaaggcacaaattgtagcttatggtgttcttgcggaggcaatctatagaaaaaagcttgagatggggtttgtgctatttgaaaaaaatagcaaaaccataccaataaaaatatcagatggagacaaggcggagataaataatttcgtaaagaagataatagaaatgatagagttaggcaatctacctcactccagtgccgacggaagtaaatgcacgcagtgtgagttcttgaactactgcaatgacaggttttaaaaagtcccgccatgtacaatacagtgggcgggtctattatatctttttgatgatttcaaggcatcgaacggatttgctataaagtgttgcgggaacattctaacaaatttttctaaaaaaaaccttgttttggcacaaggtatcaattttagaaaattttacgattctcatcctctgcaaatacccaaaaaatggacatcttcagaggggggcaacactttatagcaaatccgcttagcctgtgaaacccgcatacagggcaaaccacatctatcaatacgctatgcaacactttatagcaaatccgcttagcctgtgaaactcggtaagctcaattaagccctgtaatagttgcttcgcaacactttatagcaaatccgcttagcctgtgaaactaaacctagaaaacggaatactcgccgcgcctgaaagcaacactttatagcaaatccgcttagcctgtgaaactcgacaatcacggtgacgatttcatgagcacgcaagagcaacactttatagcaaatccgcttagcctgtgaaacctcttcaaattctacaaatgaggcgggttctactttcagcaacactttatagcaaatccgcttagcctgtgaaacatcaacccaaacttttttagtatataagcgactcttcaagcaacactttatagcaaatccgcttagcctgtgaaacgtttcgcagagtagcatgagtgccaccctgtattgcaacactttatagcaaatccgcttagcctgtgaaactctgtgtaaatatctgcattaaacccaagtcttgatagcaacactttatagcaaatccgcttagcctgtgaaactagatttattgttttccttcttcaccccgcccacggcaacactttatagcaaatccgcttagcctgtgaaaccataagagtggcgttcctcatactcatattagtttcgcaacactttatagcaaatccgcttagcctgtgaaacttctttcttgccccttaactgtttttgttgtggtaggcaacactttatagcaaatccgcttagcctgtgaaacacaacatcaatctgagcatcgacgcagaagagtttgcaacactttatagcaaatccgcttagcctgtgaaacgagctcaccgaagcttttcagtctgcgctagcaccgcaacactttatagcaaatccgcttagcctgtgaaacctgatactcatagagcctacgaggcacgggctgtagcaacactttatagcaaatccgcttagcctgtgaaacactccgcaagagcgaatctatcgaactacaatgtgagggcaacactttatagcaaatccgcttagcctgtgaaaccaaaagggcattttagagatctacccgctgatgagcgcaacactttatagcaaatccgcttagcctgtgaaacccgcttgaaacattgtatcgaaccactaccgcagggcaacactttatagcaaatccgcttagcctgtgaaactttttatctctttgtagtcaaaacaaatatcagtttgcaacactttatagcaaatccgcttagcctgtgaaaccctcaatatggatgcttgattttgccatctttccccgcaacactttatagcaaatccgcttagcctgtgaaacttgggaactgctcccaacagggttgtttccttcttgcaacactttatagcaaatccgcttagcctgtgaaactttgaccgagtgaaatttcgggtgctcaattcgagcaacactttatagcaaatccgcttagcctgtgaaactttgaaatctcccgacagactgtcaaaaagcgattccgcaacactctataataatcccatccagctttaacaaagcattctttgaatctcaaccagcggtcgattcttaggcgagcggttaaaatatttcaaaaattatattttttagatatgatgaattcccaccaagttcttcagatagtgttacgaccaatggaggtaaaagcctctctacaaaaaggagaaattccatggcaacgcatcaaaaagcttccgtagaaatcgtcaatcaaagcggacacaagcttctcagtgtcaaaatcatccacaaatatagtgacatcgcctcctacaccaagcagctcgactggacctctatcccaaatggcgctaaaagctccaatgctcaagaggttgattacaacacaggagccttcaccacaggcagggattggtgggaggtgacttgggtgaacgatcttggtgaagtctacttgaccgacccacacaacttcagaaatcttctcgactttggagagaagattggtaagtttctctctgcgccagccatggctattggttccaaagtcgccatcaccagcccagagcccaccagcaagaccattggggcagcggtggcagcgacaggcttcatcgccgaactccttcttaatagcgggacgactgatggctacaaacagcacatcctacggagcgaggacaccaaggtgacgactcaggtgatcatcaagggcaacgaagtggaattcaaatccaaatcgggtagctcacacacaggattccgcaaggttcacaccttcccgcttccctattaaaaagaagctttcacactgtgatgtctaggatatggctagagcgcggaggggcgggagcctcttcctctggctcctctttctctgactcctcttcctcttgatgtttggcggactgctctttctctttttccctatcaggatcaagcgcctcggtctcctcggtgggtcttacctcttcgatctcatcgagcttgtcgtccatctcttggagattgaccatcgcttgaaagtcgagtcgttgttgggcattggcgtgttggatggaggaggtttgcatattttggttgatgtaggtgacattgccgatgggagaaacagccatgagttcactccttttttacggtgatagtctcgtgcttggcatagacgacttgcgcgccctccgtgatcttgacaaatttccttttagtaaaatcgacccaataattcccgcctgaaacatccaagaatccgactagaatctccgccgccttttgcaatatattagcatgaatcttcccttttccgccacgaagaatcatatgcgaagagggaatatccctcacatggagccatgtgtcctctgccttggcgctctggaggagtttcacattttctctctcattcttcccaaaggagaccttcaccccctcaatgaaaaagctctcaaactcctcttttttctcctcgctcttgaacgcgcgctgtttttttggcgcgagaatcatcacatcctcgacactcttagcggctttaataagcgctatttggcgattatagaagagaatcttatcctctagcatctcccgctcaatgtggagattcttcgccttttgttctagcttcttggagctttcaaaaaagatctgtgccgcctcactgaagctcctcgccaaaggaggcatctctaggctcacctcgccctcttggctctcaagcttcacacaagaggagaaggaggagagcttgtagagattcgcaagcagaagagctccctgcccccttaggcgctttgcttcttgtgccaactcctcttcgttggtgatctggcttagcgagaggagcagtcgctctcgcttcttctcaatagagagaatcgctcctttttgacgctccaagagctctctttcaaggcgcttttgatactccatctccaaaagctcttggatgccaagcccctcaggcaatgccctctctgctagaggcttggagggttcgggcaaagaatcgagcttctgtccgattttcacctctctaaaagagcgctcatttccgatatgacggagcgcatcaatcaccactcccgcttcatctaacaaaatcgcattcgtattgcgccccgtgaattcgagctggagaatcgaacggagactcttatagctcccccgattctctaggccgatttgaaggattcgattccccccctccactcgcgcccaaaggatattggctctagcggcatagcgctggagcgagaggtcaaaaggggcttgatactgcttcataccaaaaagaggcggagcgataaacgccgtggatcgtccccgcgtcaaatcgatatagtagagcgcattgtcacactcaagcttgaagaggttatcgcccgtgcgtttgagattgacgagcgtctgatgagaggcgagttgctcagaaaatcgccgaagcagagagagattcattagggcttggactcaagacgctttttggcaaactcaagcgcctcaggcgtgatctcgcttccactcacgattcgcgcaatctctaatatctgcccctctctatcaagcctctcaatcgtgcttcctttagcctcttttttgaccaaaaagtggcgatgggcgtaggagggcatgtggggctggtgcgagatggcaagaatctgataggagcgcgagagctcttggagcaccctggccaccccttctgattcctcaccgcttaaattgctgtcgatctcatccaagataagcactccaagcctcttggagtgcctcgcctcaagcgctaagagggcaagccttaggcggttaaactcccctgagctcaccgattcggctttggcattccccagcatgagtcgcacccaatcctgccccttggcatgaagagttgattcttctaaagcaagcttagcgcaaggaagcagaagtgctcctagacgctcattgagcaacgactcaagctttggaacatagctcaatcgactctcgtggagacgactggatagggctttggtgctcttctctagctgggtgagctctttttggagtgcctctttggagaaggtgagattctcataacgctccagctctttttgcttttgcaccagataggcaagcgcctcctcctctccaccatagcgccgattcaaatccgcgagcttctcaagacgatctaagaggctctctgcatccatctcctctagctccaaaagatggcctctctcctcttcaatgagcgctcttagctcgttcatcaccgattcaaagaactctttctcgcgccctagaagctccaaaaaagcattcaccgagcgctccccctccaagaatcgctctactttttcacacgattcttgtatcttctcttttttggagaggctttttttgagcctcatgagctcctcgtgctccccttttttgggattgatctggcggattttggcgatctcaaagcgggcaaactctttgagctcttcgacccttgactcctcctcggcgactctttttagctcctctttgactcttgtaagctccaaaaatcgctccgcataactctctaggagctctttaaaagagggttcttgatggaggataaagccatctagcagacccaaaagcctcgcaggctcaagctcctcaccatttttgggattgacatgcttgataaaccctgaggcgatctccgctacacgcttcttggagagggattgggagttgacaaagtagcgcactttctcctttttgagaatcgagaaggtggtctcctcctcatgagccactccccactcttctaacgaatagggaatctccagcaccccctcaatgagctcggcgttgctctctctaagaccaaagagggctagaatcgattccataaggagtgactttcccgcaccactggctccactaaagacattgaatccctcatgaagttcaaggctctcatgagcaaaggcgggggagtttttgatgagcagtcgcgagatcaagcatccccccaactgaacttctctcgaagcacttggaagtagttatgctcctttttatgcaccaagagcgcgggtcgctccgccactttcaatctcagtcgatccccgtacccaaaatccatgatctcctgcccatccactacgatattggcaaattctccctccagcatctccagctccacctcaaattcgctaggcagcaccaaagggcgctgagtgagcgagtgggcgcaaataggggtgagaatcatgtttttggagtagggatagaccacaggtccgcctgcactgatgttgtaggcggtagagcctgttggggtggcgacaatgagaccatcgccaaaataggtgttaaagggctcctctccgatggaggctttcacatggatcatccctgaaataggtcgccttgtaacgatggcttcattaaaggcaaagaagcgctgagtgcctttaggactggagagctcaccctctagcatgagacgagaatcgatacgatactcgcctgctttgagcttttggacgaacgcctccacttcatcttggcgcacatcggtcaaaaaacccaatcgccccatattgattccaaggattggcttcccatagggatagcttcggcgcaccactgagatgagcgtcccatctcctccaatagagacgagcatatccgattcactgcagaggcgctgaaaatcgcagccataaattccgatcatcccgccgctgatactatcaagcatcacctcgattccctctctctcaaaaagagagcgaacctgaagaaaaaattctttgagtgaggggctggaggggcgcagaatcacgcccactttagagagagaggagaggggctgcataagaatcactcaacaaaataggctttgattcgatagcctcggtggttggcctcttgcacactagggccttcaaagacgaccgctctagggagcttctcttgaatcatcctaatcgcctctctcgctcgaaaactcgccaaaccttcttgcttgagctcaggagagagtccgcgataaggagtcgaatcgacgattccctgcacttcaaacgcgaccactcgcttatcctcctccagctctttgttgacattggccgccaaagagagggcacaattctcaggaatcgcccaaaatccaacattcatcgcgtagcactcggtgatgattctctctttgggcttgagggtgtattggagcttgattttcacgctatcttgctcgctcttagctcccgctaggcttgtgctgaggcgctcaatctgcttttgtttgctctctagctcaatctttaggcgctctagctcaggactagttgattcgcctgagagagcaggaagaatcggcttctccataggggcgttacctcccccaaaaagcggcttgtctttgcttttggcccagaagacataatagacacttcctagcaccaccagcaacaaaaaggtgaagagaaaaatataaaaaacagcacttgatcgctttttttcttctatctcgacttcttcttccatggggcttctcctccttgactcaatctcagtttttaagaggcaataagtctagattgtatcacagggaggattaatcgggtattacggaatcaagcgatttgtcggaggctcactttgaggcgttcataagcctcttgaatgcttctaaatcgttcggtatagccctgcacaatcgaggaatcttgcccataaacattatcaggatgaaactccctagcgagctctaggtagcggtttttaatcgtgctccaatcatcattcaccttgcaagagagcactttgaggctttggcgaatgagcctctcctctttggtcatgtagtcccatgactcaaacccttcaaagcgattgtgcgccttgaacgaatcataatcaaaatcgagcaccacattgtggatcactttttgggagaggattcccattagcttttcccagaactgcgtcctcgtgctatcaagatagagctcttgcttgccatagctcacgatatactcttcaaaggccgagataagatagcggcgcgccagacggcttggcctattgaggcagagggcgattcgctcgggctggatgaatcgcatcgccacctgaacatactctagcacgctcgcctcgtccatgatcttgattcgaatgggaagctcactattctctaacagtctctcaaaagggacacttttttggcgcgactctttctggagtccgatatgataagcccaattgagaaagtaatcttttttgagccgctccccatcatcaagaatcaaaatcgagctagagagccgatagctctgcgaaaaatggcgcgtggcaaacgagatcgcac

SEQ ID NO: 167 - DNA, 24098 bp, synthetic construct
  source 1..24098: mol_type = other DNA
  misc_feature 1..24098: note = Synthetic
ttatctttgcttctttcaaaatatattcaagttgtgataaaaaactatattcacactctaatattttatctattaattttttataaagttcaaattctgatacttttataacttcatttacactattactataagctcttacaagtccccctgttcctagttttattcctccaaaatatctcacaataataactgcactatttataatatttgctccacttaaaacagctaaagatggtcttccgcttgtccctcttggttctccatcatcactacaactttctacaatttgatcaaactcatttaaatatctatatgcgtaaacatgatgcacagcttttggatgctcagtttttaatctttgcatagttttatcaaaatctttatatggaagcaaaaaagccaaaaattttgattttttttcatctaatattgctgtaaactctttttgaacaaatttcaaatataattccccttatgagattagatttataccttacaaaatattttaatattcaaagtagaaataaagcacttgaactaataaagtcaaataaagtaaaaattgatggcaagattgtatcaaaagcttcatttttaattgatgaaagtatgaaaattgagcttttagaagaaaatttttatgtttcaagagctgcttataaactaaaatattttttagaagaattcaaaaatattgaatttgatttaaaaaataaaatagctttagatataggaagtagcacaggtggttttacacaaattttattagaaaatagtgtaaaaaaagttttttgtgtagatgttggaagcaatcaacttcacgaaagagtaaaaaaaagtgataaaatagaatttttcgaaaattgtgatattagagattttagaagtaaaatatcttttgatattataacttgtgatgtatcttttatatccattttaaatataattgatgctataaatagcttagaatttgaaaatattataatactttttaaacctcaatttgaagttgggactggtgtaaaaagagataaaaaaggtgttgtaaaagatgaaaaagccaaaaaacttgcaagagatagatttttggcaaaaactttaaaactaaattggatattagaaaaaaatagtattagtaaacttgaaggaaaagatggaaacagtgaagagtttttctacttttgtagaaaataaaattgataaaaaaagtattaaatcaatagctattggtggatttgatggaatgcatttagcccatcaaaaacttttttcaaatttagatgaaaatggagcaataatctgtattgaaacaggtcatgcatctttaactccaaaattttatagacaagagtattcaaaatatccaatatttttttacgatttacataaaataaaaaacttggatggatttgagtttataaatcttctaaagcttgaatttcctaatttaaaaaaaatagttgtgggctttgattttgcttttggtaaaaatagatcttgcaacactaatgatttaaaaaatcattttaaaggcaatgttgttattattgatgaagtttgtttagatgattctgctattcattcaagatatattcgagagttcttattaagtggcgatataaaattagcaaacaaatttcttggaaaaaattataaaatatatggaaagcatataaaaggtcagggtttaggtaaaaaagagttcgtagcaactataaatcttgaagtaattgattttttacttcctaaaagtggagtttatatcacaaaaacaagttttgataataaaacttatccatctgtgagttttttaggacatagaaatagtacagataatgtttttgctatagaaactcatattttggatgaagatatagaagtaattgttgaaaatgtagcaatagaatttatagaaaaaataagagataataaaaaatttaactcttttttagagttaaaagatgaaataatttgtgatgtaaactttgcaaaaaaatatttttatgaaaagttggataaaataaagaatgactgataaagtatttaataaaaaaataaaaaaacaatttgagtttgatgaagaagttgcaagtgtttttgatgatatgttagaaagatcaatcccttattacaaagagatgcaaaggctaagtattgctttggctaataattttctaaaagatgatgcaaagattgtggatttaggttgttcaactgcttcaactttaatagaacttgcaaaatctagtaaagagataaataatctaaatctttttggagttgatagttctgaagctatgcttgattttgcttcaaaaaaagcaaatgcatatggagttgaaataaattttatttgtgatgatatttttaatgtagatttttcaaactcaaatgtaatttttgcaaattatactttgcagtttataagaccacttttaagagaaaaacttatatcaaagatttttgatagtttagaaaaaggtggagtttttatattttgtgaaaaaattttagcagaatcaaatttgctaaataaacaactaatagatgagtattataattataaaaaaaaccaaggttatagtgagtttgagatatctcaaaaaagagaagctttggaaaatgttttaattccatatactcaaaaagagaatgaaaaaatgataaaagaagctggtttttctcattgtgaaatggttttcaaatgggtaaactttgctttgtttatagctattaaataaaggattaaattatgttagaaattggaaaagtagcaccagatttttgtgcttttaatcaagatgacacagaaatatgcttaagagacataaaaggaaattggatagttttatacttttatccaaaagatatgacaccaggttgtacaacacaagcttgtgatttttcatcaaatttatatctatttgattcattaaaagcaagtataattggagtaagtgctgatagtagcgaaagacatagaaaatttatagagaagtatgatttatctatatctttactagcagatgaagataaaaaaatgtgtcaagattatggtgtttggcaacttaagaaatttatgggaaaagaatttatgggaatagttagaactacttttataattaacccaaaaggtgaaattgctcatatctgggataaagtaagtgtaagaaaaaaagttaaaaaagatggaaagcaaatagaaattttgcatgtagatgaagtaaaaaataaactagaagagttgcaaagtgtttataaatagatttaaatttttagcaatattttgcttttttgtaccattttttacttttgcaaatagtaattttgaaactataaatgtagatattacaaatattgaaaaaaatagaagtaaaattgatattgcaaaccttaaaattggtcaaacaggaatagtaattcatacatatgatgataaatttagcacaattgtatcaaatgtaaaagttatcagctctgatgattttggaagtgttgtagagttttttgcctttgatgatttaaagcaagatgcaattgctacaacaaagagaaaagttgaaataaatgataaattaattttaaattatctttatcaaaactctcttttgattgctccaaattttgaaagttttgatgatatttcaaaaaaatttcctaatttcaactttattcatcctgatattctaggtgcaaaacttaaattcacgaactctttatatcctacaaaaaaagagattcaagattttacaattgaacaaaatttaggtactatttttattgtagttttggataatctttatattttagatagcaaaactttttcaattttagataaatttgattatttacaaaaagatgatttagaaaagaaattacctttttttacaagagttgaagagataaaagatagttttataagcttctcttcttggtttaagaaaaaagatgattatgattcacactatattaaaattttaggaataaaaaaatgatagaaaaaaaacatttagattatattgcttctattgttacagatgaaaatattaaaacagataaagctcatctaatagctttttgttatgacgctacaagaagtagatttgagccagatgctattgtttttccaagaaatgaagaagatataagcaagattttaaaatactgtaatgaacacaaaattgtaatagttccaagaggagctggaagtggatttacaggtggtgcactaccttcaaatggtggaataatattaagcttagaaagacatatgaataaactacttgaaattgatatgcaaaatatggttggagttgttcaacctggacttataaatatgcagtttcaaaaagcagtagaagaagttggattattttatcctccagatccagcaagtgaagagtattcaactcttggtggaaatgtaagtgaaaatgctggtggaatgagagctgctaaatatggtattacaaaagattatgttgttgcattaagagctgttttaccaaatggagatattattgttgctggtaaaaaaacaataaaagatgttgctggatacaatgttgctggaattttaatagcaagtgaaggtacattagctgtaattacagaaattacattaaaattaattcctaaaccaaaatacaaaaaaacatatatgggtgttttcccaaatgtaaatacagcaatgacagcagtttttaaatcacttgcaagtggtgcaaatcctgtggctatggagtttttagatgctcttgtaataaaagctttaaaacaaaaatttcctcaagtaaacttacctgaaaatgctggtggaatattaattggtgatgtagatgcttcaagccaagctgaaatagaagatcaattaaatattttaaaagagtcatttaaacagaatggttcaatagattttattgttgcaaaagatgaagaagaaggtaaaaaactatggtttgctagaagaaatgcaagtccagcaactatggtttatggaacaaaaaaactaaatgaagatattagtgttccaagaagtaagttgccagaagcactagatgaaatttataaaattggagataaatatggtttccaagttccttgttttggacatgctggagatggaaatattcacgtaaatgtcatggtaaaagataaaacaaacgaaaaagagatggctgatggacacaaagctattgaagaaatttttcaattagttgttgatatgggaggaactttaagtggagaacacggaattggattatcaaaagctccttttatgaatattgcttttacagatgctgagatgaatctatttagaagtattaaaaaggcctttgacccaaataatattttaaatccatttaaaatgggtctttaatattgatatatagtaaaaaaacatttataaaaaagattattgcaggagttaattcattttttaatgatgacacaacatattttgcagctagtcttagtttttttactatcttctctattttacctatcattgctcttgctattgctatagtttcaaatatccctgaattcaactcatatattgatacatttacaaactttttattaaattttttaaatccaactcactctgctgagattgttgaaactctaaaaaaatatatttcaaattcaggagaacttggaactattgggattttatatatgctttttgtatatataatgtttttcaaagattatgactatattgtaaataaaatacataaaacaaaaagaagagctatttataaatcattttttatatactcaatcttttttatagtttttccaactgtttttatgttttttaatatttttatatcattaaatgatggaaatgagtttaaaaaacttattctatttttatttacttggcttatgtttttctctcttttcaaacttagtgtaaataaaaagatatctttaaaagcatctgctatttcatcttttataactctagcaactctttcaataacgaaaaatctatttgtatattatgtaatttataataaaacttatacaactatctatggctctttagcaaccttgctttttacatttttttggatttatatatcttggattatatatttatatggaattaaaatgtgtcatagaataaatactttttattaatctaaaagattataaagtttatccctcaaaggcaataaaatatctttatatgacttcttatcttgatttgaaataacttgattgcaatttacacaaagtaatgccaagttttcaacattatacccaccaccaagctctatatcttttataaatgttgtgtaagcttgatttagtttttcaatactatttccacatctattacaaatctgtttatctcttagaaatataatctcttttcttcttaaaaaatcaataggttttttttggcttggtaaagagtttactgcataatcactccataatatctctttttttacctctttttgagtagtttttatatattcaaaatttacaaactgctttattgattcttctattattattgatttcataagtttaatatcttctgttttatcaatatccttacatgctgaacaatcaaacttcatataaggatgctctctttttaaatgaacatcaacaagaccaataaatgcacctaaattttttaaagatttttcatctaatttatctttattactaaaaagttctttaaaaaaattcaacatatttactccttatgtcgagatatatcagcacctattttttgtaattttccttctaaatcttcatatcctctatcaagatgataaattctatgtatatttgtttccccttttgtaacaagtgcagctaatacaagtgctgatgatgctcttaaatccgttgccataacatcagttccacttaatcctccacttttaccatttattgtagcaatattcccatttaattgaatatcagctcccattcttaaaagttcactaacatgcataaatctattttcaaatagtctttcatcaattgtacttgttccttctgcttgagttgcaagtgccataaattgtgcttgcatatctgttggaaaacctggatattctgttgtaataatattcactggtaagatttttgatgttggaaaaattgttaattcatcttcttttatctcaatctcaaaattcatctcttcaagttttgaaataacagcttcgatatgagctggaataatatttttaatagtcaatttttgatttgtaatagctgctgcacacatatatgttccagcttctattctatctggtattacagaaaactcctttatatctaaaagctttcctcctgttccctctattactatttttgagctccctattccttcaatcttcacaccagcactttgaattacttcgcaaagttgtactatttcaggctcttttgctgcatttattattgtagttattccacttgctaaagcagctgccataactgtattttctgtaccaccaacagttactttatcaaaaacaatttttgcaccttttaatccatttggtgcacttgcttttatataaccttgacaaatttctatttctgcacctaaagcttccatagcttttaaatgtaaatcaactggtctttgcccaatagcacaaccacctggaagtgaaacttcacaatgaccaaatctagcaagaagtggtcctaaaactaaaatagatgctctcatagtttttacaatatcataagttgcttttgtattatttatagtgcttgtatctattttcacacaatagctatttttttcaaaacttccacctaacatttttataagtttcaaaaaagtattaatatctgcaacatttggaagattatttataatagtttcattttttgccaaaattgtactagcaattaaaggcaatgctgcattttttgctcctgaaattgatatttcaccacttaattctttgtttccaataatttttaaataatccataaatttcctaactaacttttactaaaataacaactattttatctaaaacttactttaaattactattttgatatacttttggattataaatattaattaataaggattttatttttggaagaaaatgtaaaaaaaggtgtacaatatatgcttattgcatcttttttatttgcactaatgggaattgcagcaaaagagcttagtgaccatttaagcacaattgaaatagttttttttaggaatgtttttggagtttttatcatacttttttctatttacaaatctcctttaaatcagattggtggaaagttttggctacttatttttagaggaactgttggttttgcagctttacttttctttttttataatattgcaaatattcctttgggagaagctatgactttttcaaaaacttctacaattttcactgctttattggcttacttttttttaaaagagcatataggatttaaaggctggattggagtatttataggatttattggtattttgtttattgctgaatttgatggaagcacacttaaaaaaaccgattatttaggtattttatcaggagttggagcagcacttgcatatacttcaataagagagctaagaaaattttatgatggaagagcaatagttttatcatttatggcagttggtacaatatttccacttatttttatgataattagtgagttctactcaaatcctaatttagattttatgttaggaaaatttattatgccaaatccagatgagtggattataataattttacttggactattttcaacttatgcacaaatttatatgacaaaagcatatgctagtgcaaaagctggaattgtaggaacagtttcatatagtaatataatcttttcaatctttttaggattattaatgggtgatgcttttccatcttttatagtactttttggtataatcttgattattcttagtggattaatggtaagtaaaaaatagattagttcaaggctttgttctcaaagccatttagattttgctacttttaggattttttataaatttcaataaaaagtagtttcacacaatatggttccttttatttaattggaaccaattaaataaaaggaagatatattatgctaacagttatgacaggaccttgtgttttagaagatatggatacagttttaaagattgcagagaagttaagacctttgagtgaagataaaagagttgatttttattttaaagctagttttgacaaagcaaatagaacaagcctaagctcatttcgaggtccagggcttgatgaaggtttaaaaatatttgaaaaaatcaaaaaagagtttgggtacaaagtagttacagatattcacgaatcatatcaagcagctcctgctggagagattatggatattttacaaattcctgcttttttatgtagacaaaccgatttacttgtagctgctgctaaaactcctgcaaaaataaatataaaaaaaggtcaatttttagcagctgatgctatgaaacatcctgttgaaaaagtattaaacacaagaggagtaaatgaagtaagttatgaaagcagtaaagaagctggtgtttggctttgtgaaagaggaaatacttttggatatggtgctttggttgtagatatgagaaacttactacttcttaaacaatatgctcctgtgatttttgatgcaacacatagtgttcaaattccaagcactggtggaacaactgggggaaatagctcttttgtaccatatatggcaagagcggctgctagtgttggagttgatggatttttctttgaaacgcatattgacccaaaagttgcaaaaagtgatggtccaaatatgcttcatattgatcaactttataaaacaatgaatgagatttttgctattaaagaggctttaggaaactaaagctttatttgtaaataagcttattttttaattcttttgatagaatatttcctaaaattttaggggattttctatgaatacaacttcaataattagccttgatttaggtggaaaaaatactggttttttctcttgtactacaaacgactttaacaacttaaagaattttcaatcaggaactattatttatgatgaaagctttattttatctcaagttaatagaagagggaaaagacatacaaaaagaaataatcttagaaggaaattagcaaaaagactttttttgctaattttaaaagagcattataaattaaaaatcaaatatctcccagatgaaatattagctctatttaataaaagaggttatacctatgctagttttgaactttcatctgaagagcaagaaagcttattttctaacatattaaaagaatttttaaatgaaaatttaggaaatttcaatatatcaaatgatatagaaatagaggattttttaaatcaaattgcttcaaatgaaaatactttcaaacaatactccaaagattttctaaatctttatgaatcttcaactttcaaaccaaaaaataaaattgaattaaaagatgagataaaaaatatttatgaagataaagaagatcaaaaagaactttttgatggattaaaaactgtaaaaaaaactttagaagagtttgataagcaacaaaatcaaggaaatcttccaagagctaaatattttttagagataaaagaagagataaaaactaactcaaacattcaaaactttttaaaaaatagtaatttagaagaagaaaaaataaataatttaataggaaatatatcaaactttcaactaaaagagttaagaagatattttaatgataaagaaatggtgcaaggagatatttggatagaagataaacttcataaaatagtttggagatttataacttcttggcatccaaaaaaagatgaaactatcaaaaaaaatcaagatgaactaacatctaatctaaaaaattcaaaaattatagattttttaacacagaataacccaaataaaactattccaccatatgatgatatgaataatagaggagctgtaaaatgtaaatctttaagattaaataaaaactatttagatactcatttaccaaattggagaaatattacaaatcgtcttgcaagtgatagtttaaaagagaatttaaaagattgtactacaaataaaagcgatatagatttaactctacttcatagactattagatacttcaagtagcattgattcttataaattaagagaatataaaatagaaaattatgtagatattttaggcaaagatgattcactaaaatttaaaaaatttactcaaaattattatgaaactattacaaaaaaagttcgtactggtatttggcaaaaggctgatgagatttttgaactttgcaatcacaatccaccctataaaaataatcaaatacatactttagtaaatggtattttaggagtagaaataagtgatacaaaatttaaagagtttgaagagactctttggaacaaaaaaattggaaataaaaaattagtaaattattgtaaaaacatagaagaacttaggaagaaaaaaggaaatctatttaaactctatattgaagagttaaaagagatagaaaaaccagatattgagcagaaaaaagatattaaaatattaaatgatgaacaacttctattttgggtagatgaaatagcaaattttttcaaattggatgatatttttaaatcaagattttcaaactacttctcaatggcacagctttattctattatagagactaaaagagctggttttatgtcaacttgtaaatggtgcagtgctgaaaatagttttagaacaaaaacaaacatagaaaactttactttatatgataaatctactggtgaaaagttagaagatgtaatatttgatgaaaatattcacataaaagtatatgaaaactcaaatgctcaaagacttccagctgatacacaaagaccttttagtggaaaaatagaaaaatatatagataagcttggatatgaaattgcaaaaattaaagcaaaagagcttgaaaatataaaagagaaaaaaattgatttaaaaattgttttagaacaaaatagctttgaatatgaagagtcaataagaagtgcaaaaattaaaaatgcaaatgcaaaagctaagaaaggattagaagatagtaaaaagttttttgaaaaaagtatcgaagaaaaagagaaaagaataaaaaatttcaacaataaaatttgtctatattgcaataatgaaattacaacagatggagagattgaccatattttacctagaagctatacattaaaaaactatggtacagttttcaacagcgaaggaaatcttctatatgttcatcaaaaatgtaatcaatctaaaagtaacaaaatttataaactagaagatataaaagcttctataaatgtaaatgaagttgaagagcaaatatcaaaaattaaatcttataaaacttttactcttttaaaccaaaaacagcaagaggcatttaaatttgcactttttttaccaaatagtagtgaagcatacaaaaaagttcttggatttttaagaacagatcaaagctcaagagtaaatggtactcaaaaatatttagctaaaaagattcaagaaaaacttataaaaatgtttgaaaaaaaaggctttaaatttgactttgaatttattttagcttctagtgaagatgtaagtagattaagaaaagattatgcaaaacaaaatccaattttagaaaaaccaaaagatagcaaacaatctccatctagtcacacaatagatgcagttgttgcactctcaagtgtatttaaaaaagttacaggtttagatgatattccaacttctaacaaagttttagaatttgttcaaataaataatattccaataaaaccattgggaaaaatagaaaaagaaaaaattgggaatttaggaaatggttcaatttttaaagatagcatttatcaagaaaattttgcccctatatataagtttgaaaacagattttatacaggttttttaaaggcttcaaaagttccagattttaaaaattgtatagagataaaatcttctgattttgaacaaatcaaaaagtattttaaaaatgagataaaaaaagagaatggattagttatttatcaaatcaataaacaaaatactttagatttatttcataatatttctaacaacttatctaatcaattaaatttagcacaaactttaaataaattttcatataatcttattaaaacttctgttgaaaatgctccaaaaatattaaaagatagtaaaaaaacatctacaaaaatttatggaaaaactcttattcttcctataaaagatgaatgggaaagatttgatagttttttcaaaaaagagttaataaatcaaaatatcgaatacaaagaaaaagatggaaaatatcaagtagataatgaaattttaatatcaatttgtaaaaaatattttaatatccaaaataaaaacattagaaataaagctagaaaagtattctctttaccttccgttgaagcacctagcggtggttttagaataagaagaaaaaatcataaaaatgaagatatatatcaacttgtaggaatagatggagcaaaatctgctggttttgtattagaaaatgggaaaataaacagttcaaaagatgtgctacttccaactttagtaaaaagtaaaaatatctcttttaaagaaccagcaaaaaaagagatacaagagtatatagatatgaataattttaggaatttaacagattttataaatttggaaaatattagtatatttgtagctcctgcttcaaccaatagacctttagttaaagttgaattagattttaatttactaaaaaaaatcctaaaaaatgaaaatctaaactttttagaactagataatataaagcttgaagatgaacaaaaagaaatatttgatgaagtttttaattcttgcaattttgtaccaagagataataaaataaaaatattaaaagcagattcaaatcgtgttttgattgaattttcaaacaacaataaaactataatgaagtattatgacaaagctgaagatataaatatatgactaaacatatctatatagatgagtttggcacttttttaggaaaaacaagtgctagacttacaattagtcaaaatggtaaaaccttaaaagagattgctctaaatagaataagtacaataaatattctaaaaagtggtatatctctttcaagtgatttaattgaagcttgttcgttaagaggcataaaaatatttttcttagattttaggaatattgcacatacaagtttgagttctacagcttctcatgctgttgcaaatacaagaagagctcaatttttaacaatagaaagtgattataaaaaagagatagcaagagctttaattataggaaaacttaaaaatcaaagagctactttacaatatttttataaatatcataaaaagctagataatattccaaaaaaactagaaagtgcaatctctagcttaaaagaaattttagattcacttaaaaccttagaacttaaaaatcgtccagactggttaaatattcttatgggaaaagaagggagtgcagcaaacatatattttggagctatttcaaatgacttattaaatgaatttgagtttaaaaatagacaaggaagaggtgcaaatgatattataaactcagctttaaattatggttatgcaattcttacaagctatgtttggcaatctattattaactctggtcttgaaccttatgctggagttttacatacaaatcgtccggggaaaccatctttagtattagatattatggaagagtacagagcatgggttgtagatagaaatataataaaaataaaatcatctttaaaagatagaaaatttttagatacagttattaaaaaaagaattattgaagagataaataaaactatatctaagaaatatctttacaacaaaaagaatctaagtttacaatcaataatgcaaagacaagtttataaaattgtaggaagttttatgcaacaaacacactacaaaagctatatatttaagtggtaagaaatggcaatattttatgaagtcttagtaagttatgacatagaagataacaaaaacagaaaaaagctttttgaagaattaaaagatatgggattaaattctattcaaaaatctgttttttggggagaattaaaagtagctgaagtaaatattttacctcatctgtttgaaaaatattgtaaagagcgagataaagcattttttgtaaaagcaaatttaagcaaagatattctaaaaaattcttttggttatgataaagaggattttgaaagaaaagattttttatatgtataaacttcctattcatctaataagacaatatctattttgtccaagagtagtatattttttagaagttttatctatcccaaaggcatctcctatttgggtaaaagagggagaaaattatcataaaaagcaagaaaaactatttaaaagaagaactctttctagatttggacttgaaaatgcaaagttttggcagaatgtaaatttatcttatgatgatttaaacttttatggaatttgtgatgctttaattatttcaaatacaaatatatatcctgtagagataaaactacatgggcaaaaaccaacaaaagcacaaaaaatgcaactaatcgcctatggaattttagctgaaaaaatatataaaaaagagtttaatctaggttttatcagttttgacaaaagtgcaaaaacaattcctataaatgtaaacaatgaaatgaaacaagatgttcaaaaaatagttaataaaattataaatttaataaaaagtgaaaatttaccttatagtgatgctcaagatgaaaaatgtactcaatgtgagtttctgaactactgtaatgatagattttaaaacaataaaaaaaccagccatgctttcgcagttgggctagtctatatatctttttaatgatttcatagcatcaaacgatattgttgtaaagcgtcgaaaaagattatatctaattttttcgaaaaatcaagcactttttaaacaatttatcacttttcgaaaaaaacagataaaaatatacttaagaaagcccaaaatatcggaaaaactaaatgggcgacactttacaacaatatcgcttagctaatgaaacacatttggtacacctggactaaggagaatttaatggcgacactttacaacaatatcgcttagctaatgaaacttatttggtcaagcttatgtagtgccatttaaactgcgacactttacaacaatatcgcttagctaatgaaacttacctgcacttaactgttttaaactttggtcaactggcgacactttacaacaatatcgcttagctaatgaaactcccttgcaagttttgcttcatcaaataaacctagcgacactttacaacaatatcgcttagctaatgaaactttcccaaatacactcaaaatcatctggagcattatgcgacactttacaacaatatcgcttagctaatgaaacgactgtctatttgccaatacattttgccaagtttggcgacactttacaacaatatcgcttagctaatgaaactatatccaatccaagcaatagtaaacaaatcaaagcgacactttacaacaatatcgcttagctaatgaaactactattgcttgagctaatgtagttatccacatacgcgacactttacaacaatatcgcttagctaatgaaacttttgtatcaaattttctattttcaacttgttttggcgacactttacaacaatatcgcttagctaatgaaactcttgcataagaaaccactcgccagaagtagatatcgcgacactttacaacaatatcgcttagctaatgaaacacatctaactcaaccgctccgatactacttcttttttgcgacactttacaacaatatcgcttagctaatgaaacattctttacatttaaaagcaaattcatataggttgcgacactttacaacaatatcgcttagctaatgaaactaagatgaatcaaatctatctgcaaagccttttgagcgacactttacaacaatatcgcttagctaatgaaacatatgtcttccagtgttaaaagtccacataactttgcgacactttacaacaatatcgcttagctaatgaaacttatcttccaaagttgttactagatacgataagaaggcgacactttacaacaatatcgcttagctaatgaaacgactctgctgcaagatttataaacaatccagtttcgcgacactttacaacaatatcgcttagctaatgaaactaaatttacccacttagtaataggtggggtttgtgcgacactttacaacaatatcgcttagctaatgaaaccagtataaactccgccagtaactgtttctgagttagcgacactttacaacaatatcgcttagctaatgaaactactgtgatattgcttcattaattcagcttgtttttgcgacactttacaacaatatcgcttagctaatgaaacttatttattgagttgtcttttttgactgtatcttcgcgacactttacaacaatatcgcttagctaatgaaacgcttcaactaatgctaaatgattagctcttatgtcgcgacactttacaacaatatcgcttagctaatgaaacacagcaccaccgcctggcttcgaaaccgagctatgcgacactttacaacaatatcgcttagctaatgaaacgtagaagagggtggaagtccaactgctaaagtaatgcgacactttacaacaatatcgcttagctaatgaaacttaattgttgcaaaataaggagaataaatatgaagcgacactttacaacaatatcgcttagctaatgaaacaactatattttatctcgcgataggatactaaaaggaagcgacactttacaacaatatcgcttagctaatgaaacacaaattgcaagaggatttcatttacagcgaatacagcgacactttaacaacaatatcgcttagctaatgaaacttattaaacaaatacatataaccaacaacaattatgcgacactttacaacaatatcgcttagctaatgaaacctctgaaacttttttatataatattactactaatggcgacactttacaacaatatcgcttagctaatgaaacctccaacccttgatttataaaatagataatctcttcgcgacactttacaacaatatcgcttagctaatgaaacttaaccttagaagatgcggaaaaagaagctttaaggcgacactttacaacaatatcgcttagctaatgaaacatatcagcacataaatgtaatattatttttttcagcgacactttacaacaatatcgcttagctaatgaaacataatttttatcatatcaccaataaagtaatatatcgcgacactttacaacaatatcgcttagctaataaatcttattaaataattttttgatattatatatatctttatatataatatatccatgaaaaaattacctttagaagataaaatcaaggattattttgaaaatccacttatgttccctattactatgttaattacttttataatagtagttgcatttcctttttttatatttggattttaaactaatattctaaatagttgtaaagcttattttcaattacaatcttcccttaatttatcaaaatactctttttcataacttatcataagttttgaattcataaactcactagcaccttcaatattcccaatagcaataagtctaaaaagttcagatacttctttatcttttgagtttataaatttccaaatattatttaaatcaaatttcttaaactcttttgaaaataaagagatattttctactctattatttatatattttctatttattttattatttaataaaaaataaaaatagtatatatttgtatatgcatcttcaccagccattgctagttcacttatatggaatttataaaaatttctaataaattcactccaacttacactaaatattttttcaagttttccatatttatcatacatttctaaagctcttttttctatcatctcttcaaatttattatttaaatatatatctatatctttgtttgttttatgttttctctcatttgcaagtaaataataagccataaaatcttctgtcataatagtgctttttatagctttatagcttataaaatcacaaattgattttttattttcttcaaaatcttttgaagtagaaaaatttaaaattagtaagatcaaaaaaatagtttttttcataacactctcctttatataattaatccaaaataatatccttttgatattaaaaccgaatcaaaaaaagattttaagtactttttggctaaaatttaccttatttaaaaagatttggagtaaaaatgagaacaattgaaggtcttttacgattaaaaggaaatgaaaaagtagcaataataaatggaagatttaaccatataataactgatagattagtagaaggtgcaaaagatgcctttgtaagacacggtggtattgcttcaaatttagatttaatcttagttccaggagcatttgagattccttttgctcttgaaaaagcacttgcaagtggaaaatacgatgctatttgttgtgttggtgcagttataagaggtgcgacacctcattttgattatattagtgcagaagctacaaaaggtattgcaacagttgctttaaaatatggaaaacctgtttcaaatggtgttttaacaacagatacaatagaacaagcaatagaaagagctggttcaaaagttggaaataaaggtgctgaagcaatggttacaatcattgaaatgctagatttatatagcgaaatggaaaaataatttggcaacaagaacacaagcaagagagtcagtaattggtcttctatatgcatatgatttaggtaatgaagagattgtaaaatttgttgatgatattttagaagaaaaaaagattagaaataaacaaaaagagtttgcattaaacctttttaatggaactataagaaatatagctacaattgatgaagagattataaaatatcttactcaaggtactttggaagatgtaggaagtgttgaaaaatctattttaagacttgctattaatgaaattttatttgagaatctatcaaaagcaattgttataaatgaagcaatagaacttgcaaagaaacttgcaagtgatggtgcaccaaagtttataaatgcgattttagaccaaataaaaaagagttaagatgagtaataatatgaaactttgtgtatctttggatttagaaagttctagtgaaaatctagctttagttgaaaaaataaaagattttgatgtatggattaaagttggttttagaacttatttaagagatggtaaaaagtttttagaagatataaaagcaataaatccaaactttaaaatttttcttgatttaaaattatatgatattccaaatacaatggcagatgctgcagaagacatttctaaatttggtttagttgatatgtttaatgttcatgcaagtgctggttttgaagctatgcaaacagttatgaatagaatcaaagatatcccaaatagacctttagttttagcagttactgctcttacttcattcgataatgaaagttttaaaaaaatctatggagaaaatattgatttaaaagcaagagagtttgctaaaacaacttttgaggctggtcttgatggtgttgtttgctctgcttttgaaagtttagacattaaaaacaatacttcaaaagagtttataactctttgtccaggtattcgtccttttggagaagatagtggcgatcaaaaaagagttgctgatataaatttttcaaaagaaaacttggttgattttattgttgtaggaagacctatttataaaaatgattttcctcaaaatattgttaagaaaattatagataatttatagaattttaaatataaatgcttaactcaaggctttcttaagccttatttaaggcttaagaaactataatttccgtccaatttaactggtaactaactaattgtaaacggacagttgggtgagtggctgaaaccacctccctgctaaggagacgtactggcaacggtaccgagggttcaaatccctcactgtccgccacttgtgggtcgttagctcagctggttagagcactcggctcataaccgagtggtcgaaggttcgagtccttcacgacccaccacttttcaattcaatacaatccaaaaaagactaaaaaccactataaaatcgaacttctaaagattactttaatctaacactatctataataattcatataaatacaactataatgtaggggtaaaataaaaaaccctatttttacaaaaagatacccccaagattttctttacaaggactactatatggctgttattattgtacttaaagatattcaaacaaaacaagcaaaacctaaagcaaaaaactattctttaaatgatggtggaggtcttaggataaaaattgcttctaatggaaataaaatttgagaattttattataaatttaatggtagaagaaaagaaactacttttaaaagttatccaatattactttatatagtgcaagattttaaatatctatttaaaatcattataagctattaatattttaacagatacatttatgcgcttttatgtacaatacaaaattataaaaaaaggcaaaaagtgattaatataaaactagaattaaaaaatttaattgaaaagactatgattccagaatcaaaagattttatagaagaattaaatgatttaataaataacaacaaagctacaaaagatgatgtagaagcaaaaaaagagatgctagtatttttatctgaacttgaaactatactaagtgctataaataaagatgatataacagatgaagaagcagcagatatttatgaaaaaatcatacatatgcttgaatatcattctgaagattaaattattaggtattatgatattttggcgaccccagaaagattcgaactttcgtcatcaagaggaaatcttgaagtcttatatctccatttatttacaatttcaattaacttgaccatcttataagggttttaaggttttatatattaatattcattttatatatttacagatatttacaagaacatttgacaccttaaaggatacctttggcaataccaaaaactacaaaaactatttatcctggaataggatattatcaagataactttaaaggtaaagtatttgttgcaacctttacgataaattctaaaaaatatagaaaaattattggttatgaaaatgatcaattcaaaacaaatgcaaaaattgcatttttgaaaaaagaagagttaaaaagtgatattataaataacaactacataaaaaaagatttaacttttaaagaactatttaaaatatatatagaacatttagaaaattctagatcagtagttagtagaacaattttagcaaagaaaagtaattataatgctcatttcaaatctgtatttgataatttatttattaataatattcaatcttttcaaattcaaaatctagttaatactttattaaaatcaaaagctcctaaaactgttgataatttattagctgacttatctgcaatttttaaatatgcaatgaagaataaatatataactaataatccagttttattagttgataaaccaaaatatgacaatttaagagattatccattaaacatagatgaatcaaaaaggttatttagagctattatagattttaaagaaccattatacaaagagatatttacatttttacttcatggtagaagaaaagatgaagttcttagtttaacttgggatatgattgatttagaaaaaagagtttattacatagggtttgaaataaataaagctaaaaaaaatatgagttatgagattacagatgaactttatgaaattttagcaaataaagaagataaagctggttatgtttttaaatctttagttactggagataaagttaaaaatctaagatgggcttggaaaagaatattggaagctgctgaaattacaaaacctataagaatacatgatttaagacatttaattggtgaaatatctttaaatgaaacagataatagtatggaagtagttgctgctattttaggacatagttctactcgccctactcgtagatatgcaaaagttcaacaaaaagtagcagctcaaggattaaaaaaggtttttgatactttgaagtaattttttatattttaatattatctgttttatataataagagtaaagttatttattttctatatatttttttgcaactttgatacataatccagattttgaacttgcatctattatattttcaccatcattaataagtcttaataaaactaatttcttaattcttatactaatatttgttattgacattaatcttctcctttataattttattttagagcatagtttaatatttataatctatgctcattttattattagattactctaacattctttgcttgaggacctttttcatttttaccaatttcaaaagaaactctttgtccttcatctaaagatgatcttccataacttgatgaattaatttcactatgatgaacaaaaaactcattgttttcattttctaattggataaatccaaaacctttttcactattgaaccattttacgattccaatattttgatttgccatgtgcaatccttatttatttatttgctctaaattaaagctatgaataaagtgtaatgtggagttatatgttactatttaagttagttagtattaatttttgtagatatcaataaaagcaaacgaaagatgtgattaaactcaaaatcatctttaacacctacactatatctgaaaaaataaataattgcaaattcactattatattaattgatataataacttaaagattgaaaaaggtttttgata

SEQ ID NO: 168 - DNA, 24077 bp, synthetic construct
  source 1..24077: mol_type = other DNA
  misc_feature 1..24077: note = Synthetic
gtatcttagaaagcatttaggtatagagttaagcaaagaaaaactagatatcctaaacaatatcatagaaacaatagccaacgaagttttggctcagccgcaaggcatttttgttcaccgtgattttcactcaagaaacatcatgatagacaaaagcggagagcttggagtgattgattttcaagatgcaagatgcggcgcacttacttatgatcttgttagcttgctaaaagactgttattatgagatagatgaagaaactcgcaaagagttggttctttacttcaaagacaaaaaagggttaaaagttgatgatgatacacttatgcgttggtttgatatgatggggctgcaaaggcatataaaagtgcttggtatctttgccaggctttatcatcgtgacggcaaggatggatatctaaaagatattccattgacacttaaatatgtgcttgaaactgcggctaaatatcctcaaacacaaaaattgtgcgagatattacaatgattatatgtcgcccgtcattcctgcgaaggcaggaatccaaaaagattattcaaaagatggatacccgccttcgcgggtatgacgaaaaagtgcgcttaaatgacataattaataggataaaaatatgaaagctatgatcttagcagctggaagaggtgagaggatgcggccgctcactgattgcactccaaaacctttgcttgaagttggcggtaagcctctcatagtttggcatatcgaaaaactaaaaaatgcaggatttgaagatatcgttataaatatcgctcatctaggctacaagatatccgaagctcttggtgacggttcgaaatggggagttaggctgcattactctgatgagcaaaaggaaggcggcttggagagtgcagggggtattatcaaggcgttgccattgcttggcgatgagccgtttttggtagttaacggtgatgtttggtgcgattatgaatttgatagctcatttgagcttggagttggcatcttggctcatttgatattggtttcaaatccagagcataatactaaaggtgattttgctcttaaaaaaggattagtctacagtgaaggcagtcctaaatatacattctcaggcataggatattattctccaagtctttttaaatggcttgaatatggcaaaagagctctaggggaagtactcagagataccatgaagcacgactcggtaagcggtgaagtttataatgggatgtggagagatatcggaacgccccagaggctggaagagataaataggattattggccagtgattgtcactgcgagtttttgaaaaaaacagcggtagtccatgatgtatattttttatcgtataacctagtcgtcatcctcgggcttgacccggggatccatttattgttgccaggttttagaaaaaccgtggtagtccattttgtgcaggattacttgactttggttgtatgattggattcctgccttcacaggaatgacaggaaagatgaaatatttatttttaacccataggatacattatatctttttgaatatccgaaattttttgcataacctcttgacttagtactgtatccatcgcttcaagtgaaggttttaactgctcaaccgaagttgcaccgatgatagtagaggctacgaaatcaaagtttttagagtaagctaccgccaaagtaacagggtgcatgccaacctcatgtgaaagctcaagatattttgccgttgatgctaagctcttttcatttacaaatcttgctgcttgagctctgactctgctatttttatcactcatatacgttgcatatctgcctttatcaacaaattgttgattgtattttccgctcaaaaccccgcctgctatcggggaatatggaagcaaagagatagattcttttttgcatacattggcaagttcatcaaggaatctaggattgtttaaagaaaagttgttttggatactttcaaatctcgaaattccaagcctttttgatgtttcatttgcttttgtaagcccatatgcgctgtcatttgatgtgccgatgtatctgacctttccttccttgacaagctcatcaaatgctaccaaactctcttcaattggaacaacagtgtccggccaatgcatttgatagagatctatatagtctgtttgaagtcgtttcaagcttccttctatggctcttttgatatgaaatctatctattgccgtcagtccatgacggatcggtgggacaaaccacccgtttgctgcacctgcgactttggttgccaagatgatggagtctctaggtttggtttttagccatttgcctacccattcttcggtcaatcctgcaagtttcgcagatggcggaactggataaagctcggcagtgtcaaaaaggtttattcctctctcatatgccatatccattatcttgaaagcttctttttcatcgcattgcgtgccaaatgtcattgtgcccatcgcaatggatgatactctaagtccgcttttgcctatatatctgtattgcatttttatcctttgataaatcgagataagtattttgctactgcatcttcgtcattggtatgcggaagtacgatagaagccacagttttgacttcgtcgagagcattttgcactgctacgctagtgttggcaagtttaaacatttctatatcattgacactgtcgccaaatactgtcaaatttgctatatcatgacccaggtatgaagtcacggtttttagagcatgagatttgtctccatggggatgcaagatagttaggaaccatccccctccgtaattttctggagagagtttatactctactgtgtcgccaaatatatcttttaaatgctcagtcagcggttttaggacttcgtaagatccgaaatatacgacttttaagactctattcattgcccttatcgggtcttgaagcgataatctagggtcatttttataatttaatagaacctctgattgatgttcattgagcacttttggataccaaaaaagctcttctatgctatcgtcttgcaatcctatcacaaatggatatatgccaagcttcgcaccctcgccaatgatcatatcactaatatctttagttagaagtttgagatctattatctctttatccggtgtgactaccatgcttccgtccaatagtatcataggcgcatccagcttcaatttgcacaaaaactctttgaccttgtgaaagcttctagcagttgctatagagagtatggcatgctcgtttaattcattccatattttggcagtatatgggctgatggtttggtcacttcgaagcaatgtgtggtctaagtctgttataaataacggtttcatttatctctttatttttttgcaaagtatagcaaactagatagaaaaatgcaattttaagttcatttaagtaggcatagcgatacaattatttataaaaatcaaaggagttttgatgagattgcttggaaatattctttggcatattccatttttaggttttgtagacgctatcatagtttatctatttggcctattgttgacaatcacggtcgtagccgcaccgatcggattggggttaatggagtatggcaaattcctctttgctccttttagctattcaatgataagcaaatcggatttgaatatagatcaaaatccgatatggcaggggtactcttttataattatgatcatttacttgccgtttggtttgtttatggcaattattggaatatttcaagctattggactcgcacttactatagtcggtattcctgttgcactagtagttgtaaaatcactcacaacttatctcaatcctgtaaataaaaaatgtgtcccggttgatgttgttttagaaatagatagaagaaaagcccaagaagagatcgatagatattgaaaatgccagtacaataaaaccgcttcttttggtataatattttataatatcttataaaatatttattttatttaaatatataagtttttatactttttaaagctttgctgctatatgatttggtaataccatttataaggagttgattatggttataaaattatcaaatttgcttattgccggagctttaagcttagttcctttgtacggtgtcgaatatgacggcgaaaaaagctatatgatcgaaactaaatatgatatatgtgtggttgcaccccaagttgatgaagctgttgctaaaggcgtcaaggtcattgatgcagataaagcaaagggtttatatgatcaaaaggcatatttttatgatgcccgcgacaagcggcattatactaaagagcatataaaaggagctaaacaggtatatttcgatctatcaaaagccgaatacattgtagctcacttgccgtcagacaaagatgaagcacttgttttttattgctacggcgagtcgtgtgcaaattcatatgaagctgctttggcagtaagaaaacttggatacaaaaatatctattggcttataaacggattttcagaatggaaagaaaaaggatacccgctagagtagccttgctataaaagtaccgctataaaataaacaaaatcagtttatacaataacggtatcgttataagagatactactataccgtatcctaccagagcagcgctcagcctcggggcaaaacctgcatggatagcaagggctcctgcagtgatcataggaggcatagaggcttcgagcagtgtcacggttgctgtcatattgtgtatatccaaaactgtaaataccccgatagctatcagcggtatcagcaccaatttcaacaaaagtgctttggtaaaaatggctttatcatcacctagcctaagctgcatagaaaaacctacactgatcaaggcaagcggcaccaaagtgtgcgagagcaattctatgtatggcatggtaatttgcggcatagagcctgcaatggaagcaaataccagggctataaacggcgggaaaaagagtattttttttgcaattacggagatattgatcttctccccgctgaaatatccgactataaatgctccataggtcgagagcattaaaaagctgcctaattggtcataaacgatcgcgtattgtatcgcttctttaccgatgacggcttctagcataggaaagccgaaaaatgacgtatttccaagaggaatgagcaataaaagagcagcaagcacattgcgcggctgatgcctaaaaaacaaaaaaaccaataatactgacaatgccaaaacggaccacggtgtgacaactgctatccataatgagttgttaaattcaatatttggaacttgcaaaagaatagtagcgggaaatgaaatatatatgacaaacagattgaggcttttgccaaaatcttcgggaaatttggcaaacctaagggaatatccaatgataagtaaaattaaaataaataatatctgcaccatgttaactcaaaaaaccgctccctgaaaaattatcttttgctatgattatagacttttgtttctcttttttagccatatctttttctacaaatataggctttctggtttttggatcaagccctgtataatacattacagctgaataagtaccaggtgtgggggtgaatacttgggcttgttctgggttgatgcgaagctctttggtggtaaagttttttaagctttgcatatctcgttcactgcatccagggtgtgctgcgatgagataatatgtgagaaactgttttttgtcttgttttttattgatatcgtcaaacatctttttaaattcgataaggctttgtttgcctggtttgcccatgagtctaagcacattatcttcggtatgttccggggctattttcatttgtcctgatatatgatgggcgagaagctctcgcagataagtctgtccgtgtgctttatccttggctatgatatcgtatctgatacctgatgctacgaaagtttttttgataccctttatttttctgacacttctcataagagatatgagcctggcatgatttggtttcattgctttgcaaagccttttatgatcaacacatctttggtgttcgcaagtaccgtgttttagttttttatcacactcatatccgtacatatttgcacttgctcctccaagatcggaaatgatgcctttgaaatctttatcttgtgtaaaacttgttgcctcggcgatgatcgaagcttcgcttcttgtacgtatagtgcgtccttgatgtactcctatggcacaaaagttgcattcaccccagcatccgtgatgagtagtgatggaataacttatagtttccatgcattttaccctgccgttttgggcatagtatgggtgaagttttctagtatatggcagagccgatacggcgtccatttccgattcttttaaatatctgcatggaggattttggatgaggtatctagagcctactctttgacaaagtcctttagcgctaagtggatcattgttgttgtaaaacagatcaaagagatctatatatctctcttttttttctaaacattcttcatgtgagggcaaagagatatattcttgcttttgggtatctgatatatagcatataccgcgaatatctttagtatcatggctattttgcaaagcagcagccaattctttgatagcttcttcgcccatgccgtaaatgagataatcggctttggagtcaaaaaggacaggtttgcgcagattgttgctccaatagtcataatgcgtaacacgcctcaggctagcttcaatgccgccaagaactatcggaactgtatttttgaaatattgtcttatgagatttgtgtagactagcacagctctatcgggacggcggttgttgatcccgccgggggtataatcatcgatattacgaaattttttagttgcagtataattggctaccatagagtccacgctgccgccgcttactccccaaaagagtttaggttcgccgagtctcttgatatcaatatcactttttgtatccggttgggcaatgatgccgactttaaatcctagagattcaagtatccgtccaacgacggctaccccgatatatggggagtctatataggtatcaccgctaattaatatgacatcgcattgatcccatcccaacgttctcatctcttgaggtgtggtgggtaagaacttggtatgcatcgcagtctatattatagtgaataatcttttctaggcggttttccgccgcttttatttggcttggatgaagatctttgattgcgatcatttctaggcctgtcatctcttcttcgctcaccgcctctatcatctcttgatctgttaaatgacggtttgcctctgccgtgtctgtttcttctgtttctgtcgtcattcctagtcattgctttttggagaagtttttctacatcctcagctttgaatccgatcttttctttgcctttgatctcttgtttttcaagcatcatagaagcaagcatatgtgcgattgcaacgatatctatctcgtgctgaagagttttgactatctctatagcgtgtggagtgatctgtgttgctgagatttgagctatcagttcgtcttgtttgctggattgcacttcgcttctgctcggtatcgattgggtaaccatttttgtacctacatctttttcgatgcgtttgatagtgcgaagctcatttgggcttacaagcgtgatagcttcaccgcttttaccgccgcgtcctgttcttccgattctgtgtacatagctttcactgtcaaacggcatatggtagttaaatacatggcttacatcatttacgtcaagcccgcgcgctgcaacgtcagttgctacgaatatatcaaccgtgccgcttttgaatcctctgatggcaacttctctttgtctttgttccatatcgccgtgaaggacgcttactttgaagccttgtgatgtcagatggcttgcaaggcggtcaacctcttttttcatacggcaaaatatgatacatttggtaggatttttataatctatcaaacgcaccaacgcatcatctctctcatgctcttccactacatagtagtgttgggttatcaaggtatttgtgctctcacttttggtaatagctacagttttaggatcttttaggatcttttcagccagtttgcggatctgtggaggcatagtagccgagaacatcagggtttgtctatcttcgctttggataagttcaaaaatagcagttatctcgtccaaaaagcccatatcaagcatctcatctgcttcatcaagtactacaaattttggagccagtttgatcctgccgccttgtagcagatcttgaagcctgcctggagtagctacaactacgctggcttgttttatacgttctatttgtttgtcatatgatgtaccaccatatacggtagctgttttaaggcctgaatttttaccgaaacggtagatctcgtcactcacttgcatagcaagctcacgggtagggacgatgataagaccttctaccgagccgtcaccagtcatcatgcttagcatcggcaagccaaatgctgctgttttacctgtacctgtttgagcttgagcgataatatcatgcccggctagaattagaggaatagcttctttttggaccgggcttggctctgtgaaaccggcttcgtctatggcttgttggataggttgttttagattaaaatctttaaatgtcattttgttctttctgtttttttattttctataaatatctagttttgtcatctgaattagcttttgttattgtttaagctcgattgttattgaattttgatccaaaatctcttttagatccctaactaattcagtctgaaagtattaacgcaaaccaaatctattgtagaatctatatttaatcagatgaattgattaaattttgtagaagtatcactattatagcataatttgctgaatattaggaatgtgtagtttgtaatggtctgttttgtgatacaataaaaatatttttgcgaggtagagcagggatgtttggcaaacacaagataccgatcgataggatattgggcattgtaaaaagactttatggctttgaggttataaataccaaagaagcctctatagactacgaggtctcagctagaacaattactagggattttaagtctatcagcaaaacaatccctatcaaaaatcacaacggcaattattcgcttgatacttcagggcagcacccgcttggagatgaactaaattaccaccttgtatcatcttttgcccatgatatgaagataaaagcatcttgtatagacaaatcgaacttttcaaaagacattgtctcatttgctgtcaaatatgaaaaattgccaaaagaattgggacttaaaatactaaatgcgatcaaacgaagtaaaaaaataacttttgactacaaaaaatccaaagatgacatcacaagcagaacagcaagtccggttaaaatatttatagataacccaagcggtgtatggtatttggtggcgattgatgacaaagacaacggggtcaaaaaatttaatttatccaagataaaaaattttaaagaaagtggcacaagctttacattatcagatgaagcacaaaaagaagcagacgggatcaaaactgtttggcacagctcaaatcacgaaacttttactatcaagctctatatagaaaaagaagtagctgtatattttaatgatatcaaacttcatcatactcagactatagagcaaatcgatatggacggaggcatagagatatcatgtcaggtaaccaataaaatggagataattcctgctatcaaaagctggatgccgcatatttttatcttggagccaaattggttgagagatgagataatgaatgatatcgagaaatatatacaatttcaagaaggtatggacatataggtgtcaaattagtgtgataagatatcataatgatatgtttttaaattaaattttcaaggaacaagatgcaatctattatttcgttagatttgggcggtaaaaatacaggattttttagttttacatcaaaagatgtttcaagtataaaaaattttcaatcaggaacgattatttatgatgaaagttttgttttatctcaagttgggcgaagagggaaaagacatacaaaacggaataatctgagaaataaacttgtaaaacgattatttttacttattttacaaaagcattacgggttaaaaattgattatttaccaaatgagattttgggactttttaataaacgaggatatacttatgcgagttttgagataaatgaaaatgaaaaagaacagttggaaagtagtattctcaaagaatttttaaacgataggctttcaagttataatatcgaaaatgatgatgaaacagaagattttttcaatcaaatcgcttctgatgaagttgaatttcgagagtataaaaaacattttgaagatttgttcaaagtttcgacacatcaacctaaaaagcaattggagcttgtggaagagattaaaaaagaatttgaaaaagacgatgctaaagagattttggatgggctgaaaatcgtaaaaaaaatcattgatgagtttgagaagcagaaaaatcaaggcaatctaccgagagccaaatattttgaagaacttaatctcgagattaaacaaaaccaaaaaattcaagattttttcaaagcccacaatatcaaaatccaagatatgaaaaaccttattggtaatctttcaaactatcagctaaaagagctaagaagatattttaatgataaaaatatggtaaaaggggatatttggaaacctgaacaccttttcaaagttacttggcgattcgttgcaagctggcatccaaaaaatgatgaggataaagcaagacaaaaagaaaatcttgcaaatctcaaatacaaaaatatcatagagtttttaacaaccacaaatcctatcatgaccatcccaccatatgatgatatgaacaatcgcggggctgtgaagtgtcacactttgagactcaatgaagcgtatttgaacaagcatcttgcaaattggagagaaataactcaaaagttggcaaacgaaaatcagaaaaaggatttggatatttcaacagtcaaaggctggagtattgacagtacgcttttgcaccgtattttggatacttcaagtcaaattgacgaatatgagctgagatctgaaaagccatcattattgcttgaaaaaactttaggcaaccaagcgaataaatttcataattttgcacaagattattatgagcttatcagaaccaaagtgagaacgggtatctggacaaaagatgattatatgctaaaaaagtgtgaccacaatccaccatacaaaaacaatcaaattcacaatcttatagcagggattttaggcgttaaaatattgccagagcaatttgcgaaatttgaaactgaactttggaatgcaaaatttggaaacaaaaaactctcaagttattgcaaaaatattgaagagcttagaaagtctcatggaaacctttttaaatcatatatcgaagagctttttaaagaggatagaaaagagtttacaaaagaggagcaaagcgataaaaagctccttgaaacaaaagttttagatgagtgggtggaaaaaatcggagagtttttgggaattgaagagaaatatagagcaagatttaacaatcatttctcaatggcacagctacataccattattgacacgaaacggagcggatttaacagcacttgtaaatggtgcagtagtgaaaaccaatacagagcatctacaaatatagaagtggatagtgaaactggagagataacgacaaatgcaaatgctcaaagattaccagcagatacccaaagaccattttctggaaagattgagcgatatatcgataaattgggttacgagatagccaaaatcaaagccaaagagttgcaaaatcttcatgaagaaaagatagaactcaaaattattttagaacaaaacgcttttgaatatgaagagtctatacgaagcgccaaaatcaaaaatgccaatgctaaagccaagaaaaatttggaagaattaaccaaaaaatacaaaaaaagtttagaagataaagatgaaagaatcaaagcatttagtggagtaataaaaaataaagacaatagctattctaatggaatttgtccatattgcggtcaaagtttgggcgaagacggcgagatagaccatattttacctagaagctttacgctcaaaaactttgggacagttttcaatagtgaagggaatcttctttttgtgcatcaaaaatgcaatcaagcaaaaaaagagactatttacaaattatcagatatcaaagcacctatcacacaaaaagagattgaagaacaaatcgccacaatcaaaggctataaaactttttctattttaaaacctgaacagcaaaaagctttcaaatatgctctatttttggataaagaaaacgaatcttatcaaaaagtaataaattggcttagaaccgaccaaagctcacgagtgaacggcactcaaaaatacctagccaaaaaaatccaagaaaaactcaaagtaatgttgccccaaattgagtttgattttgagtttattttggcagatgccgaagatgtaagtcttttgagaaaaaaatacgcaagagagaatccactcctcaaaaagcctgacacgcaacccccatcaagccatactatcgatgcgattatggcatttttaagtgtatatccgaaactatcaaaacaagaggagctaccaaacagccaaaaagtcctccaatgggtagagataaacaatctcaaaataaaaccacttagcaaaatccaaaaagaccaaaaacaaaatttaggcggcactacaattttcaaagacagtatctatcaagagcggtttgcaccaatttatgaggttgaaaacaaattttatacaggctttgtagtaaatagtaaaattttggatttgtcaaattgtgcagaacttaaagcaaaagattttgagagtataaaagagtattttaaaaccaaaaaccaaaaaccaaatggacttaaaatctatgagatagacaaacaaaaaacccttacactttttcataacatctcaaaaggattgagcgataaactaaaactagccgaattacttaatagatttagttacaacctgctaaaaacaaaagttgaagaagctccaaaaatccttaaagatgataaaaaattatctactaaagtttatgataaaaatatcatattaccaataaaaaatgagtggcaaaattttgataaagcatttaaaaaacatcttgaagataaaaatatagaatacaaagaaaaagatggaaaatacaatgtgggcgatgatgttttgactgaattttgcaaaacttatttcaagattcaaaataagtctataagaaataaagcacgaaaagtattctcactcccaaccgtggaagctccgagtggcggatttagaattagacgacaaaattacaaaggagaagatgtttatcagcttgtaggaattgatggagcaaaatcggcagggtttggactcaaagatggacaaataaatacagcagttgatgtgcctttggcaactttggcaaaaagtaacaatgtatcatttaaagacccacaaagaatggagcttaaaaagtatatagatatgagtgcttttagagatatttcggattctgtcagtattgatggtatcaaaatttttgtagcacccgcttctacaaatagaccacttgtaagatgtgtgatttttattaataagtttatgcaaattatcaataaccaagactttaattatcttgaactaagtgatttaaaattcactacagatgagagttttggagtactcaaagagaaatttgatgaacttttcaaagggtgcaattttgcaccaagagataaacttaaaattatcaaagcaaatacaaaaggtatagagctggagttttccaataacaataaaactattatgaaacactatgacaatggtattgatataaaactagatgactaaacatatctatatagacgactatggcacatttttgggcaagattagccaaagacttactgtctctaataatggcaaaaaaacaaaagaaattgctttaagccgtatcaagtctatcaatatcctaaaaggtggtatttccctttcgagcgatcttatagaggcttgttcacttcgaggtattaaaatattttttttagattttcgaaatgttgcccatacaagtctaagttcaacagcttctcatgcagttgcaactgttagaaaagcacaatttttaacaatagatgaaggctatggtagagaaatagcaagagcactaatactaggcaagcttaaaaaccaaagagctactttacagtatttttacaaatatcaaaaaaataccgataaacaaagtcaaaaactcgaacttgctattgaaaaaataaaagtagtaatcaattcgcttaaaaccatcgaactaaaaaatcgtcaagattggttgagtattattatgggcaaagagggcggtgttgctagtatttattttgacgcgattggctcagaacttcttgatgatctaaatttctcaaatcgtataggccgaggtgcggatgatattgtaaatagtgcattaaattatggttatgcgatacttacaagttttgtatggcaaagtgtcatcaatgccggacttgaaccatttgctggggtacttcatacaaatcgcccaggcaagccatcattggtattggatattatagaagaatatcgtggatgggttgtagatagaaatatcatcaagctaaaatcacttttaagatatagacatgaactggataaggaaataaaaagtcaaataatcaaatcaatcaatgaaacaatgaacaaaaaatatcaatataatggcaagaaactatcacttcaatctataatgcaaagacaggtttatagattaagcggagcatttatgcaacaaaaacattataaaagttatatttttaagtggtagcttacgatgcagttgtattttgaattactgatatcatatgatatcaagagcaataagaatagaaataagctttacaatgccctaaaagatatggggcttatgtctgttcaaaagtcagtattttgggggcatctcaaaagtgccgaagtcgcaatgctttcacatctttttgaaaaatattgtgaaaaaaacgataaagcgtttttcataaaagcaaacctaagcaaagagataatcaaaaattcttttggttatgatgagattgattttgaagttagtgaccatgagttcatataagatacccattcatctcataaggcagtatcttttttgcccaagagtagtttattatcttgaagtgcttaacataccaaaacaaatacctatttgggttaatgaaggtaaagagtttcacaagagcatctctaaattgctcaaaagaagaacattatcaaaatttggagtgaaaagtgccttgtttgaagaaaatgtctctcttgcttataaagattataaattttacggtatttgtgatggattgatttttacagattttaatatcataccaatagagatgaaactacatggaagtaggcctacatattcccaaaaaatgcaacttgtggcttatggtatgttggctgaaaaaatgtatgaaaaagagtttaatttaggatttatactatatgaaaaaaaatcaaaaaacatccctttaagtatctcatcaaaagataaagaaaaccttttaaaaattgttgatgacatagtacttttgataaaaaaaggattgttaccagacagtagtgctgatgaaaaaaaatgtctacaatgtgaatttgaaaattattgtaatgatagattttaggtaagaaagaccgcagattttcgccccgctcctaagagtggctcgtcatgcggtgtggacgggtctatatatctttttgatgatttcagagcatcatgcaaataagctataatgtgttgcaaggtaattatatcattttttctcaaaatcttgcaacttttttacaagtttttgattttcgaaaaaatagaggcaatttataccaaatgtatccctagaaatcgagagtttctagggggggcaacacattatagcaaatttgcctagctactgaaacattatctaaatcagcacgatttaatttctgaagctgcaacacattatagcaaatttgcctagctactgaaacatgtgtttattattaacatcataaccaccattataggcaacacattatagcaaatttgcctagctactgaaacctagctgcattagatttgcaggtaggttcgtctaggcaacacattatagcaaatttgcctagctactgaaactttgcattagtagaaacaacaatacgatttttttgcaacacattatagcaaatttgcctagctactgaaacatatctccggcttgcttgatttaagcgaactttggcaacacattatagcaaatttgcctagctactgaaaccaaaacggttttttcgtagtggttttagatattttgcaacacattatagcaaatttgcctagctactgaaacgtcgtaattaataataaaatctagcatattaacacgcaacacattatagcaaatttgcctagctactgaaactattgtgcatagacgatacagcagacgccgacgaagcaacacattatagcaaatttgcctagctactgaaacccgtactcatgctagtgccattctctcttgctattgcaacacattatagcaaatttgcctagctactgaaaccattggtgctagttgtaatatatgactcaacatcgcaacacattatagcaaatttgcctagctactgaaacaaatcaaacatagagtttaaaaaactattacaaggcgcaacacattatagcaaatttgcctagctactgaaacattctcatacgaccagctctaactctacgaactctacgcaacacattatagcaaatttgcctagctactgaaacacaatctttttaattcgcccatcgttgtagcgtgtgcaacacattatagcaaatttgcctagctactgaaacccctctcttatacctcttttagtaattctatatttgcaacacattatagcaaatttgcctagctactgaaacttatatttcaaagataaatatttgctcgctacttgaggcaacacattatagcaaatttgcctagctactgaaacagctaaaacactaacaataaaactagcaatcgtagagcaacacattatagcaaatttgcctagctactgaaactcacttagaaacaattgactaggtaaacaaacattgcaacacattatagcaaatttgcctagctactgaaacttacaagattatcagtatctaatagaaaaaggacatgcaacacattatagcaaatttgcctagctactgaaacctgctacaagtaccattcttgcgttagggcttgttgtgcaacacattatagcaaatttgcctagctactgaaacttctaggagcatttttgtaagccattcttgtcgacgcaacacattatagcaaatttgcctagctactgaaacccacttaagcttccaaaagttgtggctgtgttggtcgcaacacattatagcaaatttgcctagctactgaaacttatgttcgttatatttttcaggcttaccgttctctagcaacacattatagcaaatttgcctagctactgaaactcttgccctgctggttataattttgttgttacaactgcaacacattatagcaaatttgcctagctactgaaacttaaagaaccaacgacgctattttatatctgatacaggcaacacattatagcaaatttgcctagctactgaaacttgctttcagcaaggactttttgaccctatataggcaacacattatagcaaatttgcctagctactgaaacttaaaaacattttataacactttaaaacatttaagcaacacattatagcaaatttgcctagctactgaaacctttatagcaagcttgacgacttgttggcaaaagcaacacattatagcaaatttgcctagctactgaaacaattaaaaaataatatatctaccgccgcatacgaagcaacacattatagcaaatttgcctagctactgaaacctcagttgcttagctgcttttatgatccgtacaagtgcaacacattatagcaaatttgcctagctactgaaactcagccgtcatgaccataagttctgctgggtagaatgcaacacattatagcaaatttgcctagctactgaaacacttaaaagagctgatatactagctgatattatcgcgaagcaacacattatagcaaatttgcctagctactgaaacactgatactactctacctacactatcttctagtagcaacacattatagcaaatttgcctagctactgaaacctgattgattagataccgccattttgctagtaatcgcaacacattatagcaaatttgcctagctactgaaacaaatttttttcaaaaatttccttcttgatcggatggcaacacattatagcaaatttgcctagctactgaaacttcttctctcgaccttttgaagtccagttttatatttgcaacacattatagcaaatttgcctagctactgaaacattgctgtgccaatgcacaacacaaccaaagaaacagcaacacattatagcaaatttgcctagctactgaaactcaattatatcatttctagaaacggttgaaaaatctgcaacacattatagcaaatttgcctagctactgaaacgtattttgtacttgcgatgattgcgtaatataaggtgcaacacattatagcaaatttgcctagctactgaaacgcaataatagcaagtgctcctcctccttttatccatgcaacacattatagcaaatttgcctagctactgaaactttccaattaaaataagtctgtcctgaatagccgagcaacacattatagcaaatttgcctagctactgaaacggcatatcataataaagaatgggcccaaaaaatggaaagcaacacattatagcaaatttgcctagctactgaaacgacaaacaacaaagccaaattcaccgcatggaaggcaacacattatagcaaatttgcctagctactgaaacctctctcttttctttttctcttctctttctttttttgcaacacattatagcaaatttgcctagctactgaaactaccaaacttgcgaattatcatcgtctctcttgtggcaacacattatagcaaatttgcctagctactgaaacctgtcattccaatcatccactgttgctgcaccgctaagcaacacattatagcaaatttgcctagctactgaaacttttatatcctttgtttattaacatagttttaattcgcaacacattatagcaaatttgcctagctactgaaacaacatttgcaaggtttcaacagccacggcgtgttgcaacacattatagcaaatttgcctagctactgaaacacacaatgtaaaaatatatttgaagatatggataagcaacacattatagcaaatttgcctagctactgaaaccttgctccatatagtcaaaaccgaccaagaacatcgcaacacattatagcaaatttgcctagctactgaaacttttgtgcatagtgataaactatatcatctgcttcgcaacacattatagcaaatttgcctagctactgaaacagggcagactattaacacaaatagtgggctgaaagatgcaacacattatagcaaatttgcctagctactgaaacctcataaatccgcttagagccccgccaaaatcgccgcaacacattatagcaaatttgcctagctactgaaactatcgtagtaatattccataaagcatcgcgctttgcaacacattatagcaaatttgcctagctactgaaacagcaacaaattttccaagacctccggcgccgaatatgcaacacattatagcaaatttgcctagctactgaaacaagttcaatgcaggttaattgaaagaagattatctagcaacacattatagcaaatttgcctagctactgaaacttctgaatcaaccaagctccaaaagtaccaagaaaagcaacacattatagcaaatttgcctagctactgaaacaactacaaaccgaagtagcggagctgcttgacatgggcaacacattatagcaaatttgcctgtaacaagggtcagccgttgaatttccacttttttgaaataacaaaagttctaatgaaaatgacaacccttagactccgtatcagtttggaatggcatgatttttatttcagcaattcaatacacctctttacgatgtgcgatcttggatataagcatcaggttgttttcctgataaaatatcactctgtaatctcctatacgcaatctataagcgccatcaaatggagtttttagtttttttatcttggtaagtacgggagtgtctgcaaactcttctatgccgtcgagtatatctttggctatagaagggttaagtttttgcagctgttttagcgcctttgggtcatactctatatcataagccaagagattttctcacatcatcatgtttcaccgttttcaatgtacccattttgtattcttgtacagttttggtgacggcattgttatcgaaataatcctgcaaggcttctctgatgatctgagtcttttttttgccattttcatttgctatagaattgagttcatctatgaggctctcttctaaagtgatagtcatttttttggtcatgaattacctttgatttatttaccatactttaccatacttttatatccaaagtcaagaccaaaacttaaagtgtcagccattgaatctccactttttagactccgcattaagtacggagtgacaaaacgagtggattactgtcttcacggaagtgacggcaggagcgccgacgcggttatactttccggtaatacatcttagcgcttgaaatcacaaaagctttaagacattgaattttgacaaatattatcagcgcaaacatattgtaaaatctaaatttgatcagacgaatttattgaattttggcaaaacattacgagcaatgctataatgatagatatattatcccaaggaaaacataatgaaacatctatggctgctactcattgcccttcttacaggatgtgtcgaaagaccaacacatgtgacaccggcggaacactttcagcttgagcgttatcttggcacttggtatgagatagcacgtcttgatcactcctttgagcgcgggctggaaaagatcaccgcaacctattccatgcgcgaagatggcggggtcaaggtgatcaaccgtggatttgatacaaagagcagaaagtggaaagaagcagaaggcaaagcctactttgtagagaatcccgataccggatttttaaaagtttccttttttgggccattttacggtgcatatgtcgtcatcgataccgactatgagacctacacaatgatcagcgggcctgaccgctcttacttttggatactctcacgtaccccgcaactcgattcgcagatccaatcccgtctgatccaaaaagccaaagaagcaggcttcgagactgaaaagctgatctttgtcaaccaccaataaagcctaacccaaaaagggtattttctttgccacctcgattgagggggtaggtgaaaaaacaattctactaaaacgctattgatattttttcaagtagattagttttttgtgtataatgatatattcgaaaaataaggtttatatatgacatgtaatgatgagcagcattataaaaatacacttgacaatacactgcaagcccttaaaaaatataaaaaaatactgtttttaaccacttcaaaccgttggcacggagaagagggcggcgaaaagcctaaaagcaccaagctggcttatgagatagccaagcgactgggaagcgacaacatctctatcatagaagttccgctgcttaagatctatccatgcgaagggaatgtatcgacagccagaggcaatacctgcggggagcttgaagcaaagaaaaaagatccgttcaaaaacccgtcaggctatcatcgctgttgggcaagtatcaacaataaagatgatgagctttggcagataagcaaggagctttttgagtctgattgtgtggtcttttttggctctgtgcgctgggggcagatgaatagcgaataccaaaaattgatagaacgtctcacatggatagaaaacaggcatgcaacgcttggagaggataatgtagtccaaaatatcgatgcaggcatcattatcgtatcccaaaactggaacagcaaagaggtgctgggtactcaaaagaaagtgttgcagttttttggatttaatgtgacagataatttgtgttggaattggcaatatacccagaatgaaagtgatgagagcaaagagtcttatatcgatgcagtaaaacaatttgcaaagatatttttggagaaatgaaaaataatggatccctgccttcgcaggaatgacccgaggtcgtcatctgcaggtctaacccggggattcgcaataatcaattaattataagagttgctgctcaaacccatcaacttttcttgcgtggcttccaagacaagcgtggccccatcattgaaatgcttttctttgatgtttattccaagctgcgagagtatatattctgtctttgccaagtcggcataagcgactgttatctctcgaattgcgagcttctcatacggatatgtttgcgcgatgttcaccacttcattgacagcgttgctatatgcccgcacaagccctccggttccaagcatggttcctccaaagtatcgtactatgataactcctgtatttatcatatcagcaccggctaatgccttgagagacggtttgccgctggtgcccttgggctccccgtcatcactgctgttttcaactatttggtcaaattcattaatgtatctgtatgcatagacgaagtgtctggctttgggatgttcatttcttagtctgctcattagtgtatcaaactggctgtaaggacagatgtgggcgatgaactttgactttttaacctcgatagcagcagtaaattcatgagtgatataaaacatgctgcaattatagcaaaagatattaccctcaataaatcagaagcatataaagcgaaaaatactacaatcaactataacaatgacagagtcaaaatatgatttaaggagtatgaaaaatgaaaagttttcgttttgttttatcggtttttttggctgcggtgttttttatccaattttcctatgcaaaaccgctcgagcttaccatactccatatcaacgaccatcattctcatctagacccggaatccttggagttaaaaagcaacaaaaagacgtatatcatagaagcaggggggatggctagagtagcttctcttataaaaactcttagacaacgatccaaaaatccgcttgtcctgcatgccggagatgcgatgagcggaacgctatatttcacgctgttcaaagggcaggctgatgtagaactgatgaatgaaataggtttcgatgctttcactcttggcaaccatgaatttgacgaaggtgatgaagtgctggcccgctttatagacaaggctaaatttcccgtgatcaccgcaaacgtagaagcgttaaaaggctcagcgctggatggcaagtggagagcgtatatcataaaagagatagacgggcaaagagtaggcatcataggattggaaactgctcaaaagacatctgcatcatccaggccgagcagtgcgattagtttttatgatgagatatttagagctcagcgttatgcagaggagctccgatcaaaagggatagataagataatcctgctaagccacttcggatacgaaaatgaccagaggcttgcgaa

SEQ ID NO: 169 - DNA, 23179 bp, synthetic construct
  misc_feature 1..23179: note = Synthetic
  source 1..23179: mol_type = other DNA
attgctaagcgaaatagctcttttatttttaacatgctgagtttctccatttctcctccaccatttttgtggagagagtgtatcagcctaaatcaaaccgtcaaagaaaaatccctatccatttcaccgtcccgtttccaagtggaaactttgagtgaaataagtggaaacatgtttgtgaaacaggtggaaacataaaactgaaatgactggaaacagttaatcctaagagagctttgtgttgatatgccactctcaaccattggatattacttggcacgatggcagtttacatgtaagaaacctatcaaaagagcgtatgagcgaaaagacagtgctacaaaagagtggctagaagttacctatccggagattaaaaaagaggctaaagcagaagatgctgatatttggtgaatatctcaatcaagattacaagagcaatgttcataaaaatggcttaccaaaaaatcaaaaagaactcaaaggcactacgcaaaactatatgctagaacttcaaaaaaacactcaaaaaattgctaactttttccagcacccgagcgttaaatatgccagttgattattgatgtattttgatgggggagtaataaaatacctaattcatcaaattctttagtattaggctcgacatccataagtgcatcaattctttgtaacactaatgtataatctttttctgttcttattggtgtattttccattttatatctcctctacgtttatagagacatacagttgtcctgagttgccattttgccaaattattactaagtttctactagtcaaaacatacattccaacgactgtaaataattcatatatatttgtaattaacaaacgaatagtgctataattacaaatatatatgaattaggataacactatgcaaaaagtatccattaatatttttgaccaacatgtggcggatatgtatcaaaatgatgatcgcatatttttagaacaagttaatgatatgtgccacaaagtaagccctttacgattatctccgaccataaaagagattgatacaacaacattagcgcatctagaaaaagtggctggctttatcagtgattcattacctggtaacttcggaaatgaaatcttaaagaatttttttcttcaaaatcgtcgctcaaatccaacggtgagtgataagctgctttttataggcaatcgtgggcttggtgcacttacgtttgaaccgtctgttataaacgaagaccacacggaacatacactcacgcttaagagtatgtttgaacaagcacgagaaattcaacgtggtggacattatcacgctctgcaagatgtctttttggtaagtgcacactcttttgtgggaggagcaagaagcaaagctgtttgcgcgataaatcttgatacaaaaactgtattcttaggtgatcgtacaaaaccactagtagacgggttaacacatgtcattattaaatacgatgattctggaaagaaaaagtcagtttattcaaaaattgaatatatctattacagcctagcaaagcaatgtgggcttactatgacagatagttatctcttggaagcggatggaaagcatcattttataacaaagcgatttgatattgagccaaatgcaaaaagataccatgttcattcgcttgccggactcttgcacttagattacaatatcccacgtgcgatagggtatgaggatctcttgagagcggctgttcaattaggagctcataatagtttaaaacaactctttctacaaatggcattcaattatatgtttgtgaatcaagatgatcatagtcgaaatttctcatttatgtgtgacaaagattttaaatggcgagcaactccagcatatgatcttacttttgcgaaaggcggtggacaaaccgtagagcatcaattatctctttacggtaaaccactatctgaaattggcctggatgaaattgcagctttgtcgatggaattttctattgatatggaatttgttgcttcatctttggaagcgatgaaaaaaacgcgagacattgaattaccaaagcttttaaaagagtacgacgtagatactccaaaacaagaacagattttagatgccgtaaacaaaagaacattcatgggggcattataatgcaaagtgacctactgaaaaagttaaaacactcacagcaaaacgcaaagaaaatcgtaaaaagaagattgactccgacaagtacatttgcaacactaaccgatgatgagatagcccaagttatagcgatgcgagctaaagagttgagagtaaaacaggataaaaaacaaagagaatttagtgcagaagcagaactcagctcaccaacgacgtatgcaaattttgaacaaaaagggacaatttctctagccaattttatcaaggtcatgcgaacatttggccgattggaagagttagaagcattattgagaccaaccgttaaagaacaaattgaagatgtcaaagcgaatattctcgtacctaagaaacgcgttagataactctgcacaaaagtcatttttatcttagatttttctagtatctttcgctcttttcacgttacatgtaaaatgttttttctttattctaccaagcatttttacaactcacatcaaaataaattttatttcttaggattcgtagtattttaaaagcacctagcggtgggcttctataatttttattcaattttagctactattgagtaagattttacacgatactggactcaaatggttatgatacctcatgtgcgttttatcattttttgtgtcaaatgtatggtggggatgtctctgctatcgacgcatgcgtccgctattaatggtgaacatacaaaagtgacattgcaactctcttggtttcatcaattccaatttgcaggctactacgttgcaaaggaaaaagggtattacaaagaggtgggacttgatgttgagattattcctttccaatttagcgtcaatagcgttcatgacgttgtagcacagaaaacagattttgctatcgggcgagagactttgatcgttgagagagcacttaatcaaaaaattgtcgccctttatgccttgtttcaaacttcgcctttggtctttatcacaaaagaatcgtctggcattacctccttacaccattttgcaagcaagcgccttatggcaacattgaacgactcttcagaagtctctttaaaagccatgctcaactcccaccatctaaaatctcaagattacgcttttatcgaacatagccataatattaacgatttgatcgatggaaaagtcgatattatgtccgcgtatctctctaaagcgccctttgatctgaaacaacaagggattgcgtacacgatttttcatcccaaagagtatgggtttgatatgtacagtgattttttatacaccagcgaaacgctcatcaaaaaaaccccaaagctcgttgaagcctttaagcaagcctcactcaaaggatggcaatacgcctactcgcatattgaagagagtgccgagcttattttagagaaatacaacacccaaaagctctccaaagaggcgttaatctatgaaggagaagagcttaaaaaactctcatactatcaaactgaaacgcttgggaaaatggataaaaacaagcttcaaagaatttatgatctctacaatgttatggggtatattcccacaaaaatcaagattgaagattttgtgcaagaccgttttggcgagctaagtgacacagaaaaagcctatttggaagcaaaaaaagagatcaaagtctgttccgatcccaattggatgccatttgaaaaaattgaaaatgacaaactaaaagggctgagtgtcgattatctcaatctcatcgaaccgatcataggtatcccctttacactggttccaactgtcagttgggacgactctttacggtatgccaaagagcgcaaatgcgacatgttttcactcgccatgagcacaccagagaatgaacgctttatggattatactaaaccctatctctcaacgcccattgtgatcgcgaccaccaatgataaattttttattgccaaagtggaaaagatccttgataaaaaaataggtgtggtgaagggctattcgctcgtggcattactgaagcgtgaataccctacgattcagcttattgaggttaaaaacattaaagaggggcttgaaaaagtagccagaggcgaactgtacggttatgttgatagcttgatgaccgtggggtatatgattcaaaaagagtatcccactatgttgaaaattgcgggaaaattgaatcaaacatggagtatgggctttgccgcacgcaatgatgagcctgaactcgctcagattttggaaaaagcgttaagcaccctcgatgagaatacacaacagtctattactgccaaatgggtgaatattcactatgaaaatggatttgattatgctctattttggaaattagcctttgtgatcctccttctttttatgctaatgatttatcgctaccgagtcatgcaacgctacaacaccaaaattaaaaaacacatcgaagtgatcgaccagtacgtacttttcatcagtgccaataacgaaggtatgatcaccaacgttagcgaagcgctgtgtcaactcagtggctataccaaagaggagctcctaggagaatcggaaacgattttaaaccatcctgatgtttccaccaaacggtttgaaacggttttaagagcagtactgaaagcccaaaattgggaaggtgagctgaaaagcattaaaaaagatggtacgatttattgggttcatgcgcgtgtttcgcctattgtcgctaaaaatggaatgatccaagggtataacagtttcagggtagacattaccgataaaaagcgtattgaagagatttcgcaaaccgaccaactgacccaaatttacaaccgcctttcgttggatcaacactatcaaaaagagcttttacgggcttctcgcacgccttcaaatctcttctctttgatcttaatcgacattgactattttaaagacattaacgactcttatgggcacaccatgggcgatacgattttggtggagctggcacaattgatcaaacggcacatccgatccatcgatatttttggacgatggggtggcgaagagtttttgattatctgcccgaacaccgctcaaaaagaggcatttcatctggcagaaaagctacgccttatcattgagaagcactcttttggaacgcatatctttcaaacatgcagctttggtgtcacccaataccaagagcaagacaccaaagacagcatgtttatccgcgcggataaagcactgtatgccgctaaaacaaccggacgaaacaaggtaatggcactttaatcgagcacggttacaatgtccactttgatcgacttaaacgctgcggttaaaatgagttcatcacatctgtcaccaaagaggttattgatttttgatgtggcatgatgaaaggtgcaaaacaatgttttgggtttgactttatcggtaaacttgactgtgagtggagcgctttgcccaaactcggtttttaatatgactttttcactggtaaaatccatcgcatcgtcttcatgcactaacagtatcgtttcgtcataacgtttatgaagcttttcgcagcgactggtttgcgaagcgttgttatactgtgctagtgttcgacctgtggtgagatgatagcctgtgagtcttttttcgtgtatctcttgcaccatgcctcgcagttcgtattggtggtagtgaaactcaccatagccatcttccgttcggaagtcgagttgatgtaagatcggtgtatcttcggtgtggacgggccattggagtccacgaacgcggtgacgctctaaacggttgtagcttgcccctgaaaaacgtcggtacgccacttctcgcacctcgttccaaatctgctttgagtcttcatacgcatattctccgcccattttattatcgagcaatttgatcacttcccaatcatcgggcaaatcagacgttacaagtggttgagaaaggtgaagacggcgcatcgcgttgacatacacgcctgttttttcataagcggatttcacgccgatgacgatgtcggctcggttggcaatttcggtcataaaaagttcttgcaccatgatgaattcgacgttatccaacgcacgattgactttgttgctgttggggtgaacatgggtgaggtcttcgcccatattaagtaccgctttaatgcgaccttccaacatctcatcgaccaactgtggtgtcatcaatccaatctctttgggtgtttgataatcggggtcgtaatacggaagcatgcccatatcacacgcaccttggacgttgttttgtccacgaaggggcatcagtcctgcaccttgtttgccgatgtttcctgtcatgagggctaaatgcgttatcgccatcacggcatacgagccatcaacgtgttcggtaatgcctaaaccccaaaagatcatggatcgtttgagtgcgtattcacgcgctactttaggaatcagcttgctaagactttcatagccttcaatgtgctcaaaatactttggattcgcatacgggtcattcaaaatcttctctttaaatgcttcaaaccctttggtacgatcgactagaaaatgttcattgtaaagctcttcggtgatgataacgtacgccaacatatttaaaacaagcaaattggcttcatgcggcatgatgcctttgtatttggcaaagcggtgcagggtgatttcgcgcacatcaaaaacggctagattatcgtgtttacttgccatatcgacgatgcggttggagataatcggatgtgcttcggtggtgttggagccaaaaacaatcataaattccgcgttatagatgtcattgtacggattggttgccgcaccctcaccgatggtcgtacgcatacctttgaggcttggagagtggcaaatgcgtgcgcagttatcgacatgcggagagtttagcgtatgacgggtaaatttttgaagcaggtacgaactttcacacgatgtgcgtgcccctccgatggagcagatgcttttttgcccgtatcttgcttgaatctcttggagcttcatcgccgccgccgttgtcgcaccctctagggttgtctcaaaccatacgtcatctaaaggcgttagtgtcgaagcgatggtttgggctatccagggatttttttctaaaaaacttttttgaatgcggggaattcttagcctatcgggggcatttaaaaattcatagccgtatttgcctttgacacacagattgccctctgagaccacaccctcagggtgagcgaaaatgctttgaattttattgtctttgacattagcggcaatgtcgcatcccacaccgcaataggtacaaacgctgtctatgacttcaacgtgttccatgtttattcacctttggtatagaaaaagtctccatgaacagactcatttttgatctttttaatggcactggctttgagcgcatcgtaacgtgttgcgtctatcttttgctcgctcatcgtgacgcttttatctttgccacaagcttccgtgttgagcacttcacactcttttttggtcaatcttttttttaaaagcagtgccaactcttcatcgcttttggtaagagggcgtttctctcccataaccattaaaataatttttcgtgcttccaattcgtttaatttcatgccagctccactgagtaattgtgtgtattatagcctaacgaaacttttgctatactctaagccatggaaaaacatacactcaactcacattacgatgtcatcatcgtaggttcaggtccagcggggcttggtgcggcgtttaagcttgcggaaaattcaacatattccattttactcgttgaaaaaaagaagataagctcaggcggacttcgcaatgactgtaagcaaaattacacctatcctgtgggatttccctatgagcattggagtaaagaagaggctgatgcgttgctcatcgaggttgcgacacatcttcatcctaaaatcgagcctaaaatcaatcttgaaaaatacatcaaccgtgcgaaaaagataggcgttgagattctaagcatcgaccaagcccatgtgggaaccgacaaatcttccgcgcttattggggacttggttgagaaactcaaatctttacatgtaagcattgcgcttaaaactgaagtgaaagaggtgagcgaaaaacgcaagcaaatcaccttagaaaatggagacgttatcaccttcaatgcgctcattttagccccaggcagagccgattatgattggttgcaagaacagatggacaggcttggcattgcgtatcatgacaacatcgtggacattggtgtgcggattgaaacgagggaagagaattatcccattgtgcgggattactatgaccctaagattttgtttcccaaaaaagtgcgtaccttttgcaccaactcagggtgtgcgcacatcgtgcgtgaaaaatacaaaggctactactcgatcaacggacactccctctctcgtgagaatgagcgcaataacttggtcaattttgcgatgctcaaaaccattcgtttaaccgagcctgtggtgagtggtcagcagtttggaaagatactcggcgaaatggtgatgcaactgagcggtggttctgtcatcatgcaacgggtgggggattttcgtatgggtgtgcgctctaaagtagagacgtttaacaatgacttgtacgactttgaacccacgcttaaaagtgccgtagcaggcgatttgtccttgtgtatgcccgctaaaatcttgcgagacatctggaaatctctcaagatgctagacaccatcattcctggcgttcttcacccttccaccatcatctattaccccgaaatcaaaacctactccaataaacccgaatttatcgataaacacttttgtgtgaaagaaggctactacatcatcggagacggcgcaggaacaagcagaggcatcaccgcagcgtgggcgtcgggtattcgtgcggctttgggtattttaaaggagagggcatgacatcgttgatttcactggatttgggtgggaaaaatacgggattttttagttttacagctaaagacgtttcaataatagatacttttcaatcaggaacgattatctatgatgaaagctttgtgctctcacaagtcgcacgacgaggcaaacgacacggtaaacgtaacaacctacgcaacacgctagtcaagcgactttttttgcttcttttacaaaagcattatgggcttagtcttgattttttacccgacgaaattttgggactttttaataaacgaggttacacttatgcaagttttgaaatcaaagaagatgaaaaagaaaatcttgaaagcgatattttaaaagagtttttgaatgacaaactcaattacactatacaaaatgatgacgaagtagaagagtttttaaatcagatagcttcaaatgaagagacgttcaagaactataaaaaggattttgaaaatttatttggagcttcgacgcatcagccaaaaaaacaaattgaacttattgatgagataaaaaaagaccttgaaaaagaagatgccaaagaacttttagatgggttaaaagtcataaaaaaaattatagacgaatttcacaaacaacaaaaccaaggcaatctcccacgggctaagtattttgaagaactttatcttgaaatagaatacaatctaaaaatccaaaaattctttacatgtaaccatcttcacatcaatgacatgcaatatctcatcggcaatctctcaaactatcagctcaaagagctaagacgctactttaacgatgaagctatggcaaaagaagacttttggtcttgcgaaaaactgcatcgcatcacatggcgatttatccaaagttggcacccaaaaagtcctgaagacaaacaaaggcaaaaagagaatcttgcaaaccttaaaaccaaaagtattattgagtttttaaccaccaccaacccactgatgaccattccgccgtatgacgatatgaacaaccgtggagcggtcaaatgccaaacattgcgactcaatgaggagtatttggataagcatctaccacattggagagccatagcacatacgcttgcaagtgagactcaaaaagaaaatcttgagggtgtgaccgtaaaaggctacagtgaagatagcacgcttttacaccgcattttggacacctctagcatcattgacccttatagacttagaagtgatgagatagatagttattgtgatgtattgaccaaagacaatgcttttgcattgaaaaaatttgcaaaagagtactatcaacttgtcaaagaaaaagtacgaacaggtatttggacaaaagacgatgatatgttcaaaaagtgtgaccacaatccaccacacaaaaacaatcaaatccacaatttagtcgcaggaatcttaggcaaacccatcgcaaaagagcggtttgaagcgtttgaaaatgaactttggaatgtaaaatttggcaacaaaaaactctcaagctattgtaaaaacattgaagagtttagaaaatcaaacggcaacctttttaagcagattgtagaattgggtgaagataaagaggtacaaaaatatcaaaaagagttaaacgaatgggtacgaaaaatcggtgagttttttaacatcgaaacgccttatagagcacgctttaacaaccttttttccatggcgcaacttcataccatcatcgataccacacgcagtggttttaacgctacatgtaaatggtgtagctgcgaaaatcaataccgagctagcacaagaatagagatagatgagcaaacaggggaaattactaccaatgccaactgccaacggctcccagccgatacacaaagaccttttagtggcaagattgagcggtacatcgacaaactaggttacgagatagccaaagtcaaagccaaagagttggagggcatcaaagaagatacgatagatttaaaaatcatcttagagcaaaacgcttttgcgtatgaagagtctattcgaaatgccaaaatcaaaaatgccaatgcaaaagctaaaaaagctcttgaagaagcacaaaaaagagggcttaaaaatattgaagacaaaaccaaaagaattaaagattttagcaacagcatttgcccctattgtgggcaaagtttaggcgaagatggcgagatagaccatatcttatcacgaagttacacccttaaaaagtatgataccgttttcaacagcgaaggcaatcttttgtatgttcaccaaaaatgcaatcaagcaaaacttgcaaaaacagattattctttacaagatttaaaaatagatatttctcaaaaatggatagaagaacaaatcgctactatcaaaacctacaaaactttttcagttcttacgcaagaacaacaaaaagcttttaaatatgccctatttttagataactcaaatgaagcttaccaaaaagtaataagttggcttagaaccgaccaaagctcacgagtaaacggtacgcaaaaatatttggctaaaaaaatccaagaaaagctcaaagcgatgtttccagctaaaacatttaactttgagtttatcttagccgatgccaatgatgtgcatgatttgagaattaaagcgtatcaattgccagaaaagccaaaagactctaaacaagaaacctacagtcatactatagatgcggttatgagtttggtcagtgtatgggataaggtattgccaaaaacagaaaaacctacaaaagaagatattttaaaatttgccaatgtcgaaaattggagtgccctcaataatgaatttttaaccaaaggcaaatcagcaaatcaaaaaatagaagagatgatacaagccaatgattttggtcaaaaaaatatgaggcaagtttttagtaagcccatttttaaagatgaatcaataggagaaaggtataagccatttgttcgctatcacaatcaattttacataggctatccgataagcataaaagacggatacgatatgcagcattgtcaagcaatgatttcaaagaacgatatttcaagggtagaggagattcttaaagacacctctttatgcactcttttaaaagaaaagaatggcattaaactttattctattaacaagcaaagtatcaatgaactgtcaaatcagttctttaatttaaactatcaaaacttaaacgatgcacagaagaaaaaatctgaactggcagaatttgtcatcaatcattgtaaatattatgtcaaaaaaacatcggttatcaatgcgccacaatttattgataaagattcgatgaagccgtacccgttttataaagactggcaaaaatttcacgaagcttacaaaaaagagcttgatgctgaaccaaaaaccaaaaaagataacgggaaattagtttatgatatatcaggcatagatgacttctggactgaattttgcaaaaaatattttggtataaaaacaaaagacaatcgaaacaaagcgagaaaggttttttctattgtggcgcttacttcagccccaggaacagtctttagaatcaaacgaaaaacgcctaaaggacacatataccaagcaacggcgattgacaatcaacaaatcagcggagattatgcaaatgttctgttagctggtaactcaaaaacacttgcgttggcaggtcaaaaaccttcatctgacttgaaaaaagagttgagtgtcaaagagtcaaaagatattcgagatataaagcttgagccatcaagatttttcaaagaggggtttgattgtcgtggcattgaagttattgtcaataaaacaagtgcgaccattaaaaatttcccacttacaaaaattgataaaaaaatcaaaaaacttatttttaaaactctctttgaaaaaaaagatggtaaacgacaaaagcaaaaaacatcaatttcattgaaagaaaaaaatacaatgcaagagacactaaaaaaattattaaaagatagtataaaagttactattagagatggtagcatttcgggtattgaaattagcaaaaaaactgttaattttactttgccgttcaaaagtgaaaacttggcaaaactcttagatgactaaacacatctacatcgacgaatacggcacattcttaggcaaaacaagtgccagacttaccatcagccaaggtgggcaactccaaaaagagattgccctcagtcgcattaagtctatcaacattttaaaaggcggtatcgcactctcaagcgacctcatagaagcgtgttcgcttcgtgggattaagctcttttttcttgactttaaaaacatagcacatacctcgctaagctctactgcttctcacgccgtggcaaatgtacgacgtgcgcagtttttgacgatagagagtgatgaagcaaaagagatagcacgagctttgatactgggcaaactcaaaaaccaacgcacaacacttcaatactttcacaaatacctcaaaaccaccgacaaagagagcataaaattagcaaacgctatcgaaaaaatcaaacaaacaagccaaagcctcaaaaccattgagctgaaaaatcgccctgattggcttagtatcatcatgggaaaagaaggagcggtggcgagtatttattttgatgcggtgggttcggagttactttatgatttggatttttctcatcgcatcggaagaggagcagacgacatcgtcaattctgcgcttaattacggctatgccattttgacctcttttgtctggcaaagcgtcatcaacgcaggacttgaaccctttgcaggcgtcttacatgtaaacagaccaggtaaaccctcccttgtgcttgacatcatcgaagagtaccgtgcgtgggtggtcgatagaaacatcatcaaactcaaatcccacctcaaaggcaaaagctttcttgatagcaccatcaagaaaaaaatcatcgaagagataaacgccaccatgaataaaaaatacctctacaacgccaaaaatctttcgcttcaaagcatcatgcaacgccaagtttacaggttaacaggagcatttatgcaacaaatgccttataaaagctatagctttaagtggtaaaacatggcactgtattacgaggtactggtgacgtatgacatcgaggaaaacaaaaaccgcaaaaaactttttgatgagctcaaagatttgggcttagttgccattcaaaagtcagtattttggggacatctcaaacacgccgagcttaaaatgcttccgcacttttttaaaaagtattgtgccgatggggataaagcattttttgtcaaagccaaactctcaaatgaaatcttagaaaatagctttggttatgacaaaaacgactttgaggaaaaatcctttgaatacctataaactccccatccacctcatcagacaatacctcttttgccctagagttgtgtactttttagaagtgctttgtattccaaaaacaagcccctcgtgggtcaaagagggtgaagttcaccataaaaaacaagccgaactttttaaacgacgcacccttgcacgttttcagcttgaagaagcactttttaaaagcaatgtcacactctctcatgacgcctgtaacttttacggcatttgcgatggacttctcatctcttccacacacatctatcccgttgagataaaactgcacggctcaaaaccaaccactgcacaaaaaatgcaactcatcgcttatggcattttggcggagaaaatatacaaaaaaagatttgaactaggctttatactttatgaagaaaaaggtaaaaccatccctttacatgtaaacgaagaggagaagaaaatacttacatgtaaagtcgaagagatacgccatctgatagaacaaggcaaacttccttacagtaacgcagatgatggaaaatgcacacaatgtgagtttgaaaattattgtaatgataggttttaagaaagaagcccgccatgcctaaggcagttgggcgggtctatatatcttttcgatgatttcagtgcatcgaacgatacgtgttgtaaagtgtcgtgagtgaaagtatagcatttttctcaaaatatcgcactttttttgcaaggaaataatttgcgaaaaaaagagacaatttcgatacaagaaagccccatcaagtcgatgatttgtaaggctacgacactttacaacaccatcgcttagcaactggaacatgcaatgggtagatgtaacacctgaagaggctatcacgacactttacaacaccatcgcttagcaactggaacgcaattctaaacttagagtcaacgtggaaattgaacgacactttacaacaccatcgcttagcaactggaacttatttgtagagggaaaagtgcctcaaaaaacgcttacgacactttacaacaccatcgcttagcaactggaactgatttaaaagagcgcatgaacagtagtgacaaaaatgcacgacactttacaacaccatcgcttagcaactggaacacattaacggtaaacctaaacacaggaacatactttacgacactttacaacaccatcgcttagcaactggaacctaatctctgtaaacatatttgcataccgaaagatacgacactttacaacaccatcgcttagcaactggaactgtctcataaacattaataggttcttcctcttttttgacgacactttacaacaccatcgcttagcaactggaactaaaaactctttgacgagtaaaggaactccaaatatcacgacactttacaacaccatcgcttagcaactggaacaaattgaaccattttagctttaagccagtttgcagacaacgacactttacaacaccatcgcttagcaactggaacttcttagatagccttattattattgatgagtgtcaacgacactttacaacaccatcgcttagcaactggaacgcaactgttagttatgtcgattcaagcgggcatgacgacactttacaacaccatcgcttagcaactggaacgatgatgctaaaaagctgaacgaaaaacagtttaagcacgacactttacaacaccatcgcttagcaactgaaacgcaacatatgatacttgtcgtgctgctgatttttctgaacgacactttacaacaccatcgcttagcaactgaaactaacatgggataaagacctgacatttaactttaacacgacactttacaacaccatcgcttagcaactgaaacctatcgctggacgcaggaatgggaaaggctgagagtgacgacactttacaacaccatcgcttagcaactgaaactggtcttggcttatttttaggtctttggtaattactacgacactttacaacaccatcgcttagcaactgaaactttaacatttttttgcgccacaatgccgatattgagacgacactttacaacaccatcgcttagcaactgaaaccacatcgtcctgccacagtcgtagaagagggtttgaacgacactttacaacaccatcgcttagcaactgaaaccctaaagggtcgcacgtttcaggttcagtaggacgacactttacaacaccatcgcttagcaactgaaacgtatcagagcgaatataaaaaaacgtaccgtttgagacgacactttacaacaccatcgcttagcaactgaaactgacaagattcacgacaaatacctcggtattgattttacgacactttacaacaccatcgcttagcaactgaaacagtagatcattcgtagtattcagatcatcatgcagtacgacactttacaacaccatcgcttagcaactgaaacaagaagtaggcgatctttggactaattcagtaacaacgacactttacaacaccatcgcttagcaactgaaactcataattgacacaggtggacgagatagtgaagaaacgacactttacaacaccatcgcttagcaactgaagcctatgctacgaaatagtgttttgagctttgttggctttttagtcataatgcgtccacatccttagaactctaatgattttttcttcttccaatacttcgtaaacgagtctgtgttgtttatttattcttcgtgatattttacctgttagattgtgtgatagatattcaaatgctggaggatattgaagagggtctttttctatgaggtgtaaaagttccataatctttggtttcaagccacttgattgatgcttcttagcatcttttttggcttgaggagagaaaagcagttggtacatcattaccagtctaatttatcgatggtgacaaagttttgatggggttcgttagaagcatctataatactttgctccattccttctatacttcgtaaatactcatcatcatttttaaattctgcttggtctaaaattgtcacttcattttttgaaaaatggtttaagagccaaaaaaacttttcactaactttatcgtcaatttttaaggttatcgtttgcatcaaaagctccttttaaattgttacctttgtattatagcatatccgcttcatttgattttacatgtaaagtacggtaaaaggcaacacaacccatggctaagatagtttttactatgattatggaaaattcaggagaaaacaatgattatctacattcacggatttggctcgagtggagaagcgattaaagcaaaactgcttcgtgcgtattgccacgaaaataagattcccttcattgcaccctctttgccgacgattcctgatcttgcgattaacacgctgagtgaactgatcgaatcgtatcaagagccagtctatctgatgggctcatctttgggtgggtattacgcgctttatttgagtgacaaatacaaccttaaagccgtactcattaaccctgcggtcaatgcacccgaaacactacagcaagcccttgggcatggagtcaattactacgataatagcgcgtatgagtggaatgcgtcgcatctggagatgttggagagctatgagattgaagagcccaatcttgagaatctctttgtcttgctccaaaaaggcgatgaggtcttagactatgaagaggcgcttgatgttttagaaggtgcgaaaatgatcgtcgaagagggtggcaatcacagctttgaagggctggatcgccacattagtactattcaacgctttttcggcgtcgctttaaaattgtaatattattgagcattttaaccgcaaaaagcgttaaaatcgttccgatgatgatgaaaaaatctactgtttcgcctaagaaaatggcgctcagtccaatggcggaaaacggtaccaaaaagacgaacgaactcacctcggctgcacctaatttttcaatgcctaaaaagaaaatggtattggcaaatgtggaagcagcgagggagatcaacaggatgttcatccaaaaaatgccatcaaacgtcgaaaaaggcatcgcgctgatgtctacaaacaaaacccaatccaacacaacggacatgatgtacatgtaaaaggtaaacactatcggcgaaatcttcgttgatttggagctgataatcgtcagaaccgcccataaaagtgccgcaaggaaaaaatagagattttgaatcagcaaaatatgagcaagatcaaacgtccaaatatgaagcatcgtcaaaacacccaccgcgcccaaaccaagggcaaacaggtctttagaactcacctttttaacacccatcaaagcaagtaacacaaaggttaaaataggaatcatcgtcgtcaccatcgccccacccaaggaagcggtaccaaacttggtcccaaggtaatagtatttgttgtaaaagatcaacgcaagggcgactaaaaccaccaatccaaagcttttgaggtcaattttgaatgaatgtttcagccaaataataatgggaaccatcgtaatcgccgtgatgccaaagcgcaataagatcatctcatacgcactgatataatgccctaaaactttcacattaacccacgaaccaccccatgcgagcatcgcgatgaagagtaaaaaaaagaaaagatttttctgtgtcatagccaactccttggcgaaaagtgtactctttttgagattaggtgtatagaataaaattgcttttttgaagcagtgttttgggtgaataaccgtaaattttgcgaaaagagcggatgaaatgtgactgatcgctaaagccggcatgcaatcctgcaaggcttaaggattcgccttcaagcatgagcgttttggctttgcaaatgcgctccgcgatgatgtattggtgtggggtaagacctgtgtgatgggtaaaaagcctgagaaaatggtacttactcaccttagccgtgatggcaagcgcgtctagactcatgtcggaagcaatgttgtcatgaatgtactctagtacgagcgacatcgcttgggaatcattacatgtaaacggataaggcgtagcgtgatgcgcgaaatgcgcgatgagataagagagggcgtcgatgagtttggactccacaagcatcgtcgcttcgttggtgtaaactgcttgaaaaaagaggaacaaccgagcatagagttcattatcttggatgatgtgtttctcaaaaataggcatctttttctcgccgtacatctgctcatacaagctgcttaaaagctccacattggggtaaaaattggtgtactgccacgcgtgagaatccccaccgtgaatttcaccagggttgatgatgcgagccgatcgctcatacgcttgggtgattttatgctcatgaagcgacgtaaacatgccatggtgcgttagcccaatcgtgtaagtgtcgtgaaaatggcaggaaaaattactggtcgaatcggcgatattttcaaacgccgtgttgtttagtaacgtggaattcatggcaaaactctgtttttaatagcgtgtaaatttcaccgcttgcgctttgccttcgatgccactcacgcgattccacgaggcgccaagtttggtgtaacgcacaaaaatgagtgcgtctgcaccttttttcaaggcttcctctttgagttttgtttccgcttccgcttgggtcggctcttcgccccatgggttcagtttggtaagcgtcacgctgacttcaccaaggctagaataggggcgatcggtaatgtcaagatcgtacatcaaaaccgtattgggcaggacaattttaacgtcggtaaccgtaggtgtgggagtttcaggcgctttttggctccaaaaattatagttaaaactcatgctacagcctgaaaaaaatgcgacactcatcacgatgaccaaccactgtttcatccttcactccttaaaaatcatacgacagtctagcaaaactgtgttaatgttttacatgtaagcttttgatcttccataaaataatcacacgcactaaaaaaacaccactcaaaagaccataacacagactcactccaagaataaaccacagctcagaaaccacgggtaattgacgagcaagcatgactcctacagcaaatttcaacccaaaaagaaccatcatccaacccaaccaaagccaactccctttgatcgcaaaggcattgtgttcttccatataaacagcattgtaaaaagctcttatgcgaatgcccagtgccatcaccatcatcatcccaagactccatgcaaccacacccatactcatgccaaaagctgacacaacgccataaatagaaaaaagcaccatcacgagaggaagtatcaatgccctaacatagggaacaatacgatcacgactctgcatccaccccaaccctagcaggagcacaaaaagcagataaacccacatcggtgttcgctccaaaattactatcaacattcatactcctttttgtataacctatcagccattttatcctataatcatactctgataaggagttactatgcaaaacgtgattctagcgattgccaaacaggcgatccaagacggctttgagcacacgtccacgatcgatacaaatgcacttctcacacagtatcctgaattttccaaacccaaagcgacctttgtaacgctcacgcttgatggtcagcttcgtggctgcatcggctcgctcatcgcgcatcgtcctcttttagacgacctgatccacaatgccaaagccgccgcgtttgatgacccacgtttttatccgctgagtcttgaagagtttttacatgtaagcatcgaagtctcgcttttgagtgagcctgaagtcgttgaataccgcgatattgacgatctcaaatccaaaattaccgctgggatggatggcatcattcttcaaaaaggagagcgaaaagcgacctttttaccccaagtgtgggaacaactgcccacctttgagcttttcttctcgcatctgtgccaaaaagcagggctagatgcgaactgtttagaaaatcatcccgatatttcgcgctacagggtccaaaaggtaaaataatggactattttaaagcggaaggtacacgtctggtttgcttgctctgcgcgcactattgccacctcaaagagggacaaacagggctgtgcggtgtgaataaaaacgtagatggcactatccaaaacctcgtgtacggctaccctgtagcattacatgtagaccctgtggagaaaaaaccactctaccattttttacccgacaccagaaccctttcactgggaaccatcggctgtaactttacctgttccttttgccaaaactggagcatttcccaagaaaaatccttacatgtaaaagagtttatcgcacccgaacagattatcgagatggcactcaaatacgaatgcgcctccatcgcctacacctacaatgaaccgaccattttttacccatacgcccatgacatcgctcttttggcacatgagagaggtattaaaaacatcttcgtgaccaacggttttgaatcccctgaggtgatcaacgatatgaaaggcatcattgacgcagccaatgttgatctcaaatcgttcaaccacaactactacaaaaaagagcttggcggtgggcttgaaaccgttttggaaaacctcaaacatttcaaacgaaacggcatctgggtcgaagtgaccacgctgatcgttcctaccaaaaatgactcggacgctgaactaacctctatcgcatcgtttattgccaaagagcttggcgttgaaacaccgtggcatattagcgcttttcatcctgattaccacgagcaagggcttcttgcaacctccatcgaaacactcaaacgtgccgaaacccttggcaaagccgcaggactcaaacacatctacattggaaatgtcggacttgaaaacccgacgagatgcgttacatgtaacgctgttttaatcaagcgcaaacgctttgaggtgatggaaaaccatctgatcgatggcggatgttgtccaaaatgtaaaaccaaactcgcaggagtttttgatgaataaacaccgtaaatcagccgttgcaggcatgttttatcccgatcattgtgctgagatcaagcactttatcgaccattttaccaaagcgatgccatcgttggaactggatgttacccctcgtgcactcattgtgcctcacgcaggttacatctacagcggctacaccgccaatcttgcgtaccactacgtcgcttcaaaacgtgccgacataaagcgtgtggtcgtcctagggcccagtcatcgcatctatgtcgcgggtgcatccatcgccttgtttgagagctaccacacgccatgcggtgacatcgaaatcgacctcgaattcagccatgcgcttacaaaacagttcgcttttctaagcttcaatccgctcgcacacgaagagcactccaccgaagtacagatgcctttcattcgccactactttaaacacgccaaggtcgttgaaatcgtctatggtgacatcacgcatggtgaactctcacgcttgatcgacgacgtgctaagcgatgagaaaacgcttctggtcatcagcaccgatctgagccatttttacaccgaagaagaggcgaacaaacgtgacaatctctgcatcgatgccatctcgcatcttgatcttcacgccctctcacacggctgtgaagcgtgtggcataacaggcgta

SEQ ID NO: 170 - DNA, 22594 bp, synthetic construct
  misc_feature 1..22594: note = Synthetic
  source 1..22594: mol_type = other DNA
ttttttaacgaaattaaaaatcaaaatattttaacatctcttgatagttttttttctaaaatttcaaaatctttttctgaaatatctatatttactttaacctctttttcaaactcttttgaagatatctctatattttgctcttttaaaatatactcaagttgtgataaatatgagtattcacactccaaagtaaaactttttgtttttttatactcaaaaaactctgcaatttttataacttcatttaaagaactaccataagctcgaactaatccaccagttcccagttttattccaccaaaatatcgaactattattgctgcgctatttataataccagcaccacttaaaacagccaaagttggttttccgcttgttcctcgtggttctccatcatcactactattttcaacaacttgttcaaactcatttaaatatctataagcatatacaaaatgaacagcctttggatgctcacttcttaatctttgcattgttttatcaaaatctttatatggaactaaaaaagctaaaaattttgattttttctcttctagtgttgctgtaaactctttttgaacaaatttcaaatataattctccccatgagattagatatataccttacaaaacattttaatattcaaagcagaaacaaagcacttgaaataataaattcaaataaagtaaaaattgatggcaaaattatatcaaaagcttcatttttagttgatgaaaagatgaaaatagaacttcttgaagaggatttttatgtaagcagagctgcttataaactaaaatattttttagatgagttaaaaaataaaagcaagattaacttaaaagataaaatagctcttgatattggaagtagcacaggtggttttacacaaattttgcttgaaaaggatattcaaaaagtagtttgtgttgatgttggaactaatcaacttcatgaaaagattaaaaaagatagcagaatagagttttttgaaaattgtgatattagagattttaaaagtgatattagctttgatattgtaacttgtgatgtatcttttatctctattttaaagattattgactcaataaactctttagattttaaaaatataattatactttttaaaccacaatttgaagtaggaagtggtgtaaaaagagataaaaaaggtgtagtaaaagataaaaatgcgattttaaaagctaaagagaacttcttaagcaaagcattttctttgaattggaaattaaattataacagcattagtaagcttgtaggaaaagatggaaatgaagaagagttcttctattttagtaaatagtaattttgataaaaacagtatagattcaattgcaattggtggatttgatggtatgcatattgctcatcaagagttgtttaaaaacttaaatcccaatggtgctattattagcatagaaacaggatatgcaaatttaacacccaaaaaaaatagacaagagtacacaaagtatcctattttttattatgatttagaagatataaaagcacttgatggggttgaatttataaaaatgcttcaaaatgattttaaaaacttaaaaaaaattgttgttggttttgattttggttttggtaaaaatagagcttacaaagcagatgatttaaatagtttatttgatggagaagttattgtagtgcctgagataaaactaaataactcttctgttcactcaagagtaataagagagtttataaaagaggcaaaaataaaagaggcaaatgattttttaggaaaagagtataaaatttgtggaactgttataaaaggtcaaggattaggaaaagatgagtttgttccaacaattaatatagaagtaaatgattttttgcttcctaaaagtggtgtttatgttacaaaaactatagttgataaaattgaatataactctattacttttttagggcatagagttacaactgataatagttttgctgttgaaactcatattttagataaaaatatagatgtaaaaaatgagaatattgagataaagtttattgattttataagggataatcaaaaattcaatagttttttggatttaaaaaatgcaatattaaatgatattttaattgcaagaaattattttattaatttttaggtaaaatgtgcaaatgattgataaagtatttaataaaacaatttcaaaacagtttgagtttgatgaagaggtagcaagtgtatttgatgatatgcttgatagatcagttccattttataagcagatgcaaaaactatctataacttttgcaaataattttttaaaagatgattcaaatgtttatgatttgggctgttcaacagcatcaactttgattgaactaaaaaaaagtagtaaatataagattaatttaataggaatagataactctcctgcaatgctagaacatgcaagtaaaaaagcaaaagcttttggagttgatataaaacttataaatgatgatatttttaatgtagaattaaaagatgcaagagttgttttttcaaactacactttacaatttattagaccaataaatagagaaaaacttgtaaaaaagatttatgatagtttagaagatggtggagtttttattttcagtgaaaaattagtatcatcaaatagctttttaaataaacagctaattgatgagtattatagtttcaaaaaaaatcaaggatatagtgaatttgaaatagcccaaaaaagagaagctttggaaaatgtacttattccttatactgaagatgagaataaaaagatgataaaagatgctggatttaaagattgtgaaacactttttagatgggtaaattttgcaacttttatagcaattaaatagttaaaaatcaaaggagaatatatgttaaaagtaggcgataaagcaccagctttttgtgcttttaatcaagatgatacagagatttgtctaagagatattgttggaaattggatagttttatacttttatccaaaagatatgacacctggatgtactacacaagcttgtgattttactgcaaacttatataagtttgacaatctaaaagcaacagttattggtgtaagcccagatgatagtgcaaaacatagaaaatttatagaaaagtatgatttagcaattactcttttagcagatgaagataaaaaaatggctcaagattatggtgtttggcaactaaaaaagtttatgggaaaagagtttatgggagttgtaagaactacatttataattaatccaaaaggtgagattgcagctatttgggataaggtaagtgtaagagctaaaaaaagtgttaaaggtgaaaaaatagagattttacatgtgcatgaggtagagaaaaaattagaagagttacaaaatgagtataaataattttttaaaaaaatattttctatttgcttttttaattatctcttttgagaacttatttgcaaatgagtttgaagaaaaaagtacaactttaaaagatatttttaacaaaaaaagttcaactattgcaattggaaatttaaaattaggtcaaactggagttgtagttcacaaatatagtgatgatttgcaaattattgtatctaatgcaaaagttgtgatttctgatgaaaattttagtgtaattgaattttttaaatttgaagatttaaaacaagatgcaatagctacaacaaaaaaagagcctcaagtaggcgatgagtttattttaaactttatgtacaaaaactctcttttgattgctccaaattttgagagttttaatcaaattacaaaagatttttcaagtcatagatttatacaccctgatatttttgctgcaaaattaaagtatgaaaactctttatatccaacaaaaaaagagattcaagattttgcaattgaacaaaatttgggaactatttttttcttagttgaaaatagtttatatatagttgatagtaaaacattttcaattttaaaaaaaataaattttgaaacaaataaagagttagagaaaaaacttccattttttacaagagttgaagatataagagaatctcttataaacttcaatataaaaaattggtttaaagaaaaagagagttatgattcacactataaaaagattttaggattataagatgatagataaaaaacatttagattttattacttctattgtaggagatgagaatatcaaaacagataaagctcatctaatagctttttgctatgatgctacaagaagccgttttgagccagatgctgttgtttttccacggcatgaacaagatgtaagtgatatacttaaatattgtaatgaacacaaaattataattgtaccaagaggtgctggaagtggatttacaggtggtgcattaccttcaaatggaggaattattctatcacttgaaagacatatgaataagatacttgaaattgatatgcaaaacatggttggagttgttcaaccaggagttataaatatgcagtttcaaaaaacagttgaagaggtaggacttttttatccaccagatccagcaagtgaagagtattcaacacttggtggaaatgtaagtgaaaatgcaggtggaatgagagctgctaaatatggtattacaaaagattatgtaatggctttaagagcagtgcttccaaatggtgatattatcgtagctggtaaaaaaactatcaaagatgttgctggttataatgttgctggtattttaatagctagcgaaggaactttggcggttattactgaaattactttaaaacttattccaaaaccaaaattcaaaaaaacttacatgggagtttttccaaatgtaaatagtgctatgacagctgtatttaaatcacttgcaagtggtgcaaatcctgttgctatggagtttttagactcacttgtaataaaagcactaaagcaaaagtttcctcaaatttcattgccagagaatgctggtggaattttaattggagatgtagatgcttctagtgaagctgaaatagaagatcaactaaatattttaaaagagtcatttaaagagaatggttcaattgattttattgtggctcaaaatgaagaagaaggtaaaaagctatggtttgcaagacgaaatgcaagtccagcaactatggtttatggaactaaaaaattaaatgaagatataagtgttccaagaagtaaacttccagaggctttagatgagatttataaaattggtgaaaaatatggtttccaagtaccttgttttggacatgctggagatggaaatattcatgtaaatgttatggtaaaagataaaacaaatgaaaaagagatggctgatggtcacaaagctattgaagaaattttccaactagttgtagatatgggtggaactttaagtggtgaacacggtattggtatatcaaaagcaccatttatggatattgcatttagtgaagctgagatgaatttatttagaaatatcaaaaaagcttttgatccaaacaatattttaaatccatttaagatgggactatagtttgaaaaaaggtaaaaaacctattctaaaacagattattgatggtattgattcattttttaatgacgataccacttattttgctgctagtcttagtttttttaccatattttcaatacttccaataattgctcttgcaattgcaataatttcaaaatttccagagtttcatgcttatttagatatttttacaaattttttactcaattttttaaatccaacgcactctagtgaaattattacaactttaaaaaactatatatcaaactctgacaagctaggacttttgggaatattttatatgctttttgtatatattatgtttttcaaagattatgactatattgtaaataaaattcataaaacaaaaagaagagctatatataaatcattttttatatacacaatatttttcttagtttttccaactatttttgtagctttaaatattttattaactttttatgacaatagttttttaaaacagattcaactatttttgtttacttggtttatattttttgctctatttaaagtaagtgtaaataaaaaagtatctattaaagctgcttttatatcatcatttgtaactttagcaactttaagcattacaaaaaatctatttgtatattatgtaatttataataaaacttacacaactatttatggttcacttgctactttattatttacatttttttggatatatatctcttggattatatacttatatggtgttaaaatgtgtcatagattaaatacttttatgaaataaattcatatagtttatctctaaatatcaactccatctcattgtagttctctttaaaattgtttacaatttgattgcaactgctacaaagtaaaattatattttcaatattataaccaccaccatcttctatctcttgtacaaagcaaaaagatgcttgacttaatctttccataacagttccacaacgattgcaagttgatttatctctataaaaaaccaactcttttcttcttataaaatcatttggaacttttttattaggtgttgagtttaaaccatacccttcccaagtaagttctctttttacactattttgtgttatttttttgtaatcaaactcaataaactgtttgattaaagattcaatcaaaaagctcttttgaagatctaaattaaactctttttgtaatctatttttatttgagaaatcaaataatatttttggatagtaattttctaaatagttttttaaaagatttacaaaaatctcatatttttctaaatcatcacttttagaaaatagagattttattttttttatcattttgactctttaagcctttttatatctgcacctatatctcttagctttccttctaaatcttcatatcctctatcaagatgataaattctatgaatatttgtctctccttgagcaacaagtgctgctagaactaaggctgaagatgctcttaaatctgttgccataacatctgttccacttaatttacctttttctccaataattgttgctatatttccatttaattgaatatcggcacccattctaagtagttcactaacatgcataaatctattttcaaaaagtctctcatctattgtgctagttccttcagcttgagttgcaagtgccataaactgagcttgcatatctgttggaaatcctggatattctgttgttataatatttactggttttatctttgatgttgggaatattgtaagttcgttctcttttatctctatttcaaaattcatctcttcaagtttagaaataacagcttcaagatgagctggaacaatatttttaattgttaatttttgatttgtaatagcagcagcacacatataagttccagcttctattctatctggaattacgctaaatggtttaatatcaagaagttttccacctgttccttctattgtaattttagaagttccaattccatctatttttactccagcacttgcaattacttcacaaagttgaacaatttcaggttcttttgctgcatttattatagttgtaactcctgaagctaaagcagcagccataactgtattttctgttccaccaactgttactttatcaaaaactatttttgcaccttttaatccatttggtgcagttgcttttatatatccttgacaaatctcaatctttgctcccatagcttccatagcttttaaatgcaaatcaacaggtctttgacctattgcacaaccacctggaagtgaaacttcacaatgcccaaatctagctaatagtggacctaaaaccaaaatagaagctctcatagtttttactatatcataagttgctgttgtatttgtaatagtgcttgtatctattattgccctatttttatcttgagtaaaacttccacctagcatttttattaacttcaaaaaagtatttatatcagctacatttggaagattgtttatgatagtttcattttttgccaaaattgtagctgctattagaggaagagcagcattttttgcccctgaaatagagatatctccacttaattttttgtttccaacaatttttaaataatccataaatttcctaaataatgtttaaaatggtaaagattttatctaaatcttgctttaacccaaattttgtaatacttcgcctttaaaaggatattagtttggaagaaaatgtaaataaagctataaaatatatgattttagcctcttttttatttgcacttatgggaattatggcaaaagagctaagcgataatctatctacaatacagattgtattttttagaaatgtttttggagtttttataatactttattcaatttacaaatctccactaaaacagattggtggaaagttttggttacttatttttagaggagttgctggattttcagcactactattcttcttttataatatcgcaaatatacctttgggtgaagctatgactttttctaaaacttctacaatatttacagcacttttggcatattttttcctaaaagagcaaattggaattaaaggctggattggtgtatttattggatttgttgggattttatttattgccgagtttgatggaagtagcttagaaaaaacagattatttaggaattttatcaggtgttggagcagcacttgcatatacttcaatacgagagcttagaagattttatgatggaagagccatagttctatcttttatggcagttggtacaattttacctttgatttttatgataataagtgaattttatacaaactcaaaattggattttatgcttggaacttttgtaatgccacaagcaaaagattggatttttatattttttcttgctattttttcaacttatgcacaaatatatatgacaaaatcatactctcttgctaaagctggaattgtaagcactgtttcttatagtaatatagccttttcaatagttttggggctttttgtaggagatgcttttccatcttttatagtagttttaggtataatattaatcgttcttagtggatttttagtaagtaaaaaataataaataagatttaattaaaaggaaaatatattatgttgacagttatgacaggaccttgtgttttagaagatatggatacagttttaaaaattgcagaaaaattaaaaccgttgagtgaagacaaaagagttgacttctattttaaagctagttttgacaaagcaaatagaacaagcctaagctcatttagaggtccaggacttgatgagggtttaaaaatttttgaaaaaattaaaaaagagtttggatataaagtggttactgatattcacgaatcatatcaagcagctcctgctggagaggttatggatatacttcaaatacctgcttttttgtgtcgtcaaacagatttgcttgtagctgctgctaaaacaaaagccaaaataaatatcaaaaaagggcagtttttggcagctgatgctatgaaacaccctgttgaaaaagtattaaacacaagaggaataagtgaagtaagctatgaaaatagccaaaaagctggtgtttggctttgtgaaagaggaaacacttttggatatggagctttggttgtagatatgagaaatctgctacttttaagacaatatgctcctgtgattttcgatgcaactcatagtgtacaaattccaagcactggaggtactactggtggaaatagctcatttgtaccatatatggcaagagcggctgctagtgttggagttgatggatttttctttgaaacacatattgacccaaaaacagcaaaaagtgatggaccaaatatgcttcatattgatcaactttataaaactatggatgagatttttgctattaaagaggctttaggaaactaaagcttctttacaaataagcttatattttaattattttgatagaatattttctaaaaatttaggggattttctatgaatacaacttcaataattagccttgatttaggcgggaaaaacactggttttttctcttgtactacaaacgattttaacaatttaaaaaattttcaatctggaactattatttatgatgaaagctttattttatctcaagtaaatagaagaggaaaaagacatacaaaaagaaataatcttagaaaaaaattagtaaaaagactttttttgctaattttaaaagagcattataaattaaaaataaaatatctcccagatgaaattttagctctatttaataaaagaggttatacctatgctagttttgaactctcaaatgaagagcaagaaagcttatcttctaacatattaaaagagtttttaaatgaaaatttagaaaatttcaatatatcaaatgatatagaaatagaagattttttaaatcaaattgcttcaaatgaaaatgctttcaaacaatactcaaaagattttttaaatctttatgaatcttcaactttcaaaccaaaaaataaaattgaattaaaagatgagataaaaaatagttatgaagataaagaagaacaaaaagaactttttgatggattaaaaacagtaaaaaaaattttagaagagtttgataagcaacaaaatcaaggaaatcttccaagagctaaatattttttagagataaaagaagagataaaaactaactcaaacattcaaaactttttaaaaaatagtaatttagaagaagaaaaaataaataatttaataggaaatatatcaaactttcaactaaaagagttaagaagatattttaatgataaagaaatggtgcaaggagatatttggatagaaaataaacttcataaaatagtttggagatttataacttcatggcatccaaaaaaagatgaaactatcaaaaaaaatcaagatgagctaacatctaatctaaaaaattcaaaaattatagaatttttaacacagactaacccaaataaaactattccaccatatgatgatatgaataacagaggagctgtaaaatgtcaatctttaagattaaataaaaactatttagatactcatttaccaaattggagaaagattgcaaacactcttgcaaatgatagtttaaaagagaatttaaaaaattgcactacaaataaaagcgatatagatttaactctacttcatagactattagatacttcaagtagtattgattcttacaaattaagagaatataacatagaaaattatatagatattttaggcaaagatgattcactaaaatttaaaaaatttactcaaaattattacgaaactattacaaaaaaagttcgtactggtatttggcaaaaggctgataatatttttgaactttgtaatcacaatccaccctataaaaacaatcaaattcatactttagtaagtgctattttaggagtagaaataagtgatacaaaatttaaagagtttgaagagactctttggaacaaaaaatttggaaataaaaaactagtaaattattgtaaaaatattgaagaaattagaaagagaaaaggaaatctatttaaactctatattgaagagttaaaagagatagaaaaaccagatagtgagcagaaaaaagatattaatctattaaaagatgagttacttctattttggacagatgaaatagcaaattttttcaaattggataatatttttaaatcaagattttcaaaccacttctcaatggcacagctttatactattatagaaaccaaaagagctggttttatgtcaacttgcaaatggtgtagtgctgaaaatagttttagaacaaaaacaaacatagaaaattttactttatatgataaatttactggtgaaaagttagaagatgtaatatttgatgaaaatattcacataaaagtatatgaaaactcaaatgctcaaagacttccagctgatacacaaagaccttttagtggaaaaatagagagatatatagataagcttggatatgaaattgcaaaaataaaagcaaaagagcttgaaaacacagaagagaaaaaaattgatttaaaaattgttttagaacaaaatagctttgaatatgaagagtcaataagaagtgcaaaaattaaaaatgcaaatgcaaaagctaaaaaaagcttagaggatagtaaaaagttttttgaaaaaagtattgaagaaaaagagaaaagaataaaaaattttaacaataaaatttgtctatattgtaatagtgaaatcacaacagatggagagattgatcatattttacctagaagttatacacttaaaaactatggtacagttttcaatagcgaaggaaatcttctatatgttcatcaaaaatgtaatcaatctaaaggtaacaaaatctataaattagaagatataaaagcttctatgaatgtaaacgaaattgaagagcaaatatcaaaaataaaatcatataaaacttttactcttctaaaccaaaaacaacaagaggcatttaaatttgcactttttctaccaaatagtagtgaagcatacaaaaaagttcttggatttttaagaacagatcaaagctcaagagtaaatggtactcaaaaatatttagctaaaaaaattcaagaaaaacttataaaaatgtttccacaaaaagagtttgactttgaatttattttagcttctagtgaagatgtaagtagattaagaaaagattatgcaaaacaaaattcaattttagaaaaccaaaagataataaacaatctccatctagtcacacaatagatgcagttgttgcactctcaagtgtatttaaaaaagtaaccaatttagatgatattccaacttcaaacaaaattttagaatttattcaaataaataatattccaataaaaccattaggaaaaatagaaaaagagcaaataggaaatttaggaaatggctcgattttcaaagatagcatatatcaagaaaattttgctcctatatatgagtttgaaaatagattttatacaggttttttaaaggcttcaaaaactccagattttaaaaattgtatagagataaaatcttctgattttgaacaaatcaaagagtatttaaaagatgaaataaaaaaagagaatggattaattatttatcaaattaataaacaaaaaactttagatttatttcataatatttcaaacaacttatcagatgaattaaaattagctcaaactttagataaattctcatatactcttctaaaaacttctgttgaaaatgctccaaaaatcttaaaagatagtaaaaaaacatctacaaaaatttatggaaaaactcttatacttcctataaaagatgaatgggaaagatttgataaatttttaaaaaaagagttaataagccaaaatattgaatataaagaaaaagatggaaaatatcaaatagagaatgaaattttaatatctatttgcaaagattattttaatattcaaaataaaaatattagaaataaagctagaaaagtattctctttacctactgttgaagccccaagtggtggctttagaataagaagaaaaaatcacaaaaatgaaaacatttatcaacttgtaggaatagatggagcgaaatcagttggttttgcacttgaaaataaaaaaataaatagttcaaaagatgtactacttccaactttagtaaaaagcaaaaatatatcttttaaagaaccagcaaaaaaagagctacaagagtatatagatatgaataattttagagatttaacaaaatttgtaaatttggaaaatattaatatatttgtagctcctgcatcaacaaatagacctttagttaaagttgagttagattttaatctactaaaaaacatactcaaaaatgaaaatctgaactttttggaacttgataatataaaacttgaagatgaacaaaaagcaatatttgatgaaatttttaattcttgcaattttgcaccaagagataataaaataaaaatattaaaagcagattcaaatcgtgttttgattgagttttcaaatagtaataaaactataatgaagtattatgataaagcagaagatataaatatatgactaaacatatctaaatagatgagtttggcacttttttaggaaaaacaagtgctagacttacaattagtcaaaatggaaaaaccttaaaagaattatagaagagataaataaaactatctctaaaaaatatctttacaataaaaaaaatctaagtttgcagtctattatgcaaagacaagtttataaaattgtaggaagttttatgcaacaaacacactacaaaagctacatatttaagtggtaaaaaatggcaatattttatgaagttttggtaagttatgacatagaagataacaaaaacagaaaaaaactttttgaagagttaaaagatatgggattaaactctattcaaaaatctgttttttggggagagttaaaaatagcagaagtaaatattttacctcatctatttgaaaaatattgtaaagaacaagacaaagcattttttgtaaaagagggagaagattatcataaaagtcaagaaaaactatttaaaagaagaactctaagtagatttaatcttgaaaatgcaaaatttttgcaaaatgtaaatttatcttatagtgatttaaacttttatgggatttgtgatgctttaattatttcagatacaaatatttatccagtagagataaaactccatggtcaaaaaccaacaaaagcacaaaaaatgcaactaatcgcttatggagtattagcagaaaaaatatataaaaaagattttattctaggatttataagctttgaaaaaaatgccaaaactgttcctataaatgtagatattaagatgaaacaagaggttcaaaaaatagttaatgagataataaatttaataaaaagtgaaaaattaccttatagcaatgcagaagatgagaaatgtactcaatgtgagtttttaaactattgtaatgatagattttaaaacaataaaaaaaccagccatgctttcgcagatgggctggtctatatatctttttgatgatttcatagcatcaaacgatattgttgtaaagtgtcaaaaaagattatatctaaatttttcgaaaaatcaggcactttttaagcaatttaccacttttcgaaaaaaattgataaaaatcgactcaaaaaagcccaaaatatcgcaaaaactaaatgagcgacactttacaacaatatcgcttagctaatgaaacctcatctcttctaaaattgtatcaatacttgctggggcgacactttacaacaatatcgcttagctaatgaaacaaccttttgaattaattaaaaaacttaactcaaaagcgacactttacaacaatatcgcttagctaatgaaacctacccaattcacagaaatagtatctaagtaaaacttgataacactttacgatataattttacttcagattaattttcaatacctaaaattacctacaactatttctcaaactataaaaacatctctatttatcacttgatataagaattaaatttatagttagtaaaacaaatataataatctttttcatagctctatttttatatttcattaacacacaatattatcattttgatatttaaatagaaccaaaaaaagattttaagtactatttagataaaatttaccctatttaaataagatttggagaacaatatgagaataatagagggagctttaaggctaagaggaaacgaaaaagttgctattataaatggaagatttaatcacataatcacagacagattagttgaaggtgcaaaagatgcatttgtaagacacggtggaattgcttcaaacttggatttaatcttagttccaggtgcatttgagattccttttgctcttgaaaaagcacttgcaagtggaaaatacgatgccgtttgttgtgttggagcagtaattcgtggtgcaactcctcactttgattatataagtgcagaagctacaaaaggtattgcaacagttgctttaaaatatggaaaacctgtatcaaatggtgttttaacaacagatacaattgagcaagcaattgaacgagctggttcaaaagttggaaacaaaggtgctgaagctatggttacaataatagagatgctagatttatatagcgaaatggaaaaataatttggcaacaagaacacaagcaagagagtctgtaattggtcttttatacgcctatgatttaggaaacgaagagattgtaaaatttgttgatgatattttagaagagaaaaagattagaaataagcaaaaagagtttgcattaaatctatttaatggaacaatcaaaaatatagaaaaaatagatgaagagattatcaaatatcttactcaaggaactattcaagatgttggaagtgtagaaaaatctattttaagattagcaatttttgaaatactttttgaaaatctatcaaaagcaatagttataaatgaagcaatagagcttagcaaaaaattagcaagtgatggagcaccaaagtttataaatgcaattttagaccaaattaaaaaggcttaaaatgagtaaagatatgaaactttgcttatctttggatttagagagcaaagaggagaatttagccttagtagaaaagctaaaaaattttgatatgtggttaaaagttggttttagaacatatttaagagatggaaaaaagtttttagaagatttaaaagctataaatcctgattttaaaatatttttagatttaaagctttatgatattccaaatactatggcagatgctgcttttgatatctcaaaatttggtttagtagatatgtttaatgttcatgcaagtgctggaatggaagctatgcaaacagttatgaatagaatcaaagatattccaaatcgacctttggttttagctgttacagctttaacttcatttgataatgaatcttttaaaaaaatatatggtgaagatatagacaaaaaagcaagagagtttgcaaaaaatacatttgaagctgggcttgatggtgttgtttgctctgcttttgaaagccttgatattaaaaataacacttcaaaagatttcataactctttgtcctggaattcgtccttttggagaagatagtggtgaccaaaaaagagttgctgatataaaattctcaaaagataatttagtagattttatagttgtaggaagacctatatataaaagtgaaaatccagaattggtagttaaaaagatattagaaaatatataatatttttagaaagagctataaaaaaggcatttttaagccttttttaagtgattaaaaactataattcccgtccaatttaaccagttggtaacaaaaaacggacagttgggtgagtggctgaaaccacctccctgctaaggagacgtactggcaacggtaccgagggttcaaatccctcactgtccgccatttgtgggtcgttagctcagctggttagagcactcggctcataaccgagtggtcgaaggttcgagtccttcacgacccaccactttataaaactttcaacacacttcaaaattacttttaaaaacttaaaacaaagaaaatagatgaacaaaaccataagattatttacagattcaagtgtaaatccacatagtaaaataggctttgcatcttatttgaaaatagaagatttaaataaagatttaaaaattttaaaagatagagtaaaaacaaaaaaatttgaaaatagtagttctacaaaactagagcttcaaactctactttgggcacttgatgagattttttatgaaaacaaagagatagatttttctattgaagtttatacagattgtcaaaatattatatctttaagcaatagagaagatagattaaaaacaaacaactactattcactaaatggtaaacttataaaaaaccatgatttatataaagagttttttgataaaaaagagagattaaatttaacttttataaaagtaaaagggcataagaaaaaatctcttaaagatgagattgatgatatatttaatcttgttgataaagcttcaagaaacgctttaagagagtatttaaacactcactcttaaaatggttttgaatctgttgtaaagtccaaatcaaactgctttctaaactttggattttgtaaaatactatttatagatataaaatctcttccaaaaaaatcataactataactatatatatcttccccaaaaagctctttataaacactatttacaaacttactattataaaagcctgttgtatttaaattaaaactataatcaaaagatattttactattttttatagtttctaaataatcaaaaagttttgaactatcaatatccttttcatatcttaaaactgctaatctatttgcaaaatatacataagatttaaaaggctctatttgtaaaaactcactattttcaatatcaaaatcatagtgtgctacataaaatttattatctatttttaaaataactccaatatcactaaattttgaattatctacaattgagaagaaatcactaaaaagattatcctctttttttaaaacaatatctccagtttttacaataatttgctcctttatcttttcaggaactaaatcatcttgactcttttctataaatttttttgattcataagaggcaaaaagaagtaaaaaaattattgcaaatagtctaattttcattgtttctcaaaatatttccatcttcagaaattagtattgccaagcttttagtgctttcaaattgtgataaaattataagtaaaatcatcatcaaaggaactgccaaaaacataccaattgttccccacatagcaccccaaataaccaatgataatataacaacaaattgtgacatatttaaactatttcccattagttttggatatattacatttccaattacaaattgaactacacataaagctgcaaatattgagatgatagagcttaaatctgtaaactgaataagagcaaaaacagttggaattaaaactgcaattattgatccaattgtaggaataaaatttaaaataaaagcaataaatccccacaaaactgctgcttgtaaaccaaaatagtgacaaatcaaaaatgttaaaaatcctgttgcaaagcttacaagagttgtaattaaaatatatgttctaattccacttgaaatagatgttaaaactttttttgctttttgtctgttctcatcttttttaaaaagtgcatttaattttgaattaaaaaatctttggtctattaataaaaaaagtacatataaaaaaatctgcattgtattgctcaaaattgaactaaatgccataaatatcttatttataacacttgaaatattaaactctttaaaaaacttttgtaaaggctcttttaaatccattgaaagcaaagaggatattttatctattacaatatttatttttgaatccaactgagatacaacagaacccaactctaacatacttgaagttataaatgtacctatgtttatcattaaataaattattataaccaaggataaaggagtagctgtatagtttaaaacttttttatttatatatggtatttttttaatctcatttgctaaaccattaattaaaaaccatataaaaaatgcaattgcaattggtgttaaaatatcacttaagctattaaaagagtaaaaaatcagaaatgtaaaggccaaaaaatagaatgctcttgcaaaatttatctctttgtttaagctatccatatctaccctttttttatagtttatactctttgtaatctcttactctcatcttttgcaaactcttgcatatctgtaacttgatccatctcatctacaatctcaattccaagcattgtctctaaagcatcttcaagtgttacaactccacttgtttgcccatactcatcttgaacaataaaaagatgcattttcattctaataaacatatcaaacagagttgatacagatatattttctggaactttatgaacaggaaccataatatcttttaaaagagtctttttcttctttttaactcttttttctaaaatagtttgtttaaaaacaactcctgctatatcatctattgattcattatatacaggtattcttgaataaacatatagattatcatttaaaagagcctcttttacgcttgttttagaatccaaagcaaaaacaacagttcttggtgtcataatatcttttgctttaatattttttagtttgaataaattttttattaaaacactctcttttgcctgtaaaacaccctctttctcactcatatctactattgtaataatctcatcttttgaaaagtttgcctcattttttctacctttttgtaaagcatttgttataaaagtagcaataaaaataaatgggtaagtaattttaaccataaacgatattatataaacagctggaactataaactttctccaataaatagcaccaagagtttttggaaatatctcagatataaaaagtaccattaaagttaaaataaaagcaatcacagcttgccaatttgaaccaaaaataatagcagcttgtgcaccaacaccagctgctcccatagtatttgcaaaagtatttaatgtaagaattgaagatattgatttatcaatattttgttttacatcctttgctaaatcaacagtttttgggctataaccttttttatctaaactctcaatatatgaagatgttgaagataaaagtgtagcttccagtagtgaacacataaatgataaaataagtgttaaaagtaaatatgtaataagtagtgtcattttttaaactcgattattgagatgttttttagaatatgttgtatatctttagaatgtaagatatgtttatcatttaaaactttcataaaaaatctaacttctgcatttgtaaaaccatctggctctttctctttgattgaaacatcactcttttctaattttattctatacaattttttatttgtcagttttgcataatatacaatatcaagatctttttgtgtaattttttctattgtaacaataactttatcaaaagctacattcatattaaaatctggatacaaattcttaaactcttcacttgtcatatatccaatatacaatttagtataaatatcaaaatatagactcattttatagcttgaaaaaaagcttaaatcaacactaaattttgggttagatcttgcactatttaaaatccactctaaagttggaaaatatgcaaatcttttgtatttcaagctgtatgcctctacaaacttgctattttttggagcttttagagtttgtaaatcattttttacttttttagcaaaaattattttttctattaactctttatcctctaaatcatttgttatccaaatagttgcataaggtggaaaatttttaagtcctgttgaaccttttgttaaaactattaaagatttaatctctaaatgtggaaaaatcatctttaaaagtgcatatttttttgctaatctcttatttaaacttgcagtcttttttgatgtactcatctctacaaaatataaacaaccatcggtaaaaaacattgcatcaaactcacttatatccttgtaagctgatttaaaaacaatttgtgaagttctatctattagaagtccactttttataaatttattctccatatcttgatatggaccttttaatacaaagctttttatatcttcactatttaaagcataatttaacaataattcataaataatattttcataaatctcacctttaaaactactataagctgtaatataagataagtcatcttttgaaatttcattttttataagtgattttaagtttttgctatcgtaggagtagtgaaagagatttttttctatctctttggtctctaaatttcttatatattctggtatttttatgttcaatattttctctttaattaaaaaatagattagattatatcaaaattatcttataaacttgatataatctcttttttaaaaaggatttagatgaaaaaaatatttaatataaatgttgaaaacaagacaagagatagacaagttgactctataaaaaatgaagttagaaaatatataaaaagagagaagagtaaaaaattaccagaaggctttaactcttggttttttgattgtaaatttggagaatcacaagatagtgcaaaagagataaattttgctgatgttatcaaatcaatagattttgcacaaaaagagaattatgatagtttttatcttgaaattgttgcaaaagcagtttttaaagagaaaaaatcatcaattgatgatgaacttttagagaattaatttatagcaatttttggattgtttataaaatacaattttgttagaattttaaaaaatttcataaaggaaaaatatgaactacataacaaacgataatttagaagtagcagataaagaagtatttgagatagttgaagcagaattagctagacaaacaaatcatcttgagatgattgcaagtgagaactttaca

SEQ ID NO: 171 - DNA, 16043 bp, synthetic construct
  misc_feature 1..16043: note = Synthetic
  source 1..16043: mol_type = other DNA
tttgatgcacttcgcaagatgatcaacgggaagtctcttttttagaggttttttactttaattttggcttaggtgatggggtgagtggttacaattaatttatgctattcattttgataaacacaatgttcaagaagagcaagaaggtaatacaccaaatcagtcacatccagtatatcattttcaatttgggggtaatagactagaagatgaagaaaaacttgattctgggcgggctttatttttagacgctccaaggattatgcaccaccctatggaactaatattgggtatggattttattttatccaatttttttccagcgatttggaataaaattaaacatcttcctacctataagaaaatacttaaaaaatatcaaaaagattttattctcccttattttaagtcagttgtagaacattttgaaggtacttcaactgcatggaactcccaagaaatatatccacaattagttcagagataaactttgaataaagaagttttaaattttttaaaaaattatacagatgatgtagaaagtataaatagtttactgatttcatcttttgtatttcaaaaaaacatttccaatattaaaaataaaactattaaaaatttgttaattgatagtaattctttggaatattcaactttactatcttttcttgatttgttaaaaaaggataccaaaatattcgatttcgagtatttattggagctttttgaatttgtaatttctccgtctgataaactaatcaatggagctatttatacccctaaaaatataagaaattacattacacagcaatcatttaatgaactaacgcataagtctataaagaatcttaagattgcagatatcgcctgtggatgtggtggatttttgattgatgctagtcttgaactcaaacaacggacaaaaaaatctttcaagaaaatctttcaagaaaatattttcggtgttgatattcaaaaatatagcattgaaaggactaaaatactactttcacttttggcaattacacatggtgaagatgaaaaagagtttcagtttaatctatatgcggcggactctttagaatttgagtggttaaaagaagatgaacaaatcaaaaaaaacagtggttttgatttaattttaggtaatccaccttatgtatgttctagaaatatggatgataggacaaaagagcttatgcaaaactggagtacctgcaaaacaggacatccagacttatatattccattttttcagattgggcatgaattattgaccgataatggtatcttaggatttataacagtcaatacttttatgcatagtgtaaatggaagagccattagaaaatattttagtgagaagaagaccctactaaaaattattgattttaaagatgaacagatatttaagtcaagaatgacatatacatgtatatgtttacttgaaaaaagaaaatcagattttatttattatgcaagtagtaaagcagtgaatttgcaagacatctcaaaaattaacttcaataaagatagttatgaaaacttagatactcataaaggatggagtttaaaaaatagtgaattagtaacaaaacttgaatctattggaacaccatttgaaaaaatttatagtacaaaaagcggtatcgctactctgaaaaacaatgtgtatatttttaaatcgataaaagaagatgaaaaatatttttatatgcctgatggtacaaaaatagaaagagaagtttgtaaggaagtgattaactctaaccaattaaatacttatgatgatattagtaatttgaaagaaaaaatcatctttccatatacacataatgagaataatcaagcagtcataatagaagaagatgtatttgtaatgaagtttccaaaaacatacgaatatttactaacaaagcgagaattacttgctactagagataaggggaatggtaaatatccagtatggtatgcatttggcagaacacaatcattagaaaaagtaaaatggaagttattcttccctcaactcgttaagcaaggttttaaagctgtactcaatgatgatgagaatttatatttttacaatggaatggcggcttatgcagaagagaaaagaagtttggaaatactacaaaaacttttagtttctagtgttgcatggagttatatcgagattaaaagtaaacattatgcatctggttattttggattagggaaaaactatttgaaagattttggaatttataattttagtcaaagcgatattgaacttttaaaaaatttaaaattaaaagagttagatgaattttttgaaaagaaatatctaaaaaaaataacaaaaaaggtatgacattggaaagcaaaataaaccgcacaacagacatacttcgtcgtgatgatggaataagcggtgcgatgcactacatggagcaaatatcttgggtgctttttattaaatttctcaacgacctagaagataccaaaaatcaaatggaaacctaaaatgaccctatcaacactcctatcaaatatcgaaacagcacacaatacttttcaagcaaaagccttacaaagtgtaagtgtcaatcttgctttacgaaattttgttatcggttactatatagtcgagtatgagcaaaatgggagtgatagagcaacttatgggcaaaaagtcatagagaatttagctcaaaagttagtacatatcaaaggagtttcttctactgctttaaagcttatgagacaattttatctcacttatccgcaaataagtcagacagtgtctgaccaattcaaagtgccacatttagggattcaacaagcagggtctgctaaatctcttgatatcaaaccagagaaacttttgcgatatttttcatacagtcacttcatcgaacttatcaaacgaatcttcccaaattaaagatagcttaaagcacttaaagcccccagtgtagggctttgcagggcaaaatgacaaaataattttccgtgactcttcaaatttgcatggagcattagcaacaaagagcgtcaaaaaaaggggacttccatcgtaagtgctaccctcaaaagtacaggagagagctttaagatgacagccattcaaacgctttcgactaccacccatttggacaaggctaccactactccaaccactcgaaccattacgcccgatgagccgcctttgcccattcacgatatcgataccacctaccaaagccccaatgccgcccactacccctacgtctgctacgataaacgaaccaaacagcacgatagaggattgattacctatctcaaatacgaggggtgcaaacgctacaaacagccctgttcggtgttgagcaaagagcattttggcaaataccccaacgacctactcgcccacaaagcactcaatcgctgccaaacttctcgcccacgatttgtggattgattcccatttttgaatcttattctactccaaatgattggactttaaaaatcttagacatagcaaccattttaaatttatataaaattgatgaattgggtaaaaatggtacttatgtgctttgggaaaatactgataggattggtgataatgcagttaaattaaaatttgaagatgagatatattcaaaggtagatattgttaaaaaacatttagagtttgtatttctcggatacttaaacctaaattatggatagaagcttttaaagttgatttattgtaaaatagctcaaaatgtattgtactctgcaatatattaaagtgcaatttttatttgataatattattttaaaaggaaaaatagaaaatgaaaacacctaatttattcacaatttataaaacaatagaaaatcaagaaaaaatgcaattaaataaagtaaaaacaatacgaactgttgagttatttgctggagtcggtggatttaggttaggattagagaaagttcaaagtgaaaagaaaaactttaatatcgtttggagtaatcaatgggaaccatcgacaaaagtacaacacgctagtgatatatattgtgctagatttggatatgaaaaccattcaaatgaagatattgcaactgtaaatacagatcatattccagagcatgatttgcttgtgggtggttttccttgtcaagactattcagtcgctagtacactaaaaaatgccaatgggattgttggaaaaaaaggtgtactatggtggcaaatatatagaatacttgaagaaaaaaaagaaaattctccgaaatatcttatgcttgaaaatgtagatagacttctaaaatctccagcaacacaaagaggaagagactttgcattgatgctctcatctttaaattctcttgggtatgcagttgagtggagagtaattgatgcaagtgtttacgggatgccccaaagaagaaaaagaatttttataatgggatataaaaaagatacttatcactacaatcttataaaaaacaatacaaatgaagtgatatttaataaagaaggaatctttgcaaaagctttccctattcatgagattgaatcaaagaatataattgtaaaagaattaaactctgatttagtggatattacacaaaattttaataaagaaactccaaaagagaatgcttttttagaatctggatatatgattgatggcatgtaccatacttgtaaaattacaccaaactatgagggagtaaacaaaatattaaaagatattttagaagatgaaagtgctgtcccaaaagagttttatatagatgaagaagatttaaaaaagtgggaataccaaaaaggtggaaaatcttttgaacgaacgaacaaaacaactggacatgtatatacttatagtgaagggagcatgagctttcctgatagtttagataaacctgctcgaactattataacaggagaagggggtgcaagtgcttcaagatttaagcatgttgtatgtgtgaatggaagatatagaagattaacacctgtggaattggaaagagcaaatatgtttccagataatcatacagcaggggtaagtgatactaaaagagcttttttgatggggaatgctttagttgttgggattgttgaaagattagggaaagttttgttgaatgaaagtgaaatattatgacacgaccttatgatattcaaaataaaacatcaattattgaatatgcaaaaaagcttttaaatctaactcttagagataagtgtggtgaaattgtagctaaagataaatctaacaaaggtggatttgggcaattattagagaaatattattttttgtatgaaccaaattctgatagtgaaccagactttaaagaagtaggacttgaattaaaatcatccccaataaaaaaattaaaaaagttacagtatgtttcaaaagagagattggtcttaaatattataaattacaatgaagtagttaatcaaaattttgataatagttcattttggaaaaagaataataatttattattggtgttttatcttcatgaaactgaaaaagaaaagatagattattgtatagagattgtcgatgaatggtctttccctgaaatagatttggaaatcattaaaaaagattggaatattatctctcaaaaaataaaagagggtaaagctcatgaactttcagaaggtgatactctttatcttggggcttgtacaaaaggaagcaaaggtggaaatttacgagaacaaccaaatagtggtgttaaggcgaaacaacgagcatactctttaaaacaaggatatgtaaatcatataattgcaactttagttaatcatcaaaaagaaaattatggtaaattaattcccactttagctattgctaaaagaacttctttagaagatattgtagtatcaaaatttgaaaaatattatggtaaaactattagtcaaatggaagaagaacttgatgttacacttaataataaatctaaaaactttgtaaccactcaccccatcacctaagccaaaattaaagtaaaaaacctctaaaaaagagacttcccgttgatcatcttatgattatatcaaaaatagattaaagggtgcgatttaatggataatcgaactatataaatatattccgaaacttgtttggaatgaagatttttcaattactttgaataattttttaaggacagcatttgtttttttatattatgattattttcttacgcatttttttactataaggaacaagatgcaatctgttatttcattagatttaggcggcaaatatacaggtttttttagttttacatcacaagatgttttaaaaatagatgattttaaatccggtacgattatttatgatgaaaattttgtgttgtcgcaagttaatcgaagagctaaacgacacactaaaagaaataatttacgaaatagtttagtcaaacggctatttttgcttattttgcaaaagcattacaacttagatataaagtttttaccggatgagatcttggggctttttaataaaagaggctatacctatgctagttttgagcttaatgatgaaaaaagagaaaagctagaaagtgatgagcttagagagattttggaagaacaatttggacaaatcacacaagatagcatcgagagatttttaactgatattgcatccaatgaagatgagtttaaaaagttttttgttgattttaagatttttaaagagcaaaagtcgaaagagaagttatcaaaagatataaaaagcggacttaaaacaattgaagatattttaaatgaccatgacaaacaacaaaatcaaggaaatcttccacgagctaaatattttgaagaattaaaccaagaaatagcacaaaatagaaaaattcaagagtttttccaatcatataatttgcaaatagaatatatgcaaaacctcataggtaatctttcaaactatcagctcaaagagcttagaagatattttaatgataaaaatatggcaaaatgtgatatttggaagcctgagcaacttcacaaagttacttggcgatttgtgcaaagttggcatcctaaaaataatgaagataaagcaagacaaaaagagaatcttacaagcctaaaatcaaaaaatattatagagtttttaacaacaacaaatccgataatgaccatcccaccttatgatgatatgaacaatcgtggagccgtcaagtgtcaaacactaaggcttaatgaaaattatttagatattcatttgccaaactggcgaaacatagctcacaaattggcaaatcaaaatcaaacagtaaatttaaccaaatcaacagttaaaggatatagcgaagatagtacgctattgcaccgtattttagatacttcatcaagtattgatccttatcaattgagaagtggtaaaatagatggttatatagatattttaggcaaaagcgacgctttggctttgcaaaaattttctaaaaactactatgaacttataaaaaacaaagttcgcaccggtatttggacagaagcggatgatatgttcaaaaagtgtaaccacaatccgccatacaaaaacaatcaaatccataatcttgttgccgaaattttaggagtaaaaattgacgcagataagtttttatcttttaaaacagaactttggaatgcaaaatttggaaataaaaaactctcaagttattgtaaaaatattgaagagcttagaaaatctcgtaataattttaaatcatatatcgaggagcttttttcaaaagaggataaagaactttcaaaagaggaacaaaaagataaaaaacttttagatattaaagttttgaatgaatgggtagaaaaaattggggagttttttaaaattgaggaaaaataccgagcaagatttaataaccatttttctatggctcaacttcacactaccatagacaccaaaagaaaaggatttaacagtacttgcaaatggtgtagtgaagaaaaccgatacagagcaagtacaaatattgaaatcaactctgaaacaggcgaagtcattacaaatgccaactgccaaagacttccggctgacacccaaagaccattctcaggaaaaatagagcgatatattgataagttaggttatgagatagccaaaatcaaagctaaagagcttgaaactatagaagataaaaagatagatttgaaaatcattttagagcaaaatgcttttgaatatgaagaatctattagaagcgcaaaaatcaaaaatgctaatgctaaagcaaaaaaaagtttggaagaatcaattaaaaaatacaaaaaaagtttagatgataaagatagaagaataaaatcttttagtaatagcacttgcccatattgcggtgaaagtttaggtgaagatggtgagatagatcatattttaccaagaagctatacactgaaagtttacggtactgttttcaacagtgaaggaaatcttttgtatgttcaccaaaaatgcaaccaagctaaaaaagaaaatatttataaactgcaagatataaaagcacctatcacacaagaagagatagaaaagacaataaatcctatgtcaaaaaatagctacaaaacttttacagctctttcgcctgaacaacaaaaagcttttaaatatgccttatttttagatgacaacaacgaagcttatcaaaaagtggtaaattggctaacaacagaccaaagctcacgagtaaacggcactcaaaaatatctagctaaaaaaatacaagaaaaactcaaagtgatgctgcctagcaaagagtttaattttgagtttatcctagcagatagtgaggatgtaagtggtttgagaaaagaatatgcaaaagagaatattttgctgaaaaaaccagacacaaccaccatcaagtcacacaatagatgcaattatgtcatttttgagtgtttatcctaagattgccaaaactaatgcattgccaaatagtcaaaaagttttgcaatgggtagaaataaataatatcaaaacaaaaccacttagtaaaatccaaaaagaccaaaaacaaaatcttggcggtacaacaattttcaaagatactatttatcaagagaggtttgcccctatttatgagtacgagcccactcgcccccgcccctataatggctatctcttttatattactcatattggctcacttggtatcaaaaaatatattttcaagggaaagttgggcttcaaactcctctatggttggaagagaacttcgtaaattctcaggtaatacctctgtgagtttgagttcaaattcactgacacctataggtttattgatatctcttagggcaaattctgcttctatattatttttatcacgacaaagaactattccgattgttggattgtcattttcttttttgagcatcgtatcaacagctgaaatatagtagttgagtttacctgcatattcagggataaattttttgtttttaagttcgataaccacataacacttaagctcaatatgataaaaaagaaggtcgatatatctatcaacccctgcaatttccaaatggtactgtttgcctacaaatgcgaaacctttgccaagttctagtaaaaattttgtgatattgtctataagcttattttctatgtctctttcaataaatagcttatcaaaactaaaaaaatcaaacacatacgggtcttttatcgtttggactgcaaggtctgatagtggttttggtaaggtatttgaaaaattattgaccccttttccgtctctttgaaatagttttgattttaagtttattgctaatgtatcacgactccaattatttttgatagtttgctcaatataataaatagcctcttctattgagtttgtttgattgagtatctctgtatggtgtcgccaaggtatagaaaataggctttcttcagatagttcagctcctagttggactattttatcttgagtattttcgattagtccaccagcttggtggactaaataaggagagtaaaattcataaaactttttcatactaaaaagattggttcttgaaaatcctttgagttggggaaactcttttttgatatcttttgccatattttcaataagcctagctccccattttgctttttgttgcttttggcttatcataccaccaagctcaaaataaaaatgaagcaacccacgattaacactcactgcaagctttacttgcgtttgtttgatttttgtagcgacatctactataaagtttttgtattcgttattatctgttaaactattcattttttaagccccctttttatcatttcaatctccccaaaatatccaaagttcctatctcaaactttgaaaatccaaaccattttttacctaaatctttgagacttgctccaatatgaaaaacctcttttttattttaataattgttttcatctcttgcatttgggatttgaggagtgttacttcattttccaaagatacaaatctctcatttgtgatttttagagaattgatagtatatccattttggatatagtttttgagaaccgatgttgcccattgtctaaattgtgtcgcttttttggagtttactctgtatccaactgagatgatggcatctaagttgtaatattttgttttataggttttgccatcatttgcagtatgttccaaaatggaactaactgaatcttcatccaattcgctactttcaaaaatatttattaaatgttttgttatagctggtctttgaacatcaaaaagctgtgcaatcatagtttgtgtgagccaaacagactcttcaaaaatttttacttcaatactatcttcactattttgtgtagtaaatatcaaaaattctgctgtgctatttcgtataagtttatccatttgtatcgctccattttttctttttgttatcctatcatcttttggaaattttctttaaaaacattgcagtttgagataataagaaaatttattcaatcattttgctatcatcactctttaaaatactctcaatctcttctcttaattcctctttatttggaagatagagctgatatttttgtacaaaaagttggctattcatcccataagttgcatattcgaccaatagctcatctttgtctttactgagaattatccctattggtggattgtctccttcgatattttgttcatttgcaaagtatccaagatacatattcatctgcccaatatcttgatgtttcacttcatttattttcaaatctatcaaaacaaaacatctcaaaatcctatgataaaaaaccaaatcaactttataatgagtattgttcagagttattttgtattgtcgccctacaaaagtaaaacctcgtcctagttcaagtaaaaaactttgaagattatcacataacaaactttcaagatttgtttctgctatgtgatatggctctggaattttcaaaaattcaaagatgtatggattttttttggattttcgataatctgcccatttttgcaaagtgacaaaatctcctctttatcttttccaatcccaagcctcaaaaataacccactctctttttgtctttgtagttctcgtacagaccagttttcaagaacagtttgcttttcgtaaaactccctttcaaaatcatcaccaatcttaagaagctccacaatatgcgaccagcttaattttccagacactgtctggatttttggatatgtgacataaaatgaacgaatttgaaataaatttgacctgctaaaacctttcccatatttgatactcaaatcacgacttagttgctctagtagtccttttccgtactctgcttttttggctccgttttgctcaaactctacgatatatttgcctatctcccagtatgttttgacaagttctgtattaactgcactaaaagctctaacttttccattttcataaacttcacaaatagtacccaataagttttcatattttgattctgtattttgtatatccatcgtgttacctttttctttttgttatcctatcatctttttgaaattttcttttaaacattgcagtttgagagattgtatcatttcaatctccccaaaatatccaaagttcctatctcaaactttgaaaatccaaaccattttttacctaaatctttcaaacttgccccgatataaaaaacctcttttttatcaagtatcaaaaatctatcgtgagagtttttactttcctattcccttctaattgaactattaagtatttctgaatagttcgattttcaatgcccacatttggacgacctaatatgactacttttttcataattttcctatatctatttgactctattatatcataataagccataaaaccaatttcacattttccacacgatagttataatataatgtcgaaaatcaacaaaaggatatagggcgcctctaaatattatgagccaatgagctcattcgccctgattatagccttatctatatgatcgcatatattctcttttttaattttttcatccaacttcgccctaacaataaatctatatacatttctattaacgcctgatagtatcaatgttgtaccgtgatgttttaatctattgtacagtatatctaatgcattcaaacctgcagcatcaataagcggaacatatctcatgcgtaaaataaatacttttggttgtttttcaaagagttcgatcgtatcgacaagtttttctgcaactccaaagaaaagcggaccttctatctcaaaaacttctgtatttggcggtatgattttgtttgctattgagtcgggatcgttctcttcttccgggccaacttgctttatttttgttgccttcatcatttggtctatgaaaagaattgaagctaatgcgatgcctgcttgtatagcaaagttaagatctactaaaatagtaagagcaaaagtggttatcaacactaccctatctgctcttggagcattcataatttctttaaaatgtttaatttcagccatattccaagctactatcattaatatggcgctaagagccgcaagcggaacttttactataaaaggagcaagcgctatcataaaaataaatacccaaatagcatgcatcattccggaaataggacttttagctccggcttttatatttgcagcagttctggctatcgctcctgttgcaggtaatcctccaaaaattccggatgctacatttgctaccccttgaccgagcagttctgcgttaggtttatgctttgtacctgtcataccatctgcaacgactgctgagagtaaggattctatggcagccaatgtagctatggttatagcatccggtaataaaagtcttagtttttcaaatgtgatatcaggccatgttggcgttggaagcatagaaggaattgagccgaatctactttcaatggtttcaaccggaagatcaaacagcataacaacaatgcttgaaattactaccactatgatcggtcccggtatttttggaatatatttttttgattgtattaatatcaatattgaagccatagccacaattactgcaacaaaatttgtctcatgtaaatgcgctatatagacttgaagtttttctataaagtcaggcggtattttcgatatgttcaatccaaaaaaatctctaagctgtgaaaatgcaataagtaaagcaatacctgaagtaaagccgacaattaccggatgaggtataaattttataagctcaccggctctaaaaatagccattattcccaaaattatacccgccattatggtagcaaggactagcccgtcatatccatgcttcatggccacagtggcaatagttacgataaacgcagcagttggtccgcctatttgaaatttgctgcctccgtgagcagagatgagaaatccggcaacgattgctgtgaatattccacgctccggcggcaggtttgacgcaattgcgatagccatggcaagaggaagcgctatgatagctacactaagccccgccataacatcactgataaaatctttaaatgagtattttcgttttttgagaaactcaactatttttggctgcagcgtgtcatgcgtagatcttaacattttggcaaactttcaaatttttttgcgattatataactttaactattaaaagataaaacaatattaagggcatctctaaaaatcgccatgctgaacaaatttttagagccactcttaagatataaaatgtatcattcaaataaaaaatcgggtttaaatgtgtaagatagaaaacagagctatacttttaatgctcggcgcatcatttttttttgccattatgggcggttttgtaaaagagttaagcaaaaatatgagcgctatggagataacattttttagaaatatcataggagttatttttatctctgtgacattgtttaaatttcctttgcatcaaacgggtggcaagcccctacttctgttgtttcgcggagttgcaggttttttttcgcttgtggcatttttttatattttagcttttatcccgttaggtcaagcagcgctttacaataaaatatcacccatatttgttgcgatctttgcttatattttcttaaaagaaaaactctcaaattatgctgtatttgccgtaattgtaggttttgcgggcgttgtgcttgttgctaaaccgcaaaattttattttcggtatatatgatattcttgggctgctctccggaattggcgccgcgcttgcttatacatccataagagaacttagaaaatattatgaaacaagatctattaccctctcgtttatgcttgtaggctccataggaccggtcgtatttatgggattggcgcatttgttcgatataaaaaatgatgattttatattttcacagtttaaagcgccaactctttttgattggtatatgatagcaggcgttggagtgagtgcaaccatttcacagcttttgatgacaaaggcatactcatcttcaaaagcgggtatagtaggtgccgttagttattcaaatatcatatttgcaacaatgataggagtaattttaggggatgatatgcctgatcttcttacaattttaggtataatccttgttataatatccggctttttggttagcataaagccaaaataatataagaagaaaataatcaaataaaaaaggtagaaaatgatattaattgccgggccatgtgtgctagagaacagagaaaatgttatgagaattgcggaaagcttgatgccttatcatgaggattgcacaaaagatttttattttaaagccagttttgataaagccaacagaacaagcatagagagctttagaggaccaggacttaacgaagggcttaaactgcttcaagaagtaaaagatacattcgggtataaaatacttactgatgttcatgatgcaagtcagccaaaaagtgcagcagaagttgccgatatcttgcaaatacctgcttttctttgccgccagaccgatctgcttgtagctgccgctaaaacagatgcgatcgtcaatataaaaaaaggacagtttttagctccgcaagcgatgaagcactcagtgggtaaagtacttaaaaccagaggatgcgacgaggtaagttttgaaaatgcacaaaagtacggagtatggctgtgtgagagaggaagtacatttggatacggcaatttagtagttgatatgagaggacttgtgatcatgagagagtttgcacctattatatttgacgcaacacactctgtacagatgcctgcaagcggcggggaaagcagcggaggagacagtacatttgtgccatacctgagccgtgcagctgccgctgtcggagtggacggttttttctttgaaacacattttgatcctagtatcgctcttagtgatggaccaaatatgatcaaattggatgatctttcaaagttggtcagacagatagatgctattagagaaattgtagaatagagttaagtgtgtgagtgtgagtgtgtgagtgttattcctgagaaagcaggaatacataatatatatggtaaaataaactaagtttttatttgttttaat

SEQ ID NO: 172 - DNA, 24413 bp, synthetic construct
  source 1..24413: mol_type = other DNA
  misc_feature 1..24413: note = Synthetic
atcttattcctctcatcgattggatgatggactttatagccaaggaggaggtaggaataacatttccgctccacgtattcaagaattccttaatgaaaaaaaaagttcaactaacaattggaagttggatttatattctcagtctaggtttcgaagtcaaaaaggaggaagaacccaagatcaacaatctaggtatgaagcttatggtgctcttgaacctgagctacagtgggtgaatgccagttaccttcagcctttcttagtgcttgctcccaaaataggtgctgtccagtctcagatagtacaaaatgaaaaatttacaatttatgatttcgaaggtatagccggtcttaagcttcctttgcttcctggaaattctttcttccaagctggacgtggctttcaaagattggatcgctatggctttgtctttaatgatagaatgaattttatagagttgggtcttagccaagaatggatggatatgaccttgggattttctctggtctcgggcaattactcttcggataatctgagcctcacacctagagattggaaggaagatagaagaaatctatggggaggtcatatgtttatccaaaagaacaatggaagccttgcctatggaaatctctacttctatcgttctctaaccaataaacaaattccaacttaccaagattcctttgttccctcagaatccctttcttatctcggtgcagatcttggttcaaatatttttgacacaaaatacttcctagagttaggtggcaattccttgaaaagctatcaaaatctctatcttcccgattcttaccaggcaagcacagaactttcaaatactttcttcacaacctatgcaaagttaggctggaaagatgaaaattggagattggaagcaacgggactgctccaatctaagcaaggttattttgcaatgtctggtcctttaagaattatgggaggtgatacctctatactactgggttggaatacctatgcagagaggtggaatgagttgaaacgaggatttcagatgggtggcattttcattgataggcgttatgaaatctttggatattctgactggcacacatctttgtttatcaattcagccaatctggaactaggacgaggttatgaaggaattctccatctaggcaagaagagtttatttaagcaagaacagcatcgtaatttctttcttgcctctattgcttatgctaaagtgcttcctagagaaaaagaatcctttatcattgatgagatacaagtccaacaaaaacctagagagttcttgaagttttattttagtttgggtttgaacttttagagcttacgttgctgttaaaagacgagaaacgcgtacaagattacccatctcattgtatttgatgctatcaacattcatctttgttagaaatattcctcgacctgagtacaaattgtacgatggatttttgattggatctgggattttatccaaatcaaaacctgttccttcatcttcaacttcaatttctatactattgattttgtaaaaagtacttacacgaacttttttagtcgtttccaaacatttcgcatcaacaagattgaaatagtctccactgttttctagaaattccttcttctgagaataatctattcctgccgtgccatgttctatagcattggaaataagttcatagagagagaccttaattgcgatgagatcctcatttcctacattgggcagggaatccaatctgcccgcaatgtaggcaacatattgattgatttctctaattttcggatttagaatgtagatgctattctcagattcatgaacaaagtcctttgatgggatatgggctctcttatcaaaatgaaccatttttgccttttcgattacttctcgtaaagtatcgatacggaaaggctttaagaaaaagtcaacagcacccatgcgaaaggtatctatagctagatctatattactatttcctgtaattatgatgaatggaatgtatttctgaaattctttcagtttacgaataaactcaacaccactcagtttaggtaggctgatatctgttatgatgaggtctattgactcactcatgcaaatatcgaaggctatttgaccattttctgcaaatactaactcataggattcaccaaaagaaatttgaaatagctctcgtattgatggctcatcatcaacaaataagatacgcataggtaatatctttatattctaaagacctagattgtctagatattttaatttatagttattcaaaatgtttgtatcaatttctcggattgtatccgttctaagtatgatgattttgccaccagataactctatagtaagatattcattcttattagcttggatcgctttctttagctctttaagattgaagatattggagccattcactttctgaacgatgagatcttgaaactcttggtagcccagattgcgttcgtcgggtagaaccctagagagcaatactatcctttctctatgcggatgaaccttagagaagtaggattccgaaagataaagaagcttcttttctgaattctttctatagttttcaccaaactcttttagatagttccctgttagttctgtaaaaaatagtcctccactgatatagtagtaaggtgtatcagcgggatgtgtctctggaactaagaattcttcttctgaatatttttgtagatagtaattgataatgagtggctttccgtttctcagtatgtgtaaggagaccttatcaccaatagctttgagcttagagccagatctcagaattaaatccaatgccttattgcccatttcgattctatcgaagcgatttaactcctgtccattgatagcagtaattgcatcacctggaaataattgaaaggctgggcccacaccaggataaacttgggaaaccacaattcctttactcttacttggaaaataaaattccaattcagaattcgttaaagcagatacaaattgaaatcctgggtgaggaacttcaaatggattcttatcatttaagaatttttccatatagaaagtagggatgatagaattttggatttggaatccacaaaggaatccatttcttatgataaattgagcctggtccacgtaggtatcagacctataagctaacagaggaacatacgaaaaggaaaatgtaatatagtcagacgatttataattgcaaattttttgcgctgtaggagagtccactttaacaatgggaagagcaaagacttcatcggatgtaagatggatgaatcctatagagctatcatatctttccaccttaagcttgctattggaatgattgcttctttctaattcagcaaacaagggcttttcattgggtatggtgatagtaaaatatgaattcttacctacacgaataccaggtgtaatcttacggatgggctctttcactaaccaaggattttggtgggatgctttcttaaaaataacttcaatatcagaaatattttgagatctaagttcactcattccgtatgtaagaacaaaaagtatagaaaagaatttaattggtttcatgatcaactccatatcgcttcttaattctaatattaatcttatctacattcttaggagttaaaatgataggtaagtcaattccacggaatttaatctgtatagcttgcttgtcaaattttttccaaagtcttgagaaatcgttgagatccttagcagtataaccattgatagtctcaactattttgagtcgataatccttataccttagattttcaggatcatcgaaaatatatccaagcacaatatctctgtcattgaacctatacaatttgtcttgaatataatagctgtagtggtatttagatgagctatctaaacttgcaatttcttgattggagaaaaatgccctagatacaggttggaagactaaacctgcatttacaaaatacgaagaagattcgtctctgtacaaatccaaggaatctgttttcttgagcttagagcttgctttatacttttcaccatttctgtagaaatagatggtaacactatctccgataaatttattctccaaataatcaatcatactcagaggtttgtccgagaccaattcgccttcgttgttcaaaggataatcatctattcgaaagataaaatccttctctcgtaaatattcatagaaggaagattgaggatagatagcattgatgagaattccttgcgtctcaggaggaaccttgtaataatttttcaaactattggaatagcctgtttgaaaattgaatccaagattggggaagccgtcgtattttccatctttaacatcttgcagaaaatgattgatgacaggtgtaggaattagataggtaatatctctttctatctgagaaatttgaaatacaagtccaacaaccttgttgccctgaattgcaggacctcccgagtttcctggatagatggatgccttagctttcaatacagatctgaagtcaagtcctgtgaatgagtaccgcatcttttcaaaacttagaatgcttcctttttctaccgttaggttctctgttccattcggatatccaagaatcaagagatccgatccaagcacgggaatggtatctgagaaaggaaagatcgtcgtatctctgctaaattctggatcatccacttcaatgatagctaggtcgcaatcgattcctatatactttactttggcaacatagggtttcagtttgttatagattcgaactgtcagaaatttagaatctatcacaacatgagcattggttaatatttcagttggagaaatgacaagaccagaaccaagtccagttgtaaatgattccttcatccaaggcttgcttgctgattctgttataaagctttcattttttataaggaccactgatccaaatacttgtttaaaactcttaggattttcttcttgggcttggatactatttgtaaccaaggcaaataggaagcagaataggtagcttaggtttttaattttcatatggataaagtttaaattctccccaaagaattctatcatcttgccactctttcaataagatagaggcaaggaatttttctcccttcttaatatctttacgaagtagatttccaatctgaatttcccctagctttgttccttccaatcgaattaaggagacaagagaatcctggacacaagtgatataaaagtcatgataaattttgtcatcccaatagaaatcatggttctcacccaaatactctaaaggacatgaatgatcaaagaagatggctaggttaggcgaggcatggatgtaattttttcgaaacaaggctgtctcaacaaagtatttgagattgggattatcttgtaagctttgatcctcttttgattttagcgtttcattcttttcgaatcgattttctagattcttctgcttgctagctagagaagtgttttcgataaattggatttctatatattttttatttccaaaggtatgagtcttttttaatttccaaggcttacttgcatccaggcttttatcttggaagttaataaatgcattcaaagattgtgatttacaatccaattggaagtatcttgctgattgatagctagttgtttctttcaatccacaatttcttccattcgttaaaaccatattttctaaagatctattccaatgacttgtctgtgcctgtccttgcaaacgattccaagctaagagctcatcgattttttcccaagctccgacagactcagccatacggatagatggaagcaagcataggacggcaaaaaccgcaattctttgaaaatagggtaccattccattctatcatcggctagggaagcaggaaatttgagaaaggattctctaagaaaggcttatgtctttttaaaatgaaaagttttttttcggtttcatacttttaaatttttacccaggatagaaacatggaacaatagacataaatattatttagggctttcatattgaattggaattttataactaaggaaattaaaccaggggattattgcattgattgtaggaatgtgacctcctatgacgaagaggctattgaaggctcttactgctaccctttcataaagaaagcttttggctctgatacagagtcttataagaagctatctagccccgtatactatatattagatgatgccaaagagaagaataaaaacagaatagtagtttatgacgaaggtatgggcatgttctcagcgagaatggttttcttgcttcgctctgctggattcaaagaaacctatcttcttgcatcgaaatggcccttagacggaaagaaagtacctggaaacctcaagatagagccacccatacaagataaactcaagaccatagaatgggttgttgataaggctttcatggagaagaacttaactaggttgcagatctttgatactagaaccctagaagaatacgaaggtctacttccaagacttgcaggaccagaagaaggaactctttgtggaagattgcctggatcttttctttgggattggcgtagtctctacaatgcagatggaaatctcatcgatagagctagctttaagaaaagaatggctggttttccttttatgccagagcgacccacagttctttatgattacaatggggcaagatcttgccttctcgccttaatgctcaaggagtttggctaccaagaagtgtatacttaccaaggatcttggtttgaatatagaaagtcgaatctgcccaagcaggctacttctgtatatggttccaaaacctcagctccagctgctcctagactcggaggaatggataaaaagaaataatatattttctatacattgtataaaattaaattcaattgtcactttttaggaaacatttggtttgcaataaattgataatgattttaatttatgctaagctagctataattaaagataacttgctgaatctaaaatgaaagagaagatatatgcgtccacttttaactaaaacccagcaaaaatcaatactaggatggatgaaagaatggagagtggctatcattcttgtttctaattctatcatcttcttaactcttttctatttcgatgtaaataaatctactgactttggaagccgtgagataatcggtgatattaattttaaatacaataccgttaagagaaaattcgaacaccaggtagtatggagtgatctagacatgaattctatcatctctctgcgtgattccattctaacagaagcgaattcaaatgcagtgatccatctcaaggatggaacagagattcatttggaaccagagtctatggttattctggatatttccgatgccctgaagagaatagaatttagcaatggttctatgaatattctcaagaaaaacaattcagactcagatgaggatgcactcaccatacgaaccgattcaggaagtattgaattcaaaaatgctgatgtgaaactttcgaaattagtaaaccaaaatctaaacattggagtcgctaggggagatgtgaaagcaaccataggtgatgaagaatacaatctcaaagaaaacgataatttaaattttgaaggtaatacggcaaagatcacttccaaaaaagtttctatactgaatccagttcaaactattagaaccaaagaattagctagcttgaaaagtctagaaaaccagatgcaggtaactgggcaaaatttggatgggcagaaatcagaagttcctaatggaaatttacagagcaatgcttccataccatcgaatgccataccaactacaactactatctcagcaccagcagccaatgctgcttcaagtggatcaaaatccatagcaaatacaaacactaagcctgtattaaatgccactcctgccttgaatacactcccaagctcagagcccaagaaagtgaaaactctgaacgtaagaaaaggaaagtatgacgctctagatgaacgttgatgagatcctttcatttttacaaagtcttgcggatgatccttctcaaattgcaaaattatccaatgaacagcgtattctcttattaaaatatacgggaatcatatctcgaccaaaccgcgatgaaatccgtaagagaaaccggggcgtacgaaaagttcagaaagaaatcatccgagaccaagaaaaacaaatccgctcactaacagggattcgggaagcaagaaaatcaactatcttctcagctccccctaagctactaagcctgaacccaagccaagagataggtgtgattggagaattgcactcccctagaaattgttatatttgtaagaaagaatataccaagattcatttcttctatgatacaatgtgtccagattgtgcatcttataattatgacaaaagattccagacatctgatttaacaggacaagttgttctcattacaggttctaggctaaagataggctaccatgcaacactgatgctcttgcgagcaggtgccaaggtgattgctactacaagatttccaattgactcagcgctacgattcagcaaagaaaaagactataattattggagcgatcgcctccagatctttggcttagatttgcgacatacacccagtgtagaaatattttgcagttacctagaagataccttagatagattggaccacctgatcaataatgccgcacaaactgttcgaagaccgccagggttttacagccatttgatgcagaatgaatcactctcggttgatagcttggatccaaaaatacaaaaattatttgttatgtatgaagattgcaaatcaagattgaataatggttatacgaactcatctaccaaagacatagccttgtcttggcagaatcgtaaacctgccatgggcatcttatctgccgccgaactttctcaaatcccctatacccaagatgaggaattggaaagccaggaaattttcccagtgggtcgcttggacgcagatctccaacaagtggatcttcgcaagacgaacagttggagactgaagttaggcgagattcctacttcggaaatgctagaggtacaattggtgaatatcatagccccctttgttctgtgcaatcgactcatttccatcatgaagcgagagaacactggaatgaagcacatagtaaatgtgtctgccatggaaggcaaattccaccgctttaagaaagaagacaggcaccctcatactaacatagccaaagccgccttgaacatgttaactcatacctcagcaagtgacttagaaaaatacggaatctataccaatgcagttgatacaggttgggtgaccgatgaagatccacttgaattgtccaaacacaaacaagatgtccacgacttccagccaccgcttgatatagtcgacggtgccgcaagggttctagatcctatcttcgatggcatcaactcaggcaagcattggtgtggcaaattccttaaagactattttcctatcgattggtaagaaagatcgtacttttcgtacacaagttcaaggcgatccccagcaccatttttaacgctcacctttggcttgctaaatgttactgggtcgggcttctacggggtgcgcttacgcttccgtctagcaccattgccaaggaagataggtctatctaaaagccaactaacataaatgttgctagaccaggcccttcgaatccctatcgcaaagaatagtaaataaataattaactagaattagctgtgaacttgttagtactacgcaagctaacttagccaatagagtgaaacaagctaactaggcaagaatgcaaatagagaacaagattctaaaaaaatccaagcctcccaaaaaaagttacaaaaagtcccgaaatttgtccgctactcaaaaaaatagtgttatttctgctagtttattatttctatctgttagtggaaaacccttgagttctaattcagattctatattcttggtgaaatgttgggaagtagatgagagaaggggaaggatttgatatgggaaaggaagttatatcaccaattgcaatcgatttaggcgctaagaatacaggtgtttttgctgctacatatgttcctggtgaatttttaacaaatcctgatataataaaggaaggctatctgcttcaaatgggagatattcaactatcacaagcagatcgaactgttaaaaggcaccaattgaggggaaatcgaagaaaaaagttagttcgaagattgctttttctaattttaaaggagaaatttggaattaatgagttttctaaaagcacatcggaattcttacaaggacttttgaaacgacgaggcttttcctatatctctgaaaatataaatgaggatgttctaaaatcggctgatttagaatttttcgaacagtttacccaaggaaaaatcactaagaaatcgcctttattgaatcagttgtttgatatttctcaaaatctttacgatgctcaaagcttacttgattgtgaaatatttcaaaaaaataaaaaggatattaaatcttttcttagaacccaagagattgaagttaacgatgatcttctggatcaaattgaatctacgaaaagttatttagaaactataataaagtctgatatagatggacataaacatcgaagagattatataaaaaatatttctaaagacgtagaagctaagtggaaatctattcaggaatttagtagtcttaatatggagcctttagatttttcaaatcttttagggcacatctctaatttacaacttaaaccgctcagaaagtatttcaacgatcctcaaatggctgaaggaaatgattattgggacgaagaaaggttggggactattattcgaaaatggctaaagtccttgagaccctcagaagcaaaagatattcaaaaccttagaacattactttccaaaattaggagtaatgagagtaaaataatagagatattactgaaaacaaatccagaactatcaataccaccttacgaggatatgaacaatagaagaattccatcttgccaaacccagtatctccatactcctgcactaaaccaactctacccacgatggaagatatggacggataagttagttaaggatttaactgacggaaaggaattgattgcagatgcaggttttgatgattttcgattggattcagaactgattattctgccaaaagtaggtgaatcgtataaagaaattcaagatagaaaacaggctagattacttcagagggtattggatctttccaagaaggttgatccttatagcattcgatctcaatcagttgaaacgaaaaaagggctaacaaaaaaggaaaaatctgaattagcaggtgctaaagatagattggataaactgctagataaagatagtgatgcctttattggaatggcaaaagactactacaatcagctaaaaaccatacgccaggggattgaattatctgaagatatttctctattccactcttgcgaggaaaagacaaaaaagaaaggaaataatcaaacagaaagcattcgaacaatacttggaataaataatataagcgatgaaagattggaaactattatggatactgtctggaaagatagactttatggcaacacgactctaagatcctattgcaattcatgcgaagaggcacggaagaaagatggaacagcattcattcttacattatcgagtgtgaagaagaaaaagaaactcaatattaatattacagaagaccacgaaaaaaaggtttctggacttctagataatatgcatcttgcagtgaagaaaatctgtgaagcatttcctgaaatccaagaaatcagttccaagagaatggagagagattgggaggataaagattataattatcttccttttgctaacttatttagcctagctcagatattcaatattttggaaggagacactagaggtttttcaaaaatatgtaatcaatgtatagtagaaaataaatggagaggaacaattgttcgatcaggatccaacctagatcaaggtgcgatagcaagtcgactgaatagcgacacaattaggcaatttgatggtgttcttcgaagaatgacagaccgtttagcattcgagatagcatataaaaagaaagaagaactcaaagatataaaccgaaattcaaaaattattattccaattctaactgaaatgaatcgttttgaattcaaccttgacctaggtcattacaagctagaggcaagaattgcatctcggatgcagaaaaagggaaatcaaaaaaacgaacaggcattagaaagattggaatcatttgaagacagcaagaaggatagaattaaagaagcatctctccaaatatgtgcaattactggtaaagcaataggagaaaatgggcagattgatcatattatacctcgaagccattcaaagaaatcgaacgcaaccatcttcaacacggaaatgaatctaatatatctttcaactggagggaatgttcaaaaaggagcaaagttttactctatagctgatcttcatccgaattacctccaagctcagtttggaaccaaagataaagaacaagttcaaaaacaaataacggaaggaatcgaatctattctaagaataaaacgaaaagtatttcgatcttatcgacctgatgaacagaagattttgagacatagcttgtttattccagaattgtttcccttagttattcctttattgggtgaaggaatcatggcgaaggctaatggaacccaagcctatctagcaagatgtctacagaaaagattgaaggatatattagaaaaagaaggttttaaaaatttcgaattttcaatctttcatttaagatctgaagaaatttctgatataagaaaagaactatcaaactataaacaagattattcaaaacctggtaaggggcaacagcaagcaccagggagtcatattttggacgcagtctctgtcctggttggaagtcttggaaatcccaatatacaatctatattaaagactgatatattttcagaggataagggagatatgtccaaggaagaacaagcaaagtcgattgaagcttgcctaccttctcagattagaatccttaagattgatagtttgcctaagtatagaaaaaaaaatctaggaagtaagtcactattcaaggaaggaatctttggtgaaagatttgttcctttgtatttgcataaagaaatgctctttatcggtttcgatactcaaatgaaatcaggattagaaattaagaataatcctgaaaaagtatttgatgcattgaaaccttacttcatgattcacaatatttcttataatcaagctttggaattatcaaagaaatctattattcgattccctatcgatcgaaagaaagctgttagatatttgtttgactcagtaaaacaaaatacatggaacgatgtgtcagaaattttacagggtttaagatatacagtttctaaaaaagatatagcttcccagatagttgataaaaatagcaagattcaagataaagaagagatattaaaagaaacacaaaaaaatataaaagtcgaaatatcgaaactggaactaactggcgaacttctaaagggagtatttgaatatccagggattacagattggaataccttcctgaaagatttctataaacagaaaggaattaagactggggaaaaactaaactttgaaatctacgacaagttttgtcgtgaatatttcaatataattaagcaagataaacaacaccaaaaagtaagaaaaatgtttagtcttccagtgatagacaatccatcaggtggatttagaatcaaaaggaagaactatgatggtacagaaatttatcaggtagcaactgcggacgatggctatgctgcgggttttacagttattgatggaaatgtagaaatctataataaaaaactcggaagagctttacccagtttggaaaaagcagaaagcatttcaactttacaaaataaaaataattcttcggatgattttgttttcatggatgattggagagagattgacatatccgaagttgaaacattaaagagactgtgcatacaaccaaattcgttaccgcgtgctagaatatatgctgaagtaaatataacagacttcaaaaaggtctgcgaaaacatagactctctaagcatatataaaatcccgcaagttttaaaacttaaagacaatattaaaatatcagagaattttaaaattttaaaggagcctaggggagatattcgtgtaaaattaattgatgccaaaaaagggattttaggtattgaatatatcattcaatccacagataaggcaatcagtgaactctataacttaggtaaaccaataggatccccatatgcgacacctgacagtaattaacgctggatcccatttaaaattggatggtagtcttttattgatcatggaaggctctgatcttgtcaaagaagttcctctcaatcgagttaagtcagtaacagtactaaaccgtggggtttccttaacaagtaatttggtgcaaagcttttcggataggggaattcgtctttttattcaggatttcagaaaaaggcatactgcttgtatttctggaactcatcagcatgcagtggtcgcgattcgcaaaaagcaatttgagatgatagaatcaaaatctgaatcaattgcaagttcaataatatatggcaaattaaggaaccaacgtgcagttttactatacttttcaaagtatttccaaaatgagaatattaagaagtatgaagaattaaaaaaaacttcagaagaattgttgatgctctctaatagacttcttgattctcgaaattctcaagaaccagattggagaaatcgagtcttaggttatgaaggaaggggagcagcaagttattggagaactatatccaatttagagttaggtggtaatagcttcaaatcccgaactggtcgagcagcaatagacattacaaaccaagcgctaaatttaggttatgcgattcttgaatcttatgtgtggaatgcattatccaatacaggaatggaaatatatgctggttttcttcacacggacagaccaggtaagccatcaatggttgtagactttatggaagagtatagaccatgggttgttgatagatccgttatgaagctaagggctgaattaaataagaaaaagcagctagatgattcattaaaaaaatctataattgaagaaatccacaaaacatttctaaaaaaatatcattacaaaaaacaaaaagtaaaacttgaatcaattctccagaaacaagcctatcgactagctggttctttatttgacaaagaatataaaccttatatttttaaatggtaattcaaattgaatttattaaaagaaattgttgttatttatgacatatcaaagaacaaacaaagaaccaagatattcaaagaattaaaaaatattggtcttcagaatattcaaaattcagttttctggggacgagtaaatgaagcagaaaaaagatcaattcaaagattattcaaagaacatttagataaagaaactgataaggcatttatactcgagactagactctcggtacaaattaagttatccggattcggttatggagatggtagtcaattcgatgaagaactatactacattgcatagcttaccgataagcttattgagacaatatgttttttgtcccaggattccgtactattcggaactactcggctttaattcaaatgaaccattgtggactgagcaagggcaaaaatttcattcggacattgaatcattaatcaaaaggagattaccttcaaaatttggcctagccaatccaagattcgaaaaaaggatgaatgttgtttcctttgaacttaatcttcatgggatagtagactatactttttataatgatgaatacgtagtaccgattgaatttaaaatctctggaaataaacctactcgtgggcaggaacttcaattgctcgcctatgggtatgctctttcggaaatgaagaatttgaattttgaaaggggatattttcttttcggcaataacaagaaaccctattctgtatttccgagtgaagaaaaaaagaaagatattataaaaatcgtaaatcaaatcaaaaacgatcaaattacgatgctattgccagaatcagcagcatcaattaataaatgcacgcaatgcgaatttctaaatctttgcaatgataggaatttttaagaacactaacttactgaccatacgcactgtagagggtcagccaatcttacatttgattgatttcagttgtacgaatctcaattacactatgacttgttttcgcaaaatgtctatctttttttgcaaaataccttattgcgaattaaaaaaaaagaaaaccctcccaattgtctttttgggacatttgagagggctccatcatgttcagtcttgagattcgatcaactgaaacctactgactaatctcttagaaaaagaaggatatggccatcatgttcagtcttgagattcgatcaactgaaactttaaaatagtaggggcattgaattttactataggtccatcatgttcagtcttgagattcgatcaactgaaacctatcataagaaacttcctatcaatgaaaattctttccatcatgttcagtcttgagattcgatcaactgaaacttaaaaaaactttcaaaggttgaagctgaaagatccatcatgttcagtcttgagattcgatcaactgaaacttcgatagaaagatagctcatctcgcaagtggagccatcatgttcagtcttgagattcgatcaactgaaacatacaaatcagctctgcccatggttgttgaatagccatcatgttcagtcttgagattcgatcaactgaaacagggcacggagtcctacaacacctactaaatgaccatcatgttcagtcttgagattcgatcaactgaaacaaatacaagacggcaatcatgtatccaatgtggtccatcatgttcagtcttgagattcgatcaactgaaacttaataattcagcaggagggaggacaaactgagaccatcatgttcagtcttgagattcgatcaactgaaacaaacaatcaagcttccaaccggacagctttcttaccatcatgttcagtcttgagattcgatcaactgaaacttataaaatctgaattgatcgctggtttggtagttagccatcatgttcagtcttgagattcgatcaactgaaactaatctttctaggtcttcccggcttcgtccttgaccatcatgttcagtcttgagattcgatcaactgaaacattctttttcttgctcactatttggaccttcagccatcatgttcagtcttgagattcgatcaactgaaacgcacatttgagcatattcagaggcttggcgggtccatcatgttcagtcttgagattcgatcaactgaaactcaacaactgcgtttatcagatcacttgcataagccatcatgttcagtcttgagattcgatcaactgaaacactgctcgacccataacatatttccgaggaaaaatccatcatgttcagtcttgagattcgatcaactgaaacctattgggtttatttacaacaaaggcgacaactatttccatcatgttcagtcttgagattcgatcaactgaaacatctttacgatttccgctggattattgttagtggtccatcatgttcagtcttgagattcgatcaactgaaacctcagattctggtgactcaacgtgtatccctttttccatcatgttcagtcttgagattcgatcaactgaaactagagataatcattttaaataaggagaattagaaaccatcatgttcagtcttgagattcgatcaactgaaacgaaggattttattccgtgttttcattttgcttctccatcatgttcagtcttgagattcgatcaactgaaaccccagaataagcactggcattagtaaaacatctagccatcatgttcagtcttgagattcgatcaactgaaacacagtaagagtaggtgattgctcgtgccgcaatggaccatcatgttcagtcttgagattcgatcaactgaaacattccatttccaccgcatcttccatggaatcgataccatcatgttcagtcttgagattcgatcaactgaaacttttgaatctatagatggatacaagctttccgttaccatcatgttcagtcttgagattcgatcaactgaaactgtaaaaaaattcaaaaaagaggcaacatacaaccatcatgttcagtcttgagattcgatcaactgaaactgattgggttagatctattcgagatcaatgccaagccatcatgttcagtcttgagattcgatcaactgaaacatgtaaaactattccgtttttagtaacaacgtatccatcatgttcagtcttgagattcgatcaactgaaacgaaggagttcctacttccaatacagatattaacaccatcatgttcagtcttgagattcgatcaactgaaacccattcatacactcccgatccaactgctgtttctccatcatgttcagtcttgagattcgatcaactgaaacagtaggggagttggggaataatgccaatcgacacaccatcatgttcagtcttgagattcgatcaactgaaacttatcgcctttttgaaccctaagtatatagatttccatcatgttcagtcttgagattcgatcaactgaaacagataacgagcatcaggatgattgctaggatcagccatcatgttcagtcttgagattcgatcaactgaaactagtctccttcttcctcagcagtagtaaacatagccatcatgttcagtcttgagattcgatcaactgaaacagattgactcattccatatgcttctgtattagtccatcatgttcagtcttgagattcgatcaactgaaacaagaacttatcaattgctgccttaacttgtgatgaccatcatgttcagtcttgagattcgatcaactgaaactcttgatcaagttttaattcacctatcatgttcagtcttgagattcgatcaactgaaacgccactctcgaaacctccttttgtgagatttccaccatcatgttcagtcttgagattcgatcaactgaaacaatgtttgtccgtttgctccttcgaaaggattcccatcatgttcagtcttgagatacgatcaactgaatctgaccttttggtctatgacaatcatggctaccgtttctctcttcagcaatgaagagaatggacgaaagtaaatgttcccgttttgcttttctccagaatggctctaatcaaacaatttttcccgttgactaagattggattgactatttctacgaaaaatataggctattactatgaaactttctgaaggagttccttactatgcattttcattaatggatagagttaagctagatccgttggaaatagattttattgtttataaaataataaagaatccgattcgggaaaacgaaatcgaatttatcagaaaagcaaaatcaatttctgcaatctatgaaaatcatgatattccagatgttgaccactgggcttaccattccaaagaaatttctgctggaaaatatcctctagaactcttaccagagcatgtaagaccacttgctcaaaagctctattacaactaaaaacaattccaaagagatctatttcttgatttgattttcagatcgtttgacgacgtgtgatactgtcgtattgctcattcatccgtactctggtaatcttatattaaagatgccgaacgaagcaattagatatgatcgagcaacgatcgagctggtagagtcaaccgatgaattcatgagattcaaggttgctctcgctcaacccggagtttactctttcatttccccacatgcgtagggttgaaccgtatgcgcctattactccatggattttttccatttgataaaaatcttctgcatctaccatcatgttcagtcttgagattcgatcaactgaaactaacttatgcgcttctgttggttttttctgttgtagatacgaaactatatgctcccattttgcttttctccagactggctctaatcgaaccaagttagagctgatatttaaaaatccttgataataaaatccatatattatataaaagaataagctatgaaagataaagcaactcacgttaaagtaataccaagcaaatcagaaagcaagaaactgagaaagttgattgaagacatcgaaaagtatggtggtgagttcgatttaagaaaggcgaaatattcagatggatctactatcaaagataaaaaaaataaaggatagatctgattcaattattattacttcaatcgaatagctgcattcatgattaaaatatcgtaataactataattgtatttttcatttcataaagtttctaaccactcgataagcagcatacagaactacaatccgcagctcgtagtggtagatgttagattgtatttaagacgtaaatagcagaatactttatcaatttcattttgcgatagggctgtattgaaatacaataactcagctatatctgcatctaagaatccattggatataaaggcttgtcctgggcttgttccccccgaataatcttgcaatcctgcggtgacatttccttttaaatccccattccagaattcattttgacttgctaagaggttctgcacacttcctatagcaagatactgattctggggcaagggtgatccagaaatggtatagcaagttaagttatttctacattgctggtagatacctgtaggatgagtgatccccatctcccttccatccgtaatatgaagattaaagatactagaaccgatcgcattggtcagtatccatttcatgacaacaaaaaagctaccactattgctcacataaagaccagtccctccacctaatagctgtaatctttgggaagtcgcttgtcgaaattgaatggcgggaagattgttgatctgattaattttatagcttggtcttgccgatactacagcctgtggcaatgaatttccaaaaccgcttaaatcattccagcttactactggatctccatcattgagagtgagtgaatcagctcttaaccaaatccttagagaacctgaaccataagtcctcggcgcagttagagtcactgtataatcttgcgaagatccgtctctagctgtgactttataaattaaattcgtagtatatgaattcacactcactccactttgttgctctagacccgaaacggtgactgaacttcctgtggtggtgaaatgagcgattaggggagagaaacttgtcaaagtttctgaagctagattgatctgattgcctgaaataatacctgttaaacctaaagaagggattgaataagaagtaatttcttttcttgataaacttggatctgtcccgcaaggtagactgtttaatcctagggcaagctttatggcaaatgcatttaaataagtgctggaacttggatcacagggattcttaatatttgggaaggaacaaccataagttaagcaaaaagttaagaaaataaataatttcataatagataaattttctagacttagataagcaataatttgatttattctaaaattgtaaatataaattaaaacttattcaaataagcagattctaaaatagcaggacaaagagatcctttagattttgggtcaatgatcagaacagagtttaaagttgttgaaaatggaattccataaatctttccattgggtgcaaggattccaccattccattggttaactcccacaggaactgtaacagatgtgacatcagatgtatttgattttggatcaataatcaaaacacgatcactgcttgcaggaataccatagattttaccattagcaccaagcactccacctatccatttagttgtgcctgcaggtactgtaatcgcagaagtattagcagtattattcttaggatcaagtatcaacacatttgatgcatcattcggaattccataaattttcccattggggccaagaaccccatttgaccaaagaaatgaaccactaagtcctgttatggtagtcgtatctgcagtattggttgaagggtctattatcaacactggatcagaaagatgataaggcattccataaatttttccattgggagcaagaacactacgcgaccatttattcgttgatgcggacaagccagaaattgttgtagtatttgcggtattattacttggatctatgattagcacactggtgctatcggatggaattccgtatatttttccgttaggtgcaaggacaccacttgtccatttagatcctgctccaagtcctgatattgatgttgtatttgcagtgttagtttcaggatctataatcaaaacactcccacttgcaaaaggaattccgtaaatttttccattgggagcaagaacaccaccattccattttgttccaccagcgcctagacctgtgatggtagtggcatctgaggtatttgtactaggatctataatcaaaacagatgcagagttgtatggaattccatagatttttccattcgaagctagaactccacccgaccatcgaaacgatccaccaggaacgacgatggaagttgtatcaatagtaggaatcccagtttcacctaaattagcctgggtatttaattcgtctaggaatgcttgagcaaattctggttttataatttggtctctaccaagattgcaaagattagtactctttttgggaattgatattccacaatgaggagaagtgtcccctagtatggacttaattatcattgtatttgagaaagaaggtgcactcaaatcacaagggctgtcaagctttgctggtgaacaggcaaatagcaaaaatatcaatgaaataaaatgtttcatactttttctgtaatttaactttcaatatcttgaatattatgtcaaggcaaaagtaacaaattgtccatattttatccttgtgtgccttaggattaaattaatagaataaactggataggcttttaatcatcagcataattccctgtttcaaataaaaccctttcatcaataaattattttcattgtagaaatatgaacctattttctaaatgatacagagatttacgattaatgtagaattttagttgttgttacatttcgtaattttatctaccttcaaggataagcaaaatggatttaaatgatctatcctataaaaaattacatattttgcttgttgaagatgaacctctcattgctcttcacgagaaaatcgagttacaaaaccgtggttattcagtagagcatgcattaagtggagaagaagcaattgaattaattcgaaatgatgcatttcctttcgatctcattctaatggatattgatctaggagaaggactcgatggtactgagacagctgaaaagattttagaaatttcagatatacctatagtctttctatcttctcatacagaacctgagattatcaataagacggaaaagataacctattatggttacgtagtgaagaattctggaatggtgattattgaagcctcaataaagatggcgatgaaactttataaagcaaaagtggaattgactgaaacaaagatcaaaatccaagaaaatgaagctcgcctactagaagcccaattagctgcaaaagtaggaagctggcagactaacctttcgaatatggaagttatttggtcagaagaaacataccatatttttgaattagattccaaaacatttaaggcatctcatgaagcttttctagattatgtgcatccagaagatcgtatacaagttgatgaagcattcaaaaattcattttctattgattcatttaacacgctagaacacagaattataacttccaaaggcaatctcaaatatgtagaggaacgttggcgtatcatacgcgatatagaaaatataccaatattagcgattggaacctgccaagatattacgaagagaaaaaaggatgaggatgagatcaagaggcaattgaatgagaaggaaattctgttaaaggaagttcaccatcgaatcaaaaacaatatcctatctctagagagccttttatctctgcacgcaagttcaacgaatattccagaagctagaaatgcaatcaacgaatccattacacaagtacaaagcattcgagttttgtacgataaattattaatgaatgatacttaccaagaagtctcagttaagctttatatggacagcttaatagaatccttgcttttggtttttcctgaaagtaaaaggataaaattagaaaaatcaataagcgatttta

SEQ ID NO: 173 - DNA, 24812 bp, synthetic construct
  misc_feature 1..24812: note = Synthetic
  source 1..24812: mol_type = other DNA
ttcatatttatgtaaaggcctcatattggtttttttgttttaatctaatgtttctacatggatgattttaatttcttcttggataaaatcatgactttgaatttctgtaactgccacctgaatatcgccagtttttacttgattggtgataatggcaatgtgtgcgttgtcttgctcgtcaatttgcttttgcaccactgcttctacgctgatattgtgattggcaaaaattgccgtaatgtctgccaatacgcccggtttatcggtagccaataagcgcaaataaaagatgctttcaatgtcattgtgattttgataaggtattgcttcaaatgatttccaacctaaaacatcgttactcactgtgcctttaatgacatcaatcaaatcagcaattaccgcacttgctgtggcttcatcacctgcaccagcaccatagtaaagcgttggccctacggcattgcctttgaccaatactgcattcatcacaccatcaacatttgccaataagcgcgttttgggaattagggttgggtgtacacgcatttgaatttcacccttgaccttcttggcaattcctaagtgtttaatggagtagcctagttctgtggcaaaagccacatcttcgccactaatttcactaatcccttcggttgaaaccttgttaaattgcaactcacaaccaaaggcaatggctgccaatatggctaatttgtgcgctgcatcaataccttcaacatcaaaagtggggtcagcctcggcataacccaattcctgtgcttcttttaagacgctgtcaaaatctcttcctttgtcacgcatctcagttaggataaaattacccgtgccgttgatgatgccagccaccatttcaatttgattggcactcagtccttgctctaaagatttaagaattggaatgccaccagccactgccgcttcaaacaacaaatgtgtgttatttgcttttgccaaagccagcagttcattaccatgtgtggcaatcaaagctttgttggcagtaatcacatgtttgccatttttaattgctgtttctaccaattcttttgccaaacctgtgccacccattaattctaatacaatatcaatcgagttattgttaacaatttcagatgggtcttgggtcagttgaatgcctgctgttgaacaaatacgagattgattaatatcacgcactgcggcatgtgttacttggatttgcgtgtttgtgcggcgcttaatctcagtttgattttttgccaaaacattgacaacgccaccaccaacagtccccagccctaaaattccgatattcatcgtatttgtcctaatgataaaagtaaagagtcaaattataccaattcgtttgcgtaagccttgcttgattttataagaggttttacgagaaagggcattaaaaagaatggttttttatctctaaatcaaagcatcaaaatcaccacatttaaaagattcttgtttatttaccaaaaccgcaggggatgacttgtaaccgttcttttttttacttaaaaattgaaatcaatgttgtttttataaattaaacaaaaggaaaaataggtacttagcgccacttggtattatctatgtttcaggcgcacaagtcccaagcccgacattgatattgtccttcaacgagtccggcattaaatacttattttcagggcctaatcgactttcaagtgttcgaaactcctcttgatttaaggggcgagcttgcgtcataaaaaaaacatttgcgtcactgggaatcatttcttcttccccaagttcaacggttaccatttttttctcatgacccatgtcgtcaataaaaccatcgtaacttgttatttttttgattttgtatgcttgccccggtttaaccagagcctctgcttcatcttcatgtgaatacaaggcaatcggggctgagctagctgagttttcgatgccgaaaataaccccgatatcaccctctgcacctgttcttgaaaaatatgaagcctcttcaaagctggatgaaaaagaggtaaacttattggttacaaggtaatccccttctaccacttggggtgggttttctgcatcaagattataatagggtttgccatttcctgatgatcttgttgaagaacttccgcgatagatattactgttagaaggcgggaatttttccagcgtttcagagaatttttttattcttgtttggtaattacctacggttagagggtcggattctgcaagaccatctccaaggtaatcatttacaaaatcattgctatcagttgtatattctgcaaaataatcgctctctgcttttgttagttccaattcttctgtttgggcgtacattttctcagcatgaactaacttcgcttcgcttcttgttgctctgtcattattagcaaataaatgtcgttgtttgtccacatctggaaaaactgttgcgaatgcattcgtaacggttaaagtgagtaaggtaataagtagataatattttttcataatcaatttttaagagttaagttacaataaggcctttgtgtcaatatggacaatcgtcaaacatacactttttatccatttggcaatttttaaaatccagccttaatcttactagggcagagtttaaataaaattaccagtgtgacaaaaattgaattttgctcatccatatttataccaaggtctcccaatgaatagagataattttagcgatcacatcgcctgttaaacacttgatgcaaaagtctcacaataagaacttagggataacaaccttcaagcaccaactcaccatcatttatttcagtgagtgcactttcggaaatcacttcttcgctttccattgattgtgtctccacgctcatgtcttctaataaactttcgtcagaaagtgcatctaagtccatgctcattgttcctgattcttcaatttcagacaccatgtcttctgatgcaagtgtactagaaaaggattccataccctccattattgcttctgccatatcaaatgccattacgatatttaatatatacataaatcctttgaaaaaacgctgaaaaaatgtgggcccttctgcgtctaaaccacttatccagtcagatattgcgcgagattgcaggttgaatattattcttttatctgctttcatcatataggttaaacaactgccaataatataataatcttcaaggtagtcttcaggaattgacacatcacaggcctttagaatattgttgtctacatggcttacgccataagtcatactgtctttggcacgcatataataaagttgggcaatcttacccatcataatacctgggtcaaatcccattttgctatcaggaaaataaaatgtcctgtagtttttcaatacatttaatgatgcatgatagagtttgaagccattgtgtccattttttttataaaacgctaaagtgtaatctttcccaaaccatttttcgagtagggtaagcgcagttgccatagtggctcttgctgagggaacataatgcagtgtaaatatatggtaattgccaaaaggcccccagttttttaccttttctccaatgccaaccattctaagatctatttctcttatccactcactgtatgtaggtgtgtaattttttgtgccataggtaattgatgtggaaccaatactaacatcagtatatatttttgtccaaagacccatgtaggccacatttttattgtaatctgcaataatattttctttgttttgattggtaaaataactgggtattgatgcactggctttgcggtaagctttctcaaggataaagtttaatatttttttcttaatgacttctgatttcatttcttcataaatagtatcacccccctctttgtaagatccatttccagacgaaggattgtttaatgtcaataatactgaaccctctctaaaaacaaaattgtatagcccagaaggggttaaactgctttttttgttacccttatggcggctgttaatgatgccggcatattctttaattgtttttttgatatatttatggaaataaagtgaatgataaggaaagtctccatatttttctttgtacttagcaatccacaaacctcgtccaataatgctatctgcacttggatcgcgattgatatcaaacctataatcctcgccaaaattactcacactaccaccagcagtatgattaattcgataaagtattgagcgccttgctttttctaccaaaactttaattcttgattgcgtcttaaaatcttttgtaaatattagatctggatcttttaacatactcaaaatgaactcagcatatacggcatgcgggtcttgtgttgcttttattgtattgtctttggaggcgttaccataggtaatgtatggtctgttaaagtcaatcgatgcgcctcccggattccacatttttataacggtataaaacccatctcgtaactgctccataatataaggaaatacctttattctaaccatattaggcagtttcttttcacgaaccatatcttcgtcagccagccctgcatacaagtaattatgcgtcaaatcatagccaaaaattaaatatatattgctgtctttattaaaatcgaaagtaatgtctgaaaaactactgatgcgcccatttttgcctacattaatagggttattgtctttttttggattaataaagtcatttggccccagcccatctaagaaatttaagctaacttttaccttgctactctttgttttggcgttttttagaatgccactgcctaaatttataaaattaccgacttctgtataattctcatgatgaactgaaatttgcattaaacttcctctgccatttttacttttaatgcctatgtcaaaataagattctacatatttggagtcaagtgttgtttttttaaggtctaaaggcaatacactaagaaccttcatattcttgtaagggataatattattgtcaataaatacatttttttgataggcggtacggcttctcggtattttaattttagcttcgtcagctgtccaaaaaagtgtggggtcaagtaacccgataggtgttctaacgggaatagacttttcttcattggggaaattgattttatactgtagcaccttactggggtaagcgtaggtcatttttgtggtggggtatattgagttaagacgatattcagtggcagattgcaatttacctgccgtatcattgtttaagtgtaaataataaaaacttgctgaggcaaattcatttaaggtgaaagcgccgccatcaacgattgattcttccatcgttagacttgtcccataagacttattgtggttcggtgtcttctgtgcattgtgagaaacatacagcgtggcaccattgtatacggttttaagataatatttttctgtgccaaatttactttcaaattgccacttggcaggtttgcccacatcataaggtgtgaaaaaataatccgaacctcggtgaggctgaacaatatgtcctgagaaatatttattgccaccaaaggcaaatatttccgcataaattttgctaagatctctattgtaggtgtataaacttccgttccatccgtagaaaactttgttattaggaatacttgtttcgttgacagaagccaaatcgcaaggtgccattcgagtgatttcacgcggatcggaaaaatgaatatcctccttctcaaatttcatacattgtttatcatcatccataagtgaaaatgtagcaaacggcttaaaatcatgcagaataacaatgtggtgtttgacatgttccgtagaagattcgaaacccatgggcgcattacgcttaaggataatgtgggcaacaccttttttattgaaggacacttttcccgagtctgggtcgtaactagcaacggatgggtgattaatggggtaatttgcagcggacaaactgctgtccacaagtaactcttttttcggtgtttccttatatccattttgctggcttttcgttgcgctattcttagtaatctttggtggtgtatcggtcgcattgttttttgatctttcaacaaaaggcgccaaataaggcatatcgccaaaactaatactgtagtcatctaaagattcattgggtttgagcaatgtgttcaaatcaatctcgggtgagaatagcaccaatttgtgtgttttgaatattgcagacgaatatacatgcaccttcatcaccctgttactaacatctgtccctgcaaaaatcttattacccaaaggcagagttgccataatactgatgcgcttgttataggcacttgggtcaaatttcagccccaaaccttgtgtagtatgcttataggaaacatacttaggaagaggtgccagtggatcaatagtgcgtatttccctcttgtatatcgtagtcgcatcttgacttattgacgggtaagcgtagtcgtcaataactaccccttgaacatctgggtaatctttagtgtgaaaaccaattaaaaaattaagcgcctctttttgttttgtttttttaagaaaattgttgaacactaaagtcccctcgtgatgaggaaaccaatctgttttttctttattccagcgtacttctgtactagaatcaatacaggaagtgagtaataaaagattggacagaataaagaaataaattatttttttcattttagttgtagctccttgagacttttgcagtgcatcgccttttttgaataatttgttatcgaaacttttgcatcatcgggtgaatttaccccataaatacaaccttttcatttaaagaaaaactcttgccttaaactacacaagagaatcaaatggagtttaaaccccaaatttatcggcttattatatccgagacctttgcataaatataaataatcaacaagaatccacttttcacccacttggtaattttttaaacctagccttagccctgccagggcaaggtttgataaaattaccaagtgggcaaaaattgaattttgctaatcatccatatttatgcaaaggtctctatccattaaattaacctcaaatgtttctttttatcaaatctatttgcttggaaaaagtgttttgattcagggtgaaaaattacacttagcatttaaagtgagtattttttaccagtaaaaaaatgaacgcttgacgatacccagtatcatttacatcattcattttttttaaaggacatgcttgcttggcatgggtattttttttccaatgagtcaaaatttaaatacgcattttcagcatttaatagccctttgaatgtttaaaatttattttgatttatggtgccacctttttacccgtaagaaatacatttgcacccttaagaatcatttttttaggcaagattcctgagtagtcttttaagtgtcttgctttattttataaagaaggagggcgaggcattagaattgcactccctttaaatgggcgggagtagcatttggggatttggtgttggttgttaaaaacgatgggggctagggatttgagcatatcttcataaacaggctttttgaagtcgataataacctgaataggatgccaataatcaacccacatccagtcatcaaattcaatttttgtatgtgtgtctaatttaatgttgttgtcttcgccaatgagttttaataaaaaccaaacctgcttttgaccaatgcaaattggcttttgtttacgccgaatgcaggaatcaggcaaatcatagcgcaaccattttggcgttttggcaatgacattgacatgtttaggcgttaagccaacttcttcttccaattcacgaaacaaagcctcaagatcgctttcgccattatcaatgccaccttgcggcaactgccaattatcttgttgacaacgcttggctaaaagtatctgatttttatcattgataataacaatgccaatattagcgcgatatccttctttgtcaatcattgtgcaaaaggcttgtaattagtcgtcgttaaaagcacccaaaatatatagcaaactggtaaacatattgtgcaacgctaaatacaatcccactgttgcagcaatgtaattagtctcgccaccattgataatagatgacatctgcgaaagcatataagcccccattaacaacaccaccacaaacgaaattgccaaactcacaaaagaagattcaaccaaaaatgcattcaccaaagacaaaacaatcacgccaatcatcgcaaaaaatatcatgccatttaaaaaactaaaatctttcttagtattttgcgcataaaaactaatggcaaaaaacgacacacccgtaccagtcaacgcttgcaataccagttcaccaccattcggcatcgccaaataatgcgccaacattgggccaatggaataccctaacaaacctgctacagcaaaagccgtaaaaatacccttattgctattttgtgttcttggtaaaacaaaccaaatcatcgcaatcgcagcaattgaactcgctatcgcagagccataacccgcacccgagacaacagaaaaccaagacgctaaaccaccaaaaatcagcgtataagacaacagcctcattgtgtctgataaaaccttgtttttaacccgaatgctcgaaatacctgcacttgcagtagttgaaaatgtacgcatgatttttccctctttatagataagtgtaaaatatctattttattctgaaaacagcatgtaatgaaactaattttaggcaatggcaaaaccgcacaatccctcgcacgctttttagacaagcaaagcaccccctttaccttgctcgaagacactagaaaaattaacaatccatccgttttgcaagacattgacgaaatttttatctcaccgggtgtcccacaaacacaacctatcgtcatctgggcaaaagagaaagacattcccgttaccagcgatattgaattattctcacgccacgcccaagccccaattatcggcattaccggctcaaatggcaaatcaacagttacccaactactcggcgaaatgattgccaatgacaacaaaaaagtcgccatcggtggcaacatcggcaaaccagcacttgattgcctatcatccgagattgatttttatgtccttgaactctcaagttaccaactagattacacacaaaatttaaaactattcaccggtgtcgtgcttaacatcactcccgaccaccttgacagatacccaagttttcagcactatgtcaacaccaaactcagcctatacacctactgccaacacccagttatcaacgccaacgagccactcaccccaccaataaatacccccaaatattttggtattgaaatacccaaacaacccagcgattttggcacagttacctgccacggcagctgctatttcctcaaaggcgacgatgtccttatggcagtcgatgaaatgcaactcatcggcaaacacaatgtcagcaacatcctcgccacactcgccttaggcgatcaaatcggcttaaacatcacagcaatgattgcctccatcaaagttttcaaaggcctagaacaccgcctagaatgggttacccaaaaacacaacaccgactactacaacgactcaaaagccaccaacgccatctccaccatcaaagccatcaaagccctcacccaaaaatacaaaaccatcaccctcatcctcggcggcatccccaaagacgaagattacaacaccctcctcaccctcatcgactcgcacatcgccagcgtcatcctcatcggccaaagcacccacaccttcaaaaaccacctaaaaatcacccacaccacccaagccaactcaatgcaaaccgccgtcaaactcgccaccaacacccactgcgaagccgtactgctgtctccagcttgcgccagttttgatatgtttgatgattttgagcatcgggggcgggtgtttaaagattgtgtaaattatttggggtaaaatctgataaaaataaatatataaaggtttaaattatgagcaaaattatttcaccaattgctattgatatgggggctaaaaatacgggggtttattacgctcattaccagagaaattcaacttttcaagaggtggataagaagggtcaggttttagtttacggtaattacacacctttactggtgagcagaacagccaatcgccatactagacgaggctatacgcgtaaaaaactggctaaacgcttattgagtgttgtattaaaagagtactttgattttcccgctgaaaaacacacacaagcacttggctttttaatgaatcgccgtgggtttagttttttagaagaggaatattcaaaagagtatctaaataatttacctaatgattcttgggaagcgttatcagaagaagtccaaaagatgcttggtgggcaagaaaatattgctgatagactaatgaaccttgcaactactaacccttcagaagttaccaaacttctggaagcagttcagaatataaaagggtataaagattttcaggaagaagataaagaaataaaagccgatttggtttattttgattatattgagaaaattagtaaagcttgtaaattggttaaaaaaggtgaaagcattgaagatgataaagttacaaaaagcaagaaagacaagcaaaacttatctaaaactgccaattgggttgtcgctcgattaaataatgaaaatgcattaaatttaacagttgctacagaaagttaccaaacgaatttaattgaagagattacacaaataaattaccagcagatacaaaataacttacctgactttgaaaaggaaagagaggtgataaaacaacgcaaaaaggacaacaatacatctgattggaaatttaactattctgaatttaagtttaatacacctaatgaaaaaggattggaggaagatgtagcaagaacccatttacatcatttttgttatgccgtttataaaatcaacaacgaaatcatttcaggtggtcgtcatcgctctaagttttttgatgaaattaaagatgatttagataattttacaaccaatagttttttaaacaataagcacaatccggaatatttgaaagattttattttggcaatcaatgaaaataaaggattagatgtcgataaattatataaattagtgtgccatattagcaactttgagctcaagccattgaggaagtattttaatactgaagcgtataaaagtggcgataaattggacaataaaaacctttctaaaataacatctcgttggtttttacagcactggatagtaaccaaagaaaaagataaagaggctaaagtagaagactacgaaaaactaaaaaaagcgtggcgagcgcatcaaaagtgtcaagatgacaataaaaataatatcattagtttttggctgaaaactgacccaaaattaaccatcccaccttaccaagcaatgcttaatcgtcacccacctaaatgccaatctttattattgaatgcagattatttaaataaacattatccacattgggaagattggttagatgacttaaattcaaatgaagaatatcaaacaaaattacaatcattgcaaagaggcaagggcagaagaaaagccaaaaatggcaaagagattgatggtagattgcttgacgatgaaaaaatcaaaactcgtcaattacaattcattctagatacagctaagaaacaagatttttataaacttaatgagatctggagtgtttatcataaattacaaaaatcagatgttgataaaataaaatggcaagaaaaattaggaaacttaattgatgcgagcaagttgccaaaagacttaaaacaggatttagattttagccaagaagaaagttttggacattttttaaataaatattatcaaactcggcgaaaagccagagatggtagatattttctaattcaagagaaaaaagaaaaatggctaactaacaataaattattaatcctttgcacgcataagccaagacagaaaaaacaccaatggcaattagatttagccgctgttttaggagtaaatgccgatgacttaaaggctaaaatagttggcaatccagaggattattttaaaagtatcaaaggatttgcttctaattgtgaaaaagctgccaaagcccaaaaagagcatagaggcgaattaaaacataaaatttatactgaactgacaagcaacccaatcgacaaattgggaaaacttgctaataaatgcagtaacttaaagcaagagctgattaaggaaattaaaattcctgaactattagcagataaacagactaatgaagttaatcaaaaaattgcattagtttttaaattcgctcaaattcacaatattgtttttaaagatcgtagtggattttctaaaacttgccctgtttgctcaacagataatgcttttagaatgcaagaaaatgataagggcattactaaagcctcaagactaccagctctaagtattcgtttgattgatggtgtagtgatgcgtatttgtgatgccattgctcggcaagttgcggtaacaaagtggaatgatattaaggatgatttacaaaatggaacgaaggttagcgttccccttattttagaacaaaatcgtttcgaatttgagccaaaccttaaaaaaattaaaacagcaccaaagccaggtgtaaaagcagctgaaaaagcagatgaaataaaagacaatagaactaataagtacaaagggcaaaaagtatcgttgtatagtggggaaggattgggaagcgatggcgagatagatcatattattcctagaacgggaccatatggcatacttaacgatgaagcaaatttaatttatatctctaagagtgacaatcaaaataaaggaaacgatataaagtttttaaaagatttacataaaaattataaaaccgaaatttttggcaaaaaatctgatgctgaaatcaaagaattcatttataagcgattaggcaaagacatcgaaagtaaagattttgcttttgacaagtatttaagttttatcaacttaggagaaaaggataaaaaagcctttaggcatgctttatttttacaagagggcgaccccttaagggaaaaagtaattcgtgccttaaataatcgcaatcgtgcgattgtaaacggtacacagcgttaccttgctcaatgtattgctgataaaatccatcgtattgctaaaaaggaaaataaacacaatttaatagaatttgattacttagaatatactgccagatgggatgatccaaaaagtacctacaacttgcgcaagaaatacgatttagttaaatccaaaaaacaacctttgtactcacacctgattgacgcacaattggcttttttacttgccagtgaagatcatcaaaacgatggcactatgggaattaaatttgacaacaatcaaacaatttgggagtatgaaacaaataaagaaactggtgaaatttctccaagtaagtcatttaatgcgatagatgttggggagagtgatttaaaaaagattgacttaagtcctaaagatagcaatcaaaaaattattgatattgaaaaaaataatagcaataaaaagcaaaatttatccaagatttttaagcgtcgcatgtttaaagcaaatgctataggtgaacggtataaaccgattgttaaatttaaagataaatggtatttaggttacccgatgacgatcaaaggtggcatttataattgtgatgaatactgccaagaagttgccagtaaaaatgatataaagaaaatagaagatgttgttaatgatgataagtattatcaattaacaactgaccataagcaaataaaaatttggacgattaaaatagttgataaaaagtataagaaaattaataaagattcacatagatattttagccaattgaacccagaatataacaatgatgaaaaaaaagaagtagatcaaataaaatttattttagataaatgtagatactatgtggcaaaaactgatgtcattaatgcccctaaaatttttgataagcaaggttatcctttttacaaaaattgggtggattttgataatgcttggcgtaaggaaattggtgatgattattctgtgaaaactggagagtatgatttatcaaataatactactaaaaagaagtgggatattttttgtaaaaacaggttttcaccacctgaaaaccaacataaaaataaacaccaagttaaagggaaaaaatacacgatgatatcttcaggtacgccatctggcaatgtttttagggttaaaagaaataaccaaaatatttatcaggctttgccattagataataatattattttaaaaaagaaatctaattttttaattaaacacagtaaaaatttaactttaagttctgcagttgccgataaagatttggcaaaacctattgatattgaggaaaaaatcgaattaaaaaactgcgttattccagcaaataatttttttaaagatgaattaaagggggtaaaagtatttttaaataatacttcggtagatataaaagactttccgttggataaatttagagaatacttcaataaagaaatagatgtcaagaaatcaataaaaatagaaatattaacagaagaacaggcagaaatagacttaacagaaaatccaaatttattatatgctcacaagtgcaaggtggatgctagcattcggtacacaactagggatggatcggttacaaatatcagggtaggggttaaagagcgattggttagtttttcgttaccatttagaagttgtgagaaaatttataaggacagccaaggctaatgggtagctatcaaatcatttttcgccaattgaaaatagagcgtaaaaataaaaacttgcctatagagatgcaaacagtttatcaaaaaagcataccaataaaatgaacttaacagccattatccccaaccaaaaaaaagcactattttttgccaagaaacaactgagcgagttggtttatgatgccgtaaatttagagggtgtaaattatactttgccagaggtacaaactttgttagatggggtaacagtgggcggacacaggcaaactgatgagttgataacacgaaatcaaattgaagcatgggggtttttgtttaagataattgaagatggggattttgatttgtctgctgaatttgtttgccaattgcaagcaaaagttgctaagcgtgaagcgcttacttggggtgaatttagagggggcggcgttagtattgcgggcacagattatctaccacctaatcacaaagaattacccaatttgtggcaaaaactaagacaaaaatccatgccaaatgatattgacggtatttatcaatatgccatcagtttatttttacaaatggcacgaattcaatttttctatgatggtaacaagcgtacaggtaggctaatgatgaatggcatattgcttaaaaatggtttgcctgttattaatttgccagttagtaggcagttggaatttaatcaattaatgctagatttttatttaagtaacaatgaggcgccaatgcaagcgctaatgttgtcttgtcttgatgttaagtatttaaagataatggctgaaacaaatgcacgctcatttaacacttagtgaatacgggcaatttattggcgtaaccagtgaatgtttgacagtgaagcatgagggttttattagagagtatccgctcaatcgcctaaagagtgtgcaagttgctaaacgaggtgtaagtttttcatctgatgtgattattgcttgtgccaacagagggattaaattttttattcaggattttaaaaacgaaatcattgccagtatttcaggcacgcaacaacacgccgtagtacgagtgcgacaaaatcagtttgaatttatcaaaaccattaaagtggcaactttatctgcatccgttattgaagggaaaattaaaaatcagcgtgcaacactactttattttaaaaaataccaccagcatcataaagccattatcgatacaactgccgaacaattaaacagtattcttacgcaaataaaatatagaaaatggcaaaattttaaccaatggaatgaaatattattaggactagaagggtgtgcagcagcacaatattggcaatgtttggtagcgtgtgatttaatgcccaatgattttaaaaatagaattggacgacaagcgcaagatgttggcaataaggcactaaattatggttatgcaattttaacatcttatatttggaatgcacttttgaacgcaggactagagccgtattgcggtttttttcatacacaaagagcaggcaaaccttcactcgttttagatatgatggaagaatatcgtgcttgggttgtggatagaaatattatcaaattacgcactcagttgaacggaaaaagtgatttaacgcctgctataaaaaagaaaattatcacaggcattcataaaacttttaacaccaaataccattataaaaaacgaaaaatgcgtttagaaagcatcctacaaaggcaagtttatcatttgtcagggcatttttctgatgataaaaaatataaatcttatcgttttaggtggtaataatttatggctcaagcaagattacataacgaagtaatggtggcttacgatatagaagacagcaaaaatcgcactaaattatttaaaaaacttaaagacattagccttaagccaatccaaaaatccgtattttgggggcatttaaacaaagcagaagaggatagcgtgaagcgcttattaaaagaatattgccaaaaaaccgacaaagcctttatcgccagaattgcgctctcagagcaagttaatcaaaataattctattggttacgaaaaggatgatttccctaaaaatccccctgaatattatgtcttatagtctgccaattagcctaattcgccaatattgcttttgccctaggattccttattttcaagaactattaaaacttaatcccaaaagaccacaatgggtaaagcaaggcgaggacttgcaccaaaaacaacaaaaagtttttaaacaccgcacattaaagcgctttgatttagaacaagcaactcaaacattcgatgaatttgtaacctctgatagttttgccttacatggcgttgttgatagtgttttaaacaatcaagaaaatatttacccaatagaatttaagttgggtggcagtaaaccaatgaaagggcaaatcttgcaacttacagcttatggcatgttattacaagaaaaatatggctttccttgtcaaacaggatttatcttatatgagaacaaaggcaaaacccatcagataaattttgctaaagagcgcatccaacaagtaataacaattagagataaaattttatttgatttagataattcttatatgccagatagcccggcaacaccgtcccaatgcacacaatgcgagtatttaaactattgcaacgatcgataaatggtataatattttcacttaatttagacaataaaaaacccgacatgcaaagcagaaagtcgagtcaaaatttattttagatgatttcagtgcatcgctatttaggttatgatgtgctggcacttaaagtaaatattataacaataaacttcgcagaatttaacactttttaatatttttatgaacttcgtaaaaacatcaatttttcaacctttaaaatccttatttagtaagggttttaaggcagaccagcacatcataacctaaaaaaccagcaactgaaacactgcttattctttatttcgtcgtgctaaagttcaccagcacatcataacctaaaaaaccagcaactgaaacagtacatcttcattatgagaatccgttgaatcataccagcacatcataacctaaaaaaccagcaactgaaactgttcaggaaaagactttttaaaaccatgaccatgccagcacatcataacctaaaaaaccagcaactgaaaccttgagactattaatagatcgatgcaagctggtaccagcacatcataacctaaaaaaccagcaactgaaacccaatccgcatattaacgccagtcgttagacccaccagcacatcataacctaaaaaaccagcaactgaaacgtggccagtgcgttggttgtcgtcttgagcgttcccagcacatcataacctaaaaaaccagcaactgaaaccttgatcctttgatggataatgttcgtttttatacccagcacatcataacctaaaaaaccagcaactgaaacaccttataattcttctgattttgctgtttctcttaccagcacatcataacctaaaaaaccagcaactgaaacccgggagtattggaacgaaacttacctgtaacaaccagcacatcataacctaaaaaaccagcaactgaaacttttctataaacctaaaggaaatcagggttagtaagaccagcacatcataacctaaaaaaccagcaactgaaacgttcattatttatctttacagctattggggggaaccagcacatcataacctaaaaaaccagcaactgaaacacggtggtcagcctacggctgagaataggtttaaccagcacatcataacctaaaaaaccagcaactgaaacatggcctgctttcatccattgcaagcttttcgcgttcccagcacatcataacctaaaaaaccagcaactgaaacccaagatattctgaacgctgcaaacgagcatcagccagcacatcataacctaaaaaaccagcaactgaaactaatcgtaatattaccatttatctgctcagtaaatccagcacatcataacctaaaaaaccagcaactgaaacttagagtagttactccagacttatctccttcagccagcacatcataacctaaaaaaccagcaactgaaacctcttataaccggcacagatagcctaaggataatgccagcacatcataacctaaaaaaccagcaactgaaacaacgaaacataaaacacatcaatttcatcataatccagcacatcataacctaaaaaaccagcaactgaaaccctttccttcactaacagactttgatatttttccccagcacatcataacctaaaaaaccagcaactgaaacgttgaaaattttttaataggtcaatctggaaaaccagcacatcataacctaaaaaaccagcaactgaaacccaaaaatggcttgtgcagctgtgccaagattcgccagcacatcataacctaaaaaaccagcaactgaaacccacgagatttacctctataggtaaatttaggtttccagcacatcataacctaaaaaaccagcaactgaaacaggccatctctcaagcccgactgtacggaaatgtccagcacatcataacctaaaaaaccagcaactgaaacctagaagccgacgcagtcgcagtcggcaagttgtcaaccagcacatcataacctaaaaaaccagcaactgaaacctgaaaggggtagcacagttagttctacttgataccagcacatcataacctaaaaaaccagcaactgaaacaaagtcttttaaaggactaaaaagctcgagtcttccagcacatcataacctaaaaaaccagcaactgaaacaggctttccaaccttagatgaggttaaggctcactccagcacatcataacctaaaaaaccagcaactgaaacaacaattgttgttacagtcttatcaatgcttgcctccagcacatcataacctaaaaaaccagcaactgaaacgcaagatcggatgatttagactggtgcgtcactgggccagcacatcataacctaaaaaaccagcaactgaaacccttcagcgctttattaaacttcgcactagatgaagccagcacatcataacctaaaaaaccagcaactgaaacataccacctttagcggagagaataggattaagaccccagcacatcataacctaaaaaaccagcaactgaaaccatgggaattcaatgtgaatgtacttctttttgtccagcacatcataacctaaaaaaccagcaactgaaaccctcaatataccccttattaatattctgatccacccagcacatcataacctaaaaaaccagcaactgaaacacttaaccacagtctcgccaatgttgtcgcttaatacccagcacatcataacctaaaaaaccagcaactgaaacaactcatctgcaactattagagttgcagttacaccagcacatcataacctaaaaaaccagcaactgaaacccggttgattactcttcagaagaaaaaaacaaactaccagcacatcataacctaaaaaaccagcaactgaaacccttctcggatgaacaaacaacctctaccatttcccagcacatcataacctaaaaaaccagcaactgaaacccctaacattaagaacacgatagtcttcgagtacaccagcacatcataacctaaaaaaccagcaactgaaacagtcaactattaagcagacactgttataactctaaccagcacatcataacctaaaaaaccagcaactgaaaccgctagaggcttcaggttgttttttcagtttatccagcacatcataacctaaaaaaccagcaactgaaacttggacaatttacttaaagtgattgctctatctccagcacatcataacctaaaaaaccagcaactgaaactcatatccgcatcaatcattaatgctaatcgtatgtccagcacatcataacctaaaaaaccagcaactgaaacacaactaatatacagattgggcaactggctagagccagcacatcataacctaaaaaaccagcaactgaaactcattttcaaaacttgaattgcatccaaagtaatgccagcacatcataacctaaaaaaccagcaactgaaactaggacgacgcaatttagaagaaccacgcttcttccagcacatcataacctaaaaaaccagcaactgaaacagcctcttgataagcaaaaacatgatcattaaaacccagcacatcataacctaaaaaaccagcaactgaaactggcctcaaaaaggtaatgctgttccgcttcctgccagcacatcataacctaaaaaaccagcaactgaaaccaagaggctcagcaagaccgaactcaacaagatccagtacatcataacctaaaaaaccagcaactgaaacgcgagcttagtagccgagagaattggattgagacccagcacatcataacctaaaaaaccagcaactgaaactcaattaatgctagatttttatttaagtaacaatgaagcgctaatgttgtcttgtcttgatgttaagtatttaaagataatggctgaaacaaatgcacgctcatttaacacttagtgaagacgggcaatttattggcacagtaaatcaattgactgctttgctttagttctgtatttgcaacacgcttataacttatgataacaagtgccatacaaatctacgggagccgaccattggctgtatggcccttctactgtttctatgtaagccaagccttctaccactcgttgtactctgtaagcgtttacttgattggaagaacaacgattgactataacatcgtgacgaactaacctcgtgtggtatctatttaaagagtcaacaagatctgtgtcctgagtgaatggcaagtgtattggatggtcgtgatctctgagtcgttgtttactgtaatgtgtgccaataacccatatattgcctactgggcaaccttttggtgttatttcgtcgttgtcgtatggggagtacctgtctagtggtttgcactttgttggtgcgtttagtagttcgcgctctgtggagaatgtgtttagtgattcataccctgttgagaatgcgttggcacttaatagcagtgctagaattaatatttttttcattgttgaactcctgtagttattaatttaaatagaagtataacattatttccaaacctttgataacctttaaaatttcatttgggtaactttcacttttttctacatgagggcaagatataaaatcacagtatcacgattgaataaaagtttattacggatttgtatattgcttttttctaaaattagagacctttgtataaatatgaataatcgtcaaaaaaccacttttcacccacttggcaatttttccagcgatactcagcaaccttttaggagggtaaatctagtcttggcgcttactaggattaggtttaataaaattacctatttgattatcgctacacagtaattctttaggagggcaaaaaatgaactttgccaatcattcacatttatgcaaaggatttactttctctctgttttgctgtattgccaccccttaatgtatgtcatttccaaatagtgccaagaggcattacgattgaataaaatctatggcggcttgtatatcgcttttttctaaaaccagtgcatcggtttcacttttgagccaagtgctttggcgtttgcagagttggcgagtggcaatgatggctttttctattagggttgttttgtcaatttcattgttgaggtattgccatgcttggcggtagccgacgcaacggatggcgggtaggtcttcgtggaggtttgggttttgttttagggtttgtacttctgctaagaagttgttttccatcatcgataaaaagcgggtttcgatgcgttggtgtaattcggctcgtgcgggcatgaggatgatctttttgatggggtgattgatgttgaagaagaggcgattgtcgatattgcccaagctaaaaaagatattcaaaatatagaacgagagccagcagatattaaaaaacagatgaatggatatttaaaagaattagagttataaatggtataaaaatgaatatgtaattaattatatgttcaataatcctattttttgaacacttaatataaatatatactataattaaatttttctgaacactaagcaaataatgaacacactgaatcaaattgttaaaaataacacttttgagtcgattgttatattaaaggcattaaataaagcccatcgatacttaggggagttaaaaggtgtttgtcaaagcatgccaaatcagcagattcttattagcactctagcattacaagaggcaaaagacagttctgaaattgaaaatattattactactcaagatgaagttttcaaatatcaattacaggcaaacaataaaaacattgcagctaaagaagttagccaatatagcgacgccatgaattgtgtctttcatcggcttaaaactcataatcttattaccaccaatacgataattgaagcccaaaaaattattaaaggtaatgatgcaggtttgcgcacacagcaaggcacaacgctatttaatgagaaaagtggtaaagttgtatatacaccacctaatcctgatgagttgccagaattgttaaaagacttggaacaatttattaacaatattgacattgagtcagatttagatcctttaataaaaatggcgattattcaccaccagtttgaaagtattcacccgttttatgatggtaacggcagaattgggcgtattgttaatattatttacttggtacaacagggcttgttaggcacacctgtattgtatttaagtcggtatattaatcacaataagagccagtattatcacttgttgcaagctgttagggatgaaggaaaatggcaagaatgggtgttatatatgatcactgcggttagcaagaccgcacaaagcactattaaacttatcactaatataaaagagttacagcaaagctacaagcaccgcattcgtagtcaatgcccaaaagtttactcgcaagacttaattaataatatttttaagcacccttacaccaaaattgcttttttacaacaagatttaggtgtatcacgcctaactgctaatcgttatttagagcagttagtaaaagaagatttgttaaccaagcataaatttggcagggaaaatttttacttcaatcctcaactgattaacttgttgagcaatacagagaatatgcatgatgagtgataaagtttattttaccagggtataaaaaaaccgaaattgggttattccagaggattgggaggcggtgcggttgggagaggtgggaaaatttattggtggaggcacgccattgataaaaataaaagaatactggggcggaaatattccatgggcattcatcaattattatagaaaatttagataatactgtatacggttatcatttaataagattcaggtctgaaaaagatttggacattgattttttttggggtatgtatttaataatgttttaatattgaaggagtttgcaagaagagcaacaggaagtacgcggtttactttatcgattaaaaactttaatgaaattgaggtattatttccaccacttgaggagcaacaaagaatcgctcaaattttaatgcttgctgatgatgaaataatcaaattaaaaaacgaattagtctttttaaaaacccagaaaaaaggattaatgcaacaattattaactgggaaaattagagtaaaaacataggagaatagaatgggaaagaaagtttttgtgtcatataagcatagcgatagttcagttcaatctctaactagatattgcaataatacggttcgtgattatgtggattatttaataaataacactttaaaaaatgatgtttataagggtgaaggggatgaagatttaagtgatttcaaggatggtacgattgaaaatcatttaaaagataaaattcacgatagtagcattacaatt

SEQ ID NO: 174 - DNA, 9931 bp, synthetic construct
  source 1..9931: mol_type = other DNA
  misc_feature 1..9931: note = Synthetic
acctccatttgggagagttttaaatcttttgctagttgtttattcgcttttaataactcagaatgtgttgctttgtggtgttggtgtcaatattctcggcggttcttttaaaggctttgtcttgtttattgggggaacttcaaccatcaaactcgccagcaataccaactgcgaagccgtgctactatccccagcctgtgccagttttgatatgtttgataattttgagcatcggggggggcgggtgcttaaagattgtgtaaatcatttagaggtataatccgacaaaaataaatacacaaaggttagaattatgagcaaaattatttcaccaatcgctatcgatatgggggctaaaaatacgggggtttattacgcccattaccaacaaaattcaacttttgaagagatgaataagcaagggcaggttttggtttatggtaattacacgcctttacttgcggatagaacaaccaagcgccatgttaggcgaggctatcagcgtaaaaaattagccaaacgattattgtcagttatcttaaaagagtattttgatttttctgccgacaagcacacgcaagcccttggttttttaatgaatcgtcgtggatttagctttttagaagaggaatactcaaaagagcatcttaataaattgcctgatgaggtttggggtaaattatcagaggaagttaaaaatctttttaatggtaagggaaatattgccaaccaacttatgaaaattgccagtaatgaccacaataaaattactcagatttttgaggcaatacaaaatattgaagactacaaaaaatatcaaaaaacagataaagagataaaaagtgatttggtttatgttgattatattgaaaaaataaataaagcttgcaaaattattgctcaaaatagaaatattacagatgagttggtcgtaaaaggagataacgacaaacaaaaattatctaaaacatctaattggattattgaacggttgaataaagaaaataatttaactttaaaaattaacaaagaaagttaccagacagatttaaccaaagaaattacatcaataaattatcagaaaatacaacaaaaattacctaattttgaagaacaaagaaatacaataaaacaacaacaaatagaaagtaataaatctatttggcatcaaattaatttttctgaatttaaacttaatcctaaaaatgaaaaagacttagaagaaataacaaccaaaactcacttacatcatttttgttatgcggtttataaaatcaacaatgaaatcatttcaggtggtcggcatcgctctaaattctttgatgaaattaaggatgatttagaaaattttgcaaagaatgattttttaaatgatgtgggtttaggttttaaaataaaaaatggaaagccaaccaaagaaaaagtaaaaaatccaaaatacttaaaagaatttatcttggcaatcaatgcaaatgaaaagttaggtattgataaattacataaattaatttgccatattagtaattttgaacttaagcccttgcgtgcttattttaacaatgaagattataaaaatggtgatgacctagataataaaaatctttctaaaatagcatcccgttggtttatgaaacattggatagtaaccgaagaaaaagataataaagataaggtaaatagttatgaaaaattaaaaaaagaatggataaatcacaatgataaaaataacattattgatttttggttaaatactgaaccaaaattaaccattccaccttatcaggcgatgcttaatcgctatccgcctaaatgtcaatctttattgcttaatattggttatttaggtaagcattgtccaaactggaaagaatggctaaacaaattaaatcccgataaagaatatcaagaaaaattagaatcactgcaaagtggcaaaggcaaaagaacaaccaaaaatggtaagaaaactgatggtagattagttggtgatgaaaaaattatggctcgtcaattgcaatttattttagatacagttaagaaacaagacagttataaacttaatgaaatttggagtatttaccatcagtggcaaaaaccaaaaacacaaaataaggatgaattacaagaaaaactacaggaaaccctgcaaaaaagtcacttaccaagtgaattaaaaagaagtttaacttttgatgattttgaaatagaagatagttttgcacattttcttaataaatattatcaaactcgtcgtaaagcccgagatggtcgttattttcttattcaagagaaaaaagaaaaatacttaaccagaggcaaattattaactctttgcactcacagaccaagacaaaaaacacaccagtggcagttagatttagccgcagttttaggggttagtgctgatattttaaaagataagataagcgaccaaaatccagaggattattttaagaatattacaggttttgtctctaattgtgaaaaagcagccaaagtccaaaaagatcatagaggcgaattaaaacttaagatttatcatgaattaacaaataaaccaaaaggcactttagcaaaacttgccaacaaatgtgatgaattaaaacaagcgttaattaaagaaattggcattaaagaaatattggcagataaacagcctaatgaatttaatcaaaaaattgctttagtttttaaattcgcacaaattcacaatattgtttttaaagaccgtagtggtttttctaaaacctgccctgtttgctcaaccgataatgcctttagaatgcaagaaagtgatagcggtatcgccaaggcttcaaggttgtcagcactaagtattcgtttaattgacggcgtagtgatgcgtatttgcgacgttattgctcgcaaagttgccattacaaaatggaatgatattaaggatgatttacaaaatggtaataaaattaccattcctcttattttggagcaaaatcgttttgaatttgagccaagtctaaaaatgattaaaacaaacgccaaaaaaatagatgaaatacaagaggataggggtaaccaatataaggggcaaatagtatcagcttatagtggtgaaaatttaggtaaagatggtgagatagatcatattattcctcgggcttcaaaatacggcacaatgaatgatgaggcaaacttgatctatatttctaaaggtgataatcagaacaaaggcaacgatgcgaaatttttaaatgacttgcataataactataaaaaagaaatttttggtaacaaatctgatgaggaaattaaacaatttatttatcaagaattagataacggtattaacagtgaaagttttgcttttggtaaatatttgagtttcattaaccttaacgaagaacagaaaaaagcctttagacacgctttatttttacaagataacgacttattaaagcaaaaagtaatcaatgccttgcaaaatcgtaaccgcaccattgttaatggcacacaacgctatcttgctcagtgtattgccgataaaattcatcgcattgctagaaaagaaaagaaagaaacattgatagaatttgattattttgaatatagtgctagatggaatgacccaaaaagcacttataacttgcgtaaagaatacgggctaacaaaaccgaaaaaacagcttttgtattcacatttgattgatgctcagttggcttttttacttgccacagaagaccatcaaaatgatggctctatgggcattaagtttttagacaaacaaaccatttgggggcgcaaaatagataaagaaacgggagaggttttgccaaatcagttttttagtgatgccgatgtaggtaaggataaattagaaagagtcgatttaaaccctaaagatagcaaccaaaaaattattgatattgaaaaaaataacagtaacgagaaacaagacttgtctaaaatttttaaacgctctatattcaaacaacaggctatcggtgaaagatatagaccagttattaaatttgaaggtaaatggtatttaggttatccaatgactattaaaggtggtatttatagttgtgatgaatattgccaagaaattactaaaaaaaatgatgtaaagaaaatagagggtattattaataatgaaaaatattatcaattaacgactgataacgagaaaataaagatttggacaattaaaacaattgataaaaaatataaacaaattgataaagattcacataagtatttcagtcaattaaatccaaaatatggcaatgatgaaaaagaagaagtaggggaaataaaatttattttgagtaaatgtagatattatgtggcaaaagatgaggtttgtaacgcacctaaagtgttaggaaaaccaggcactaaaaaatatcctttttataaaaattgggtggattttgacaatgcttggcatgaagaaattggcgatgattatgctgttaaatctggggaatatgacttattaaatagtgttattgaaaaaaaatggaatgacttttgtaaaaaaagatttgcatcacctgaaaatcaacttagaaatagacatcaagttaaaggtaaaaaatatactatgatatctttaggaacggcatctggcactgtatttagaattaatagaaacaatcaaaacatttatcaagctttgccattagatgcacagattataggtaaagataagtctaattttttaattaaacacagtaaaaatttaactttaagttcttcaactgctgataatgatttagcgaaaaatattgatattaaggaggcggtaaaattagaaagattcgaaattccagcagatcagttttttaaagaaaagttggagggcgtaaaagtctttttaaataacaattcagtggatgtagagtattttccattagataagtttaaaaaatattttagtcaagaaataggcgataacaaatcaatagaagttttaacagaggcaaaagcaaaggataatttaaaaaataacccaaagttgctatatgcttataaaaataaaatagatgaaagcattaaatatacaactagagatggaagggttatcaatataaagcctaataaacagtcggttaatttttcattgatgtttaaaaattgtgagggaatttataacgatagtaaagaatgacgaccaacagccaaattatcctctacaaaactcaaacaggcgagataaaaatagatgttcgccttgaggatgatacggtttggcttaatcgtcaccaattatctaacttatttgatagggatattaaaaccatcggtaagcatattggtaatatttttaaagagggcgaattaagtgaaaattcagttgtcgcaaattttgcgacaactgcgacagacgataaaatctaccaaattgatcattacaacttagaaatgattatcgccttgggttatcgggtaaagtccccacaaggcacgcagttcagaatttgggcgatcaaacaactcaaggaatatattagcaaaggttttgtgttggatgatgagcgatttaaggcagggggattctatgtcttatttcgatgagttgcaagaacgcattcgtgaaattcgcatctcagaacgatttttttatcaaaaaattaaagacatttacaccaccagtattgattacgatgccaaaagtgataaaaccagtcacttttttaaagtagtgcagaataaattattatgggcaattagccaacaaagtttagccgaacttgaagctaacattaaacacctaaaataaaccatgcatgcacatttaactctaagcgaatacggtcaatttatcggtgtaactagtgaatgtttgactgttaaagaaagtggaaaaacctatgagtatccactaaatcgtttaaaaagcattcaaattgctaaacgaggggtaagtttttcatctgatgtaattattgcctgtgccaatagagggattaagttttttattcaggactttaaaaacgaaaccattgccagcatttcaggcacacagcaacatgctgtggtgcgtgttcggcaaaaccagtttgattttatcaaaaccatcaaagttgcgactttgtcagcatcggtcattgaaggaaaaattaaaaatcagcgtgcaacgctactttattttaaaaaatatcaccagcaacataaagctgttattgacaaaactgccgaacaattaaatggtattcttactcaaataaaatacagaaaatggcaaaattttgacaaatggagtgaaatattattaggactagaagggcaggcggcggcacaatattggcagtgtttggttgaatgcgatttaatgcccaatgattttaaaaatagaattggcagacaagcgcaagatgtgggcaataaagcccttaattatggttatgcaattttgacatcctatatttggaatgcgattttaaatgcggggctagagccttattgtgggtttttccataccactagggcaggcaaaccctcattagttttagatatgatggaagaataccgtgcttgggttgtggatagaaatatcattaaattacgcactcagttaaatggaaggaatgatttaacacctgctataaaaaagaaaattatcacaagtattcacaaaacttttaatactaaatatcatcataaaaagcgaaaaatgcgcttagaaagtatcctgcaaaggcaagtttatcatttggcagggcatttttctgatgataaaaaatacaagtcttatagatttaggtggtaataatttatggctcaagcaagattacataacgaagtgatggtggcttatgacatagaagacagcaaaaatcgtactaaattatttaaaaaactcaaagacatcagccttaagcctattcaaaagtctgtattttgggggcatttaaacaaagcagaagaagacagtgtaaagcgattattaaaagaatattgccagaaaactgacaaagcttttattgccagaattgccctttcagagcaagtcaatcaaaataattctattggttatgaaaaagacgattttcctaagaatccctctgagtattatgtcttatagtctgccaattagcttgattcgccaatattgtttttgccctagaattccttattttcaagaattattaaaacttaaccctaaaagaccacagtgggtaaaacaaggcgaagacttgcatcaaaaacaacaaaaagtctttaaacatcgcaccctaaaacgctttgatttagagcaagcaacccaaacatttaacgaatttttaacctctgatagttttgccttgcatggcgttgttgacagtgttttaaataatcaagaaaatatttacccaatagaatttaagttaggcggtagtaaaccaatgaaagggcaaatcttacaactcacagcctatggtatgttattgcaagaaaaatatggctttcgttgtcaaacaggatttatattgtatgaaaacaaaggcaaaacccatcaaataaactttgacaaaaagcgtatccaacaagtgataataattagagataagattttatctgatttggataattcctgtatgccagatagcccagcaacaccgtctcaatgcacacaatgtgagtatttaaactattgtaatgatcggtaaatggtataatattttcacttatttcagacaataaaaaacccgacatgcaaagcagaaagtcgggtcaaaatttattttagatgatttcagtgcatcgcttatttaggttatgatgtgctggcacttgaagtggtaaattataacaaaaaaaacttcgcaaaatttaacactttttaatatttttatgaacttcgtaaaaacatcaatttttcaactcttaaaatccttgtttaacaagggttttaaggcagaccagcacatcataacctaaacaaccagcaactgaaacgtgtcgggtgagattacttgagggattaagtagtccagcacatcataacctaaacaaccagcaactgaaacttcgtcctccaaaattttatgatagactgtatgaccagcacatcataacctaaacaaccagcaactgaaacaatacttgagtgtctttcgcagtaccatcagcatccagcacatcataacctaaacaaccagcaactgaaacataatggacaatgcttttatggacacgcacttcttccagcacatcataacctaaacaaccagcaactgaaacccaagatattcgggacgttgtaggcgagagtcgccagcacatcataacctaaacaaccagcaactgaaacgtttcgggctgttcattcactacgttcatggcgccagcacatcataacctaaacaaccagcaactgaaacattatcaaggttttttaaaatccaaggaattaacaccagcacatcataacctaaacaaccagcaactgaaacttcatgttaaggttaaaggtatcgccgggaagagcccagcacatcataacctaaacaaccagcaactgaaactgaggagaagttgtatctgaagaagatgtttgttcaaccagcacatcataacctaaacaaccagcaactgaaactattagtgatttagtttgttcgatttttacttgttccagcacatcataacctaaacaaccagcaactgaaactctgataatctccacctaaatggaaaaacctttcgccagcacatcataacctaaacaaccagcaactgaaacttcgttctgctgcttatgtagcccgttatatcatccagcacatcataacctaaacaaccagcaactgaaacttctgctgcttatgtagcccgttatatcatgaaaccagcacatcataacctaaacaaccagcaactgaaacccgccccctttggaagcagagaggataggattaagccagcacatcataacctaaacaaccagcaactgaaacggattggataaactctaatgtcttgggacattgccagcacatcataacctaaacaaccagcaactgaaacgtaattttagaaggcttatagcgatattcagcccccagcacatcataacctaaacaaccagcaactgaaacgctcgagcgtttttttccaagatttgttgtattgtccagcacatcataacctaaacaaccagcaactgaaactaaaagcgttatccatgatagggaagataggcgccagcacatcataacctaaacaaccagcaactgaaacggacgacgagacatagttgtgtattctggaagtaccagcacatcataacctaaacaaccagcaactgaaaccacttcttattcgattcgcacttcgctatgaagtgccagcacatcataacctaaacaaccagcaactgaaactaaaggactttggggacgtaaagaaaggagacttccagcacatcataacctaaacaaccagcaactgaaactggtattctaaggcctctgaggggatatacctaccagcacatcataacctaaacaaccagcaactgaaacaatcttgcttgtttcctagtttgataaattttctgattgattaactctgtttttagggtgttaaaaaaaactctcagcgactgcgttatcatggcattcaccttttctgctcatactttgggtgatgttatttgctttgaataacttaaggtattcataagcgctctgtaggttgagccttggtcagagtgtagtagcacttttgattgccattgataatgcgtcaatgattaattttgtattgttgttctgattcattgaccagccaacaactctacgagaatacaaatcaatcacagtggctaaatacagtcagccttgtttggtataaacaaaggtggtatcgctgacccatttgctgttgggtgttgcagcactgaactctttgttgagaatgttgttggtaaaattcacattgtttctaggtattttggcttttt

SEQ ID NO: 175 - DNA, 9440 bp, synthetic construct
  source 1..9440: mol_type = other DNA
  misc_feature 1..9440: note = Synthetic
tgcaattttcggcaacaccgtgtaattagaaaacgtagaagtacccatgtaatggaaaaacttttgcttaccgagagaaaatcgactactcccatcgggcctcaccccctgcccctgagtaacacgaattgcctgacaaagattagtcttgccactaacacaataatcacactgacgacattccggcgtatataacggaatgacatgatcaccctttcgcacactacgaacaccctcaccaacttcgacaacaacaccggcaccctcatgcccaagaatcgccggaaacaaaccctcagggtcggcaccagagcgggtaaattcatcggtatgacaaatccccgtagccttaatctccaccaacacctcgccagctttcggaccatcgagctgcaccattccaatctccagcggtttccccgcctgataagcaaccgccgcacgtgatttcatctactcccccaccccgatagaagcccaaattttttgccccgatgattcaccgaaacattcaactaaacaatcaacatcaaataatcccatttcattctccactggtttggctattgttaaaagccaactttaacactatgaattgatattttctatccagcgtccatgctgattgtgaccctggcgatataacaatgggcttctacttaacactccgtccagccccacaaagtgttttttgccaattgtccctcttattgaatttgtaattagccacatagattaagggtatgcggaatcacaaaatcaataataaccgccgccacaatgccgttatgctgtgtgcagattcacctttagattgtttaccaatacaggataaaaaaatgaaaataatttcaccaatcgccatagatatgggggcgaagaatacgggggtttactatgccaaatacgagcaggactcaacatttgagcaaatagaaaaacaagggcaagtgcttgtgtatagcaaatacctgtatccactccagtatagaaactacacgtctttactcaagaatagaacagctaaacgccacgcaagaagaggttatcagcgcaaaaaactagccaagcgtctgcttgtgcttgtattggaaaattattttaatttccctgcaaaacaacatactcaagccattgggtttttgctcaaccgacgtgggtttacttttttagaagaggattactctaaagagtctctaaatgatttacctgataatgcttggcagaatttatcggttaaagtgcaagagttattaagcgaacaacagggcattgcggataaattgatggatttggcgactaactgccctgaacaaattaccgatatttttaatgccatacaagaaattgacgactaccaaacataccaaaaggaaaaagaaacaattaacaaagagtttatttattttgattacattgaaaaaattaataaagcttgtgatttagtcaatcaagacaaagaagtgacagacaaagcagtagaactcaaggaaggagataagaaacatttatctaaaactgcccattggattgttgaaagattaaacaaagaaatcggctctaattttgttattcctgagggaaaatatcaaattgatttaacttcgcaaataaattcaacaaaggcaacgcggatacaaaaacaactacccgactttgaagaacaaagggtagcagtaaaatacaggaaaacaataaacgcgaaatctctatgggattttactatttccaaatttgaatttaactccaaaaacgaaaaaggtttagaagaaaacaaagagaaaacccatctccatcatctttgctatgccgtttacaaaatcaatcatgaaattatctcgggtgctcgccaccgctctacatattttgaagaaatccaggatgatttagaaaatttttccaacccaaactttttagacaataaacacagcccaaaatatcttataaactttatcaacgaaattacaaatcattcgcaattaaatattgataaattgcataaattagtttgtcatatcagtaattttgaactgaaacctttacgcgcttatttcaacgataaaacgccgataaagagagataaaaattataaaaaagaaaacacagacaaaagcaattttatttcgcatgttgctaaaaatggtggcgatcaatttaataacgagaaactcacaagacttgcatccatttggtttatgaaaaattggcgagttgatttaggcagagataaacaaggcaaagttgatagctacaaggaattaaaagaacagtggcaagaccaccatgataaaaacgatattattgcgttttggttgaaaacagaccctgtgcttaccattccgccttatcagaatatgaataaccgcaagccaccaaagtgtcaaactttggtgcttaacagcgagtatttaaaccatcattatcctgactggcgcgattggttggataaattaaaacctgatcagaaatatcaagaaaaattacaagaattggaaagtggtaaaggaccgaggacaaccaaagcaggtaaaaaaattgacggcaggctcattagtgatgattcaatcaaattgcgacaattacaatttattttagacactgccaaaaaagtagataaatataaactcaacgaaatttggagcatacatcatcaattacaaaaaccaactgcaacagatgaaaaccaattaaaaacagctattaaagacagtactttacctgagtgcttaaagaaggatttagaattctctagtgaaagtagttttaagcattttatcaacaagtattatcagactcgcagaaaagcacgggatggccgttattttttaattcaagtgaaaaaagagaaatggctgacaaaagggaaactgttaaccctttgtacacataaaccttggcagaaaaaacatcaatggaagatagatttagcagctgtttttggcattgataaagaagagttggaggacaaacttacaaacactgatggtaaagaaattgcaccagaggattattttaaggatattaaaggctgttgcgaaaaatcagccaaagctcaaaaggatcatagaggggaattgaaatataaaatcggcagagcgttagcacggtcagcgagtggtgagaaattaccaaaaggcgaggctaaagatttatcaaaccttgccgctaattgctataaatcgaaaacaaaattgattgaaattactggtattgatggcttgttagcagacatacaaaccaaagaaaatgatcagaaaattgcattggtttttaagtttgcccaaatcaataacattattttcaaagaacgaagcggcttttccaaaacttgtccggtttgctccactgacaatgcttttagaatgcagaaaaatgatgaaggcattgctcgggcttcaagattgccagcattgagcatacgtttaattgatggtgtggtgatgcgtatttgtgatgctattagtcgtcatgtagccagtactaaatggaatcatattaagagcgatttgaaacaaggtaaagaagtccatcttccgcttatttttgaacaaaaccgttttgagtttgagccgtctttggcaaaaattaaaggccgtacaattaaattaaacgatgatagagatgatcagtttaatgacaaaaataaaagaattaaagcagcagcaagcggtatttccgcttatagtggtcgcgaattttcagatggtgaaatagatcacatcatcccccaatcttcaaaatatggcacgctaaatgatgaggcaaatttaatttatctttctaatgaagataatcaatttaaaagtaataaaactaagtctttggtcgatttacaccaaaactacaaaaacaaaatttttggcggcgacactaaaacagacgaggaaatcaagcaatttatctatgataaattaataggcgaaaataaaaaaccagaaaatatagacaaagatgacgacaacttttcgtttggcaaatatttgagttttataaacttggagaaagatgtcgccattgcttttagacatgctttatttttagacggcgacccgcttaaacaaaaagtaatcaacgccctgcaaaaccgcaaccgcactattgtcaacggcacacaacgctatctcgcccaatgtattgccgacaaaatccatcgcagttacagaaaagaaaacccaaaaggaaaattagagtttgattattttgagtacactgccaaggttaatgaggaaaactcaaccaccgaactgcgtaaatattttgaggggaaaaaggctaaactatcagatggcttgttgatagatatatcaaaaaaaaccaatgaaaagcaaaaaacacaatcccatttaattgatgctcaaatggcatttttgctggccgcatacaatcatcaagacgatggcagtatgggattgaaatttgataaattagagactattaagcaaggcgatgtgagtgctgataccggagaatataatccaactaaattctttgacgcaagccttgtcggtgaaaatgattaccaaaaagttgagttgaaccctaaaagtagcaatgaaaaaattgtagatatagaaaaccgaaagaacaacaaaaaacaaaatctatctaaaatttttaaacgctatgttttcaaggaaaatgctattggtgaaagatacaaacctatagttgaatttaatggaaaaatgtacttaggctatcctatgacaattaagggaggcatatatcgttgtgatggttattgcaaggaaataacgactaaaagtggccttaaaaatcttcaaaatattatcaacgatgataaatactataaattaactattgacaatgagcaaataaaaatttggacaatcaaaacagttgacaaaaaatacaagcaaattgataaagattcacacaaatattttagtaaattaaatccacaatatactgatgatgaaaagcaagaaattgaacaaataaaatttatattaggcgcgtgtaaatattacgtttcaagatacaaagttgagaatgcaccgggtattttagcaaaatttgcagaatacaacgaagataacaaggaatgggtattcaagaaaaatgtcaaataccctttttatcaaaattggatagattttgataaagcatggcgaggatgtattaaaaacgcttacaaagttgacacaaaagggcaatatgatttatcagatgatgaagcagaaaaaaagtggaaggatttttgtaaaaaaagattttcgccgcctaaaaaccaacttaaaaataaacatcgggtcaaaggtaaaaaatacaccatgatatcatcaggcataccccctggtgctgtatttagaatcaacagaaacaaccaagacatttatcaagcaatttcgttagatactactattatcggaaaaaataagtctagttttttaattaaacacagtaaaaatttaactttaaactctccaactgctgataaagatttaaataaagaaataacattggaaattaccaatatagatttaaaaattgacaatattgaggatatttttcagaaagattttattgataataaagaaataaaaacacaaatagaattagtgaaggcgagtcttactaataatcaagtggcaatatcaaattttccagtctctatttttaaggacgttattgataacttttcaaaatgggaagaaggaaattcaattctattcaaacaaagtgatgatagaaaaccgaaggctaataacggtgaattaaagaaaataattaagttgccatatcgttttgatggaaaatcttcaattaaagatataacaatcaaagatgattttgttgattttaagttgtcgtgcaaaaaggatatagctcataagtttaaaaagaatttagaaaataatagtgattgatctgtccactctgaattcaaaccgcaaaaaagccctgttcctcgctcaaaaacaattacctgaattagtatgtgatgcggtgaatctggagggggtgaattttaccctgcccgagatacaaaccttgttggatggggtgacggtcggtgggcatagtttgcaggatgaaacgattgcacttaatcaggttaaagcctggcggtttttgtttgatagtgttgagcgggacaggtttagcttagctgaagattttgtttgcgagctgcatggggttcttgctcagcgagaagcgctgacttggggaattttcagggacggtggcgtaaccattgccgggtctgattatcttccgccgagtgcagatacattgccagcttgttggcaacaactgatggaaaaatataagcccgccctgcttcaatcagatttgcctcaatccgaaatgcacccgcctgaaattgacattgaacagacttacaccgacgctattagtatatttttgcaaatggcgcggacgcagtttttttatgataccaataaacgccttggccgactgatgatgaacggtgttttgttggtttgtggactgcctgcaatcaacctgcccgctaaaaagcaactcgagtttaatcaactgatgctgggtttttactccagtaacgatgagcagccaatgcaaatttttatgcgtgtttgtctggagaaaaaatttttagaaataatgtctgtataaatttatgcacgcccacatgacgctcacggaatacggtcaattcatcggcattagaagcgaatgtttgacggtaaaagaagatggcgtagtcaaagaatacccgcttaatcgcttaaaaagcatccatatcgccaaacaaggcgtgagtttttcctcggatgttgtcattgcttgcgccaatcgcggcattaaattcttcttgtctgatttcaagaatgaaattatttcttgtctttcaggcacccaacaacacgctgttgtgcgcgttcgacaaaagcaatttacatttatagatagtcccaacacggcaatattagctgccattgttattgaagggaaaatcagaaaccaacgtgcaaccctgctttattttaaaaaataccatcaagacaaagccgcgataatcgacaaaactgccgagcaattaaaagcgaccgcacagcaaataaagcttaagaaatggcaaaactatgagcactggcgagacattttattgggcttggaagggcaggcagcgagccaatattggcagtgtttggtagcggcaaatttgatgccctctgatttcaaaggcagggtcggcaggcaagcacaagatgttggtaacaagggtttaaattacggctacgccatcctcacatcttatgtttggaatgcgttaatcaatgctggtttagagccgcatgccggtttttttcatgtccaacgagcgggcaaaccgtctttagtgctcgatatgatggaggaatatcgtgcttgggtggtggatagaaatatcattaagcataggggtgttttgcgggacaaaaatgagcttacgccaaacattaaaaaacaaatcatcaccgatatacacaaaacattttccaccaaatatcattatcgcaaacgaaaaatgcgtctggaaagcattttgcaacgacagatatatcacttggcaggtacgttctcggaagaccggaaatacaaaagttaccggttcagatggtgaagcggtggcacaagtaaaattatacaatgaggtcttggtgagctacgacatagccgataccaagcagcgcacaaaactgtttactaaactgaaagacattagtctaacctcaatacaaaaatcagtattttgggggcatttaaacagcgcagaagaggcgagcgttaaacgtctgttgaaatcttattgtgccaaaacggacaaagcctttattacccgcgttaaattatccgagcaaatccagcaaaataacagcgtgggttatgaaaaacaggatttccccaaacactccacaagctaccatgtcctatagcctgcccattagcttgctcaggcaatattgtttttgcccaaggattccgtattttcaagagctgctaagactcaatccacccaaacctgtgtgggtaaagcaaggcgaggatttacacaaaaatcaggttaaggtattcaaacacagaaccttaaaacgctttgatttagtacaagccaaacaagagtttaatgtatttgtcagtgccgaagttttgcaattacacggcaccatcgatagcctgctaatcaataacgaaaaaatctaccccattgaattcaaattaagtggacacaaaccaaccaaaggacaaatactgcaactcaccgcatacgctatggtcgcgcaatatcaatacaacctgatttgcagacaaggatttattctttttgaagacaagggcaaaacccatccgatagcgttcaaaccaaaagacaaagaacaggtgctcatcatccgtgaccgcatcttaaatgatttggaaaaatcctgtctgccagatagcccggcaacctcagcacaatgcacacaatgcgaatatttaaaccactgcaatgaccgaaattgatataatgattggcgagcgggtactgaatctaaagccaaaaaaaagacccgccgaagcggatcttttcgtttcaaaaattaagggtcagtatgtatacagaaaactgattcactcccctaataaatcatctttattttagatgatttcagtgcatcacttaccaggttatgatgtgtcagcacaatgcgaaccataatacaaactttcgcaaaattcaacactttccagtattttcatgattttcgcaaaaacacctcaaaaaccagcccgaaaaagcaagccaaatcagcgttcaaaggcagactgacacatcataacctagcaagtcagcaactgaaaccgttatatttcatctaataaagcagtgtattggctgacacatcataacctagcaagtcagcaactgaaacatggaggcattcgcagttctagagaagctgcgaactctgacacatcataacctagcaagtcagcaactgaaacattcataccagtagggcctgctcgtatggagatactgacacatcataacctagcaagtcagcaactgaaactgcatttgtaaacttgcccggaaactggaccataaacctgacacatcataacctagcaagtcagcaactgaaaccattcgattcgttgtattcagtattaaatctaattctctgacacatcataacctagcaagtcagcaactgaaacagcgattaaacgatgcttgaaacaaattaccatatctgacacatcataacctagcaagtcagcaactgaaactcagcgtcttctaaatacgccggcaatatgtcgagctgacacatcataacctagcaagtcagcaactgaaacaatcgcgcgcgatgatctgtacccacaaataactctgacacatcataacctagcaagtcagcaactgaaacttactaagatttgctgtttcaggtgct

SEQ ID NO: 176 - DNA, 24269 bp, synthetic construct
  misc_feature 1..24269: note = Synthetic
  source 1..24269: mol_type = other DNA
aaccgcgttaagcgcaccttcgctcacattggtcgagccgcccacaaaacccagtttctcaaggacgagaacgtgcttggcaccggcctgataggccgagatggctgccgcaagaccggctccgccgccgcccacgacgaccacatcagcctgatacttggcttcaacggccggatgctgctcaacatgcttcgtgagcgccgtcatatcgccgcccgcctgcttcaggcagtccttgacgccctgcatcagcgcaaagctcgaaatcgtagcgcctgtcacggcatccacgcccaccgactgatgatcgagaattttcttgctcacaatgtcgagtgcaactcggccgacgccgatcgtctcaagattcttggagtagtcgatcttttcgatgcggttcttcccgacggtcacctgcacggtgagcggcgcattgtggccgttgacctgtgcagtataagtgccgggtttgaaggtgctcggcgcggtctgagcagcttcgctcgctgacgccattccggaaacacccatcaatgccgcggcagcggcaaacgccaccgcttttaattgcatgcttttacgcattattcctcccttctctgtgatccatcgacggcgcaggaggcaccgttcttttcatccgcaggccacagaagcgtgagcatcggcgctgccgatactcaacttttgcgaggctaagcagaaccattcggactcaacagagggattaacgcttagggtgaaattcgtactacttgaaaacaaaaatgcttacaagtctcgtatacatatcacgacaatcttgctcgcgtcagcgcagctgacagcgcttcagttcagcgggcggcgtctgaaaaaacggatgcgaacgggaggaaagcagacaaggattctgaagctcctggggctttaagcgaacggcccaaagaaacgctccgagcgttttagttttctttgcgttttgtcggaggtcactcagcttcagtaccgcaacgcgatcggcctgaggatccacggccgcaaaccgcccttctccgagccaaatgccggcggactgcggttcatcgtgctcaccaaagaacaccagatctccggctttgagctccgcgccgtctcgctcgcccgagagcggtgcgcccaaacgtgccaggcgatcgatgtcggcaggagccaggaggtcatgcatgcgaagcaccacgacgggaagcggcgcgcctaagacttcggctttgctgccgaccaatccttcggctgaagccgcaagcgccttgagataggccgatgggctgctgcggcgaagctcctcttcgcgctgctgccatgcagagacatcctccagcgccgtgcctgccgccttggccttgcggccgtcgggcaaaagcacctcccaataatcgggctgatgttcgagctgatagagctgaatgcccgctccggcaaagacaagagcatcaccgttttccgggcgaagttctgtgtttggccggcgcatgactgcggcagtctgacgattccaagacacaaatgccatgtcattcttgagcgccagccaactttctgaaatccatccgagccggccgtccaggcactggaccagtgcccagcccggggcctctgaagcggtcgccgaagtccgcttcaggattctcacccgctctcccaaaacgactgtgcgcaccgtccgctctgtacggcctgccgttttcggatcaagatccatgagttcggcgctaccaactttcacaataccccaagtcatcaaatccaaagacttcggttcgggcacttgatccacggcagactcaaacgacaatccttggcgagcagcggcagcaaagaacttagcgagcagcgcgggttctgctgatatccccgcaacagcagccgctccgggaagccgggaaaccgcaggaccaaactgaagcgccaaaagatccactcgatagtcgagcgcttcggcgtccgcaaaattcttccaaagcgcggcagcgcgctcttcggaaggggcctctcccggcgccggtacgttggccgcgtagtccgccgaaacggaaggctgagcagccgcgcaggctgatccactccccaaaccggcaagtgccagcgtcagcaaaagcccgcccaaaataaagcgggagtccgcgctcgatcgggttgaagcaaaagccatattcgttctccagcgccttgagtcttccgtcattttcggataaagattttggaaaatcagcctttgatcagctgatttcgcgggcagcagccggcagcagcagcgtcacgcgcgtgccgccgatcgggcttgcccgctctacctttacttccgcaccgatgcgggctgcgcgctcggccatgattgagaggccgacatgctgtcccttgcgagcttccaccacgtcgttgtcgatgccgacgccgtcgtcaacgatgctcaccttaaggtcgtcgttattttggatcgtcacggtgacactggtggcctgagcatgtttacgcacattggagagcgcttcctggatgatgaagatcacctgaagcttctggcgaggcgtgagcttggggccgtcgcccgttgcccgcagacgcgctgaaacatgagactgcccctcaaaacggtcaatcacagtctgcacgccctgaaggaagccttcgctgtgcacgcgttcacggaaattaaggagcagctcccgcacatcctgatagcactcctgcacacccgtctgaatggccgaaagcgactcgtcgcgaagcgcatcatctttatttttgatggcttccgagaggaactgcacctgcagattaaggtacgagagcgcctgcgcaatcgaatcatgcagcccctgggccagaagctgacgctcctgcaccaccgcaaactgtcgttcacgctcaattaggcgctgattgtcaatagccacgcccaaatgcgtcgagaagctctcgagaagctgaatcatctgcgaggaaagttccggcgcatcccggaaaagcagcatgtagacgccgatagactccgaaacacttcggaccttaaagcaataggccgttgagaaccccgcacgagcaagcacgatggcgagcggccgctgatcattttcaagccgcacgcgcaccggataatttttttgcagcaccgtacggctgatggaatcctcaaaagccatttccgcggcttcatgaatatcgctcggcctcaatccgctcgccgcagcaatattgaccgctccctgcttggcgtcgaccaatgtcacgagacacgcatctgcttcggtatagcgcacgatgcgttcgacaaacccttccgtcagctcctccatgccgcgctgctgcgagaagaaggatgtgatttcataaagctgcgccaaatgacgattcttttcctcgacagaagccgtcttttcggccactttctgctcaaggttgttgtagaggtcttccagtcgatccgccatgcggttgaagccctgagcaatgcgcccgatttcgtcttcgcttcgaggcgtcacgcgcgccgtcagatctccgccggagagtcggttgatgccttcgccgagttcattgatgggacgaatcacccagcgccagaggagaagcataatcgcaaagagactgccgatcgccagcacaatcaggagcatctgcagatagcgaagctgccacaaatacccgcttcgccactcttcaatgcggtgcgcaagattcgttgcttcatccagaaaactgctgagtgcatactcgtcaacaggcttcccaagctctctcgcacgcacaaacatgggttcgatactaccgcgccagcgcccttcaaggaggtcgagcttgtcggcaatatcgggctctcgcggcagcaggagcggcttccagctgtcgccgctgcgaacgttcttaaagccgtcgagcatcgcctgaagttctttgtcgaaatcgagccgcgacgagcccgtctgcgaaaaatacgctgctctataagcatgaaggcgcagttcgcccactgcgtatttggccgatgcgcttgcctcaagttcccagttaacgagcatcgtccaggcaatcgacccggaaacaaagctcacccaaagaagcgtgagaacgagaagacgagccgaaaggcttttaaagtacttcaggatgaacatgaggcgctgcgccgagccctgcggctcggcgggaattgtagattggcacaaaccgcagattagagaagcgttggatcttcgtccaccacttcaagcgtcaaaccgtcgtctgtcttaacgctgtcggacggagctccgccagctgtgtccgacccatcagtggaatccgttgattcaaagggcagccccacaatatgttcggccttccaggagagcgcaagcaccttgccgcggcgggcacgatggagcgttgcaccgctcaggatgcgcttggaaatctgcgcctctcgcgctttaccgcctcggccggtgccagtaacgattgccccgcggtcatcaaccagcgcgacagatacaagcgattcgcctgtttcaagcgtcatgaagctcatgcctttgccgccggaggccgtcacgcgcacttccttcaaggggaataccaagagtcgattggacgacgacaagcaggcaatgagctgctcgccctgcgccgctttaaggggcagttcaatcggcggcagaagcgactcgccttcgcctaacgttatgaaatcgcggccggcctttaaacgcgtcgatacgtccgaagccttcagcaccatgcccttgccgccggaagtcacaatcaccgcagcggcattcggatccgccgaaatccagcctgccggctgagcgcctttaggcaaatcaacgaaggccgaaagcggcgaaccatcgccgcggccgcccggcagtgcggagacggcaagcgtatagacgcggcccgcctgatccaagaacgaaatctgactgctcgaacggcactcaatcgtcgcttcgagtccgtcacccgtcttaaagctcatgagcgagcagtcgtgaccatgacccgtacgggcgcgcaggaagcccttgcgggaaatgacgaccgttacgggttcatccgccgtctgcacttcgtgcgccgcctgttcggcctcttcaaccaccgtacggcgaggatcggcaaaactcttggctgccgcttcgatttccttggccgtctggcgcttcagtgcgccgtcgctgccgagaattttctcgagtccggcacgttctttggcaagctgcgcgagctctttctcaatggcaatggccgccaagcgagcaagctgcttcaagcgaatttcaagaatatcgtcggcctgacggtccgtgagcccaaactctttgatgagatcggccttcggatcatctgcattgcgaataatggcgatcacgcggtcaatattgaggagcacaagcgaccggccttccaacacgtgaatgcggtcgagcaccttctccaaacgcgcctctgaacgccggcgaacgaccgccagccgaaatgcgatccaatcctgcagaatttcgagcaggcctttttgccggggcttgccgtccagtcccagcatcacaaggttcaccggcacgttgctttcgaggtcggtttccgaaagcaggtaattcacgaactcatcgcgatcgaccttgctcgtcttcggttcaaacacgaggcgcacgtcgacggacttgcccgactcgtcgcgcacattgtcgagcagcgaaagcatcgcactcttggcctgctgctgcttggccgaaagcgtctttttatccttcttgggacgcggattcgaaatctgctcaatgcggtccagaatcgaacgcgcagaagctgccggcggcagctcatcaatcacgagctgccactgaccgcgcgccagatcttcaaagtgccagcgagcacgaacacggagcttgccgcgtcccgaacggtagatggcgcgtatttcatccttaggcgtaataatctgaccgccgcatgggaagtccggagccggcatcagctccaggatttcgtttaaatctgcgtcgggattctccaaaagccgcacgcaggccgcagcgacttcgcccagattgtgcggagggatctcggtcgccataccaacagcaatgcccgacgaaccgttcagcagcacaaacggcagcttggcaggcagctccaccggttcctgaaaattgccgtcgtaattgggctgaaaatccacagaccccagatccacttcttcgagcaagagctgcgaaatgggcgtgagacgggtttccgtataacgcatcgccgctgccgagtcgccgtcgcgggaaccgaaattaccttccgccacaaggagcggatagcgaagcgaaaaggtctgagccatgcgcaccagggcgtcatacaccgactggtcaccgtgcggatgatatttgccgagcacgtcacccacaatacgggcgcttttgacgcttctgccctcaaatttcagccccatccggtacatgtctatcaggatgcggcgctggacaggtttttgcccgtcagtcacttccggaagcgctcggctcttcaccaccgacatggcgtattcaagataagcctgtgaagcatagcgggcaagcgtgagcgccccgtcctcttcggccggaccgactgtagctgcaccgacagccatctcttcagtagcggcttcctcgggtgattcctcaagagcatcgtctggcgatggagcagcatcatcagcatcgagctcctccgtttccggcggttcagagccgtctggctgctttgccgcctccggcgtttcgggggcctctgccgcatcgtcgtccgcagccttttcctgaatcgcctgagccccttgagactgcttagacggatccagttccggcacatcagcattcaagtcgccaaaaagggagtcgtgctcaaaatcgtctttcttcatgcttcatacagacgggttcgtcaatgccgccccagtctttcacttctttcgtttaaccgctttttcgggaccgtttttaaacatcgagctctgctcggtcaccataggcttccatccagaggcggcgtcccgtcacctgacgttcccccatcaaggtttgcatgaccgttcgggtatccgcttcggaaatactgccgaaagcaacggggaggagctttcgcgtatcgggagccagcgttgtctccgcgagctgctcagccttcatttcacccaaacccttgaagcgtgaaatggagagctgctcctcggtgaatccctcctttttgagagactccagcgtgcgcgacagttcgcgctcgtccagacaatagatcttgcgatcgggtttgcggcctttcttcggcgcatcaacgcgaaagagcggcggcatggcgacatacacgtgccccaattcaataagcttcggaaagtgcttcaagaagagcgtcagaaggagcacttgaatgtgagagccgtccacgtccgcgtcggacaagatgcagatctttccataacgcagccctttcaaatccggatcgccgtcccggtgatgcggatccaccccgatggcgagcgcaatgtcatgaatcgtgtcggaacggaagagttcgccgccctcgacttcccaggtattgaggatcttgccgcgcagcggcagcacagcctgaaattccttgtcgcgcccctgcttagcggagccgccggctgaatccccttcaacgatgaagagttcgttgcgcgtaatgtcgcttgactcacagtcggtgagtttgcccggcaataccgccaccgtgcttgcgcgacggcgctcgtatttcgcagcctgacgctgacgcgcctgtgcctgcgaaatgatgtgttcaacgagctttttgccttcgtcggcatggtcattgagccagaattcaaactgcggacgtacgaacccgcccacgagcttcactgcatcacggctcgtgagtttttccttcgtctgtccttgaaactggggatcgagcgactttgttgaaagaacaaaattaacgcgcgaaaagacgtcttcggcgagaattttcacgccctttggctgcagcccatgggcatccatgaaagcacggacagcttgaaagaggccgtccttcaatcccgcttcatgcgtgccgccctgcggcgtcggaatgaggttcacatagctctcgcgcgtgagcggtccttcagccgtccacaccaccacccaagaggcgccttcacccggcgaaaagctttcggaatcttcatcagcaaagcctgaagcttcaaacggttcaataagactttcgcccttgatttccgagagcagatattcctttaagcctcccgaatatttccaatgcgcttccgttccggtcattttgttgacgtagtcaacttcgcatcccggaaggagcaccgccttcgagcgcagaagacggaccaatgccggttctggaataaccggactgtcaaaatacttcggatcgggccagaccgttacgcgcgtgcccgtgcgcgacttcgggcgggagctttttttgatctccaaaggttcagacacgaacccgtcgcgaaagcccatcgttgcttcttggccgtcgcgccaaacagtcaccactaaatgcttggaaagcgcgttggttaccgaaacgcctacaccatgaaggccgcccgcaaacgtgtaggggccgcttccatcggccttggcgaacttgccgccggcatggagccgcgtaaaaacaatctccagcaccggcgcgtgttcttcaggatgcatgccggtaggaatacctcggccatcatcctccaccgtcactgatccgtccgcagccacctcaacagagattcttttgccgtagcccgcgagcacttcgtcgcttgcgttgtcaatcacctcctgaatgatatggaggggattgtcagtcagcgtatacatgcccgggcgctgcttgacaggttctaaccctttcagcacgcgaatagcctctacgccgtattcttcttttttcgccatcttcacaaacaaaatgcagccggagattcagaggaaggcgcttgcgctgcttccgtccgatcgaaccagtactgaataaaaggagagtcgaggttgatcgagtttcaccggtcagccttctgcagcgcttccacttcagcagcaagcagactcaaagagcctgctgcgcaggaagcagcgaggagaaccatgcattgtttgatcctcttcgagactcacagatatatattctagcaattgcagtcaccaggctaaatagcagcgctatccgtgctgacacccaaaaaagccatttctttgcggcttatcccattcaaaagacccaacgctaactgaaggtgtacgccaatatacccaaatgcgctgtcagcactagagtgatgatgcagagcttgttggtttatctaaccagtaaagcccgtaaaaagatgatcgtgcctcatactgccggctaaagaccgctatgcccgcaatgtgagtatcaaaagttcgttcagatcaagttcacaaagtaaacaatcatttcacataataattaaataaaaaacttcgtttctttgatctgattaaaaacgggattttatcaaaacaaacagatatctattgccaaatagtggctgtattaaaacagaaatcataacgccacgagctattgctttgaaacggatcatcaacgagcacacaagtacatattcttgcaattgccgccaatcgtccaaactgtcaagggtttcgtgaaaatggtcatagaccccgcttcgcatgagatcgggacgtcaaaatgctgaaacgcttatcgacgggactgacgggaggaataatgtttcggattgacgacaacgttagtgctgcgccgtataaacattaaaatactatccgccttacttgcagaaggatttcggtgatttgtgaagcccaatttggggaaaacaccattcaatcatcatgacacaatctccgtatcacgaccttgttcaatcagtatattttctgtcaaactggctgtttgtaagattaatttaactctgtaattccatctgccttaggagttcctcatgacgcaatcggaacgacgcttttcgtgttccatcggcattgatatgggtgccaaatataccggtgtgttttatgcactgtttgaccgcgaagaactccccaccaatttgaactccaaagcgatgaccttggttatgccggaaacggggcctcgctacgttcaggctcaacgtaccgcagtccgtcaccgtttgcgcggccagaagcgttataccctggctcgcaaacttgcttttctcgttgttgacgacatgatgaaaaaacaagagaaacgcttaactgacgaggaatggaaacgcggcagagaagctttaagcggcctgcttaagcgtcgaggttattccagacccaatgccgatggagaagatttgacgccgcttgagaacgtacgtgcggaggtatttgccgcgcatcctgccttcagtacatatttcagtgaagtgcgttctctagctgagcaatgggaggaatttactgccaatattagtaatgttgaaatgtttcttggtgattcgaatataccggccgacaaggaatttgtagactttgcagttgccgaaggactcatcgataaaacagagaaaaaagcctacctgagtgccctttcaaccatgcgagccaatgcgaatgtattgactggattgcgtcaaatgggccataaaccccgcagtgaatacttcaaggccattgaagcaaatctcaaaaaagattcgagattagcgaagatctgcgaagcttttggaggcgcagaccgcctcgctcgacttctcggcaacctctcaaatctgcagctgcgggcagaacggtggtacttcaatgcgcccgatatcatgaaagatcgcggctgggaaccggaccgctttaaaaaaacactcgtacgtgccttcaaatttttccatcccgcaaaagatcagaataagcagcaccttgagttaatcaagcaaatagagaattccgaagacatcattgaaacgctctgcacgctagatcctaaccgcacgatcccgccgtacgaagatcaaaataaccgtcgcccaccgctagatcagacacttctgctgagtcccgagaaattgacgcggcagtatggcgaaatctggaaaacgtggtcagcccgtttaacgagcgacgagccgacacttgctccggcagcagaaatcttggaacgctcaacggatcgaaaatcgcgtgtagctgtgaacggtcatgaacctctgccgacattggcgtaccaactttcctatgcattgcagcgcgcctttgatcgcagtaaggcgcttgatccctatgcacttcgtgctttagcagcaggcagcaagagcaataagctcacaagcgctcgaacggctttagaaaactgcattggcggacaaaatgtggagaagttcctcgactgtgctcggcgctactaccgagaagcggatgacgccaaggttgggctgtggtttgataatgcagatggtcttcttgagcggtcagatctccatccgccaatgaaaaagaaaattttaccgttgcttgttgccaatattctgcagacggatgaaactactggacagaaatttcttgacgaaatctggcgtaagcaaataaaaggccgtgaaacagtagcctctcgctgtgcgcgcatcgaaacggttcgcaagagttttggcggaggtttcaacattgcctataacacagcacagtacagaaaagtcaataaattacccagaaatgcgcaggacaaagaacttctgacaattcgcgatcgagttgctgaaactgcagattttattgcagcaaacctggggttgagtgatgaacaaaagcgtaagtttgccaaccccttctctcttgctcagttctatacgctcattgaaactgaagtgagcggtttttccgccacgacacttgctgttcaccttgaaaatgcctggcgcatgacaataaaagacgccgtaatcaatggagaaacagtacgcgctgcgcagtgttctcggttgccagcagaaactgctagaccattcgacgggctggtgcgtcgtctcgttgaccgtcaggcctgggaaatcgctaagcgtgtgtcgaccgacattcagagcaaggtggacttcagcaatggcattgttgatgtgtccatttttgttgaagagaacaaatttgagttctcggcatcagttgcagacctcaaaaagaacaagcgtgtcaaagacaagatgttgtctgaagctgaaaaactcgaaacgcgctggctgaacaaaaacgaacgcattaagacagccagccgggaaacctgcccctatacaggacagcgcctggccgaaggcggagaaattgaccatattctgccgcgaagtttgatcaaagacgctcgaggcatcgtgtttaacagcgaacccaatctcatctacgtctcttctcgaggtaatcaactcaaaaaagatcagcgctacagtctttcaaatctgcatactgactacctgaagaaaatcttcaagaccagcaacattgctgcaattactgcagagattgaggatgtagtcaccaagctgcagcaaacgcaccgcttgaagttctttgatcttttaaatgaacatgagcaggactgtgttcgacataccctctttctggatgatggcagcgaagctcgcaatgcggtgctcgaactgctcgcaactcagagaagaactcgtgtcaacggcacgcagatttggatgattaaaaaccttgccaataaaatcagggaagaactccaggactggtgcagaacaacaaataaccgactgcattttcaagctgccgcaacggacgtctccaccgctaaaaacttgagactcaaattagcgcaacatcagctggactttgaaaagccggacattcagcctatcgcttctcattccattgatgcactatgttcgtttgctgtcggttctgcagatgctgagcgagatcaagatggctttgactatcttgatggcaaagctgtattgggactctatccgcagtcctgcgaagtgattcacttgcaagcaaaaccacaggaagataaatctcactttgacagcgtcgccatttttaaagaaggcatctacgctgaacaatttctgccgatttttacgcttaacggaaaaatttggattggctatgaaacactcgatgccaagggtgaacgttgtggtgccattgaagtttccggcaagcagcccgaggaattactctcgatgcttgccccattcttcaacaaacctgttggagatttgtcagcacatgccacttatcgaatccagaaaaaaccggcctacgaattccttgccaaggctgctctgcagccgctgtcggcggaggaaaaacgcctagccgcgcttcttgatgcgcttcgttactgcacttcacgtaagagcctcatgagcctctgtatggctacgaatgggaaatcgctcaaaaaacgagaagatgtgctcaagcccaaacttttccaacttaaggttgaactcaagggagaaaaagcattcaaacttaatggttcattgacgttgcccatgaagcaagattggctccgtatatgtgattctcctgaattggtcgatgccttcggtaaaccttgtagtgcggatgaattgacctccaaacttgcacgaatttggaagcgccctgtgatgcgggatctcgcccacgcacctgtacgacgagaattcagcttgcctgccattgacaatccctccggaggcttccgtattcgccgtacaaacctgttcggcaatgagctttatcaagttcatgcaatcaatgcaaaaaaatattgcggttttgcatctgcaggcagcaatgttgattggtcaaaggggatcctttttaacgagcttcagcacgaaaatttaacagaatgcggcggacgatttattacttcagccgacgtaacaccgatgtctgagtggagaaaagtcgtggccgaagataacctcagcatatggatcgcaccaggcaccgaaggacgacgctatgtgcgtgttgaaacaacgtttatacaagctagccactggtttgaacaaagtgttgaaaattgggctatcacatctccgctgtcattgcccgcctctttcaaagtcgacaaaccagctgaattccaaaaggctgttggaacagagctttctgaattactcggtcaacctcgtgacaagatattcattgaaagtatcgtcaatacaaaacgaattcgtttctggtacaccgttaagaatagcaataagaagatgaacgaaagctacaacaacgcatctaaatcatgaggtatttaaccgtttcttcttttggtacggcactcggactttcaggagaacgacttgttgttcatgaagcggatggacgcacgtgggagactgctctttcaagactgcgcaccatccgcattgagaaaaaaggtatcagtatctccacaaatctgatgctcgcctgtgcagcgaggggcattcgaatgttcatcgttgattggcgtggcgtgggggtcgttgccttaagtggtctccatcaacatgctgtcgtcaacatacgcgaagcgcagtttcaggcaattcactcctctcaaggccgcatcatcgcagcagagatgatcgtcgccaagattcgcaatcagcgcactgtacttttatatttttggaagtacctcaataagagtgctccggagaaggcggaaaaactgagagaagctgccgacaccatagctaatattgtgacgaaaacaaaagcagaaattgaaaatcttcaaacttgggatgaagggatatggtcgactgttctgatgggttatgaaggtgcagctgcaacgctttattggcaagcacttcgcacagcaggtttagtgcccgaaaccttcctcactcgagaaggtcgaggctccgtcgaaatcgtcaatgcggcactcaattacggctacgcgattctgcagagctacatctggtccgcgcttgataatgctggatttgaactttatgcagggttccttcaccgtcgacgtcctgggaaaccttctttagtactcgatgttatggaagagtatcgagcatgggttgtcgatcgaaacatcatcaaacttcggtcaatgcttaaaaattcaaagcgtggccttacacaggaaatcaaaagtgccattgtcaatgctatcgatgagacgatggcaaatgctgtgagttggcaaggcaaaagcgttcgccttgaaaatgctttgcagcgacaggcgtatcgccttgccggtacagttgttgacggtaaacattacaaaagcattcgctttagatggtaggaaacgctcgtcatgtcaatctacgcaaagtatctggtctgttatgacgtttcgagcaactcccgcagaaaaaagttctccgacgctctaaaggatctaggcctagtctcaatgcaaggttccgtattctacggcgacctcaagccagctgaagtgcgagctttagcaagaaaagctacagaactcctagatccgaaggaagataaatgtttctggtttccctgtcgcttagaagtcaaagacattcaaaaatgcatcggttacgacgattggtcctttgctgaagtggacggccatggaacaatttaacctccccgtatcaatgctgcgtcaacactgtttttgtcctcgcattcctttctttcaactcatgcgcggcattcaacctgttggaccgatgtggctgcagcaaggactgaatcatcatgttcgagaagagatgctcgcaaaacgtcgaaaactatctcgatttggtatttctccacagagttttcgattttttgaagatatcaagttatacaacgatagcttgggacttcacggtatctgtgacggcgctattttcactgagaatgaagtgatccctcttgaatttaagttatcagaagtcagtccaccaatgggcgccagactacagttagctgcttacgcaatgctgcttgaatatcaggaaaagataaaaatatcaaggggttttgtgctttatggccagaaaggtcataccctggaggttatagtagacatcaaattacgagctgaagttcttactgtggcaaatctaataagaaaagcctgtaaaaaggctatcgtgcctcatacagcagctacggaatcgcaatgcgcgcaatgtgagtatcaaaatttctgtgcagatcgattctaagaagtgaatacttacttctaagtaagtaaatgaaaacctcattctttggtctaatcaaagaatgaggttttatatcaaaatatccggatatctattactagatagtggccggattcaatcttagctttaggggatttcagctcacccgaaggtgatttcctatagctcatagcattatgagctctaatcagtatcttacgatgtattttcgaaaattacaaggtttttttatcaatctgagtattttcgaagtatggcactctgcagatagttgcaaaaaccttataaatcaatgtgtaagttagggggcagagatcataacgctacgagctatagcactgaaacaacaagttctctaatcagccgccttacggtcctaaagcagagatcataacgctacgagctatagcactgaaactaagcaagcctgttgtcgacctgatgactattcttatgcagagatcataacgctacgagctatagcactgaaacaaatactcaggacgctggagacgtgcatcaggcgaagcagagatcataacgctacgagctatagcactgaaacaggcaataacttatatcgtagtcgtacgcttgagagcagagatcataacgctacgagctatagcactgaaacatctcaatcaacgatctccgtcaagcttttcagatcgcagagatcataacgctacgagctatagcactgaaacattgttctttaagaatgtaattcgtcaaagcttgagcagagatcataacgctacgagctatagcactgaaacgttcagaaagccctctcattgaaccgatcgccttacggcagagatcataacgctacgagctatagcactgaaactagggcaaagcatataccacaaagcaaggagaaagcgcagagatcataacgctacgagctatagcactgaaaccagtagccatagcgcagttccaaatgaaatcaaatgaaagcagagatcataacgctacgagctatagcactgaaacgttacgctcagtggctagcgcagagttctcagttgcagcagagatcataacgctacgagctatagcactgaaactgcggtcaatgcattggttgcagactttctaagtcgcagagatcataacgctacgagctatagcactgaaacggagaggtgaattcgccgcgaaagcggcgaagaggcagagatcataacgctacgagctatagcactgaaacggttgtttcaggatcgggcgcgtacttgaaatctattgcagagatcataacgctacgagctatagcactgaaacctaacacggcggttaaggcattgcgcggtgaaatgcagagatcataacgctacgagctatagcactgaaaccccaagcagacgccgtaagcgcgctccagaaatgaagagcagagatcataacgctacgagctatagcactgaaacttcgccgtgccgtcgccggagatgccggatcccagcagagatcataacgctacgagctatagcactgaaactgttagaaaggttaaagaagcgaaagcgctttcgcagagatcataacgctacgagctatagcactgaaactgatgtcagcttttggtacgtgctcaaagatctcccagcagagatcataacgctacgagctatagcactgaaactagtcgaccgtgatttgtccggaacacgcgcgaagcagagatcataacgctacgagctatagcactgaaaccatcagcagagcaaagcgcaacagaaaatttgtggcagagatcataacgctacgagctatagcactgaaacctcgaatgtttgcttttcattcagcatgtggtatagcagagatcataacgctacgagctatagcactgaaacgaccagtcaacacgatcagaccccgtccatatcggcggcagagatcataacgctacgagctatagcactgaaaccacgccgccagcgcggccggccgaacacatatgcagcagagatcataacgctacgagctatagcactgaaactacatgcatcatggcttgatgtatttgcacgatgctgcagagatcataacgctacgagctatagcactgaaacctcagtttggacgtcttcaagagtgaaggcggtgagcagagatcataacgctacgagctatagcactgaaaccgattttcgcaatttcgcgcctgctcgcgttttgctgcagagatcataacgctacgagctatagcactgaaacccgaagagtgggggcgctaattgtctcagcctccggtgcagagatcataacgctacgagctatagcactgaaactttacaaaggcgtctcggacggcgtccgagttaaaaaggcagagatcataacgctacgagctatagcactgaaactggaaggaatcagagacaacaccaaaagccgcgaggttagcagagatcataacgctacgagctatagcactgaaaccttttggatcaccacctcagcaagtcgtatcgctctgcagagatcataacgctacgagctatagcactgaaacacttcaccggaaaccgtggtatgggcgtgctttatgcagagatcataacgctacgagctatagcactgaaacattaaacagttcagcgcggtagtgatgactttgacgtgcagagatcataacgctacgagctatagcactgaaacggagtgctcggtgaatcacttcgcaggaatgtgtctgtgaagatcataacgctacaagatacaacgctgaaaacacagattcaacaaatatcactattcaaggcattgcagcaatttcaccttaaaagcatgcgagcgctctagtgttatagacacactccactgaagaagccgcgtagcaacgtctacgccaaaccccctacaatagatgcctcatgttgattctggaggctccgtcatgggcaagctctatatgggtttcgatgccggcacgcaaagcgtgaaggttgctgtttacgatgaacaatttcgcctggtcacgagccgatcactgcccacatcactcacctatccgcagccggggtgggtagaaatggacgtcaacacctatcttgacaactgcgtggtttgtatggctgaaaccacgagtgaactgcggcgtttggggttcgatcctaaagacgtcagtgccattatgggtgacggcatcatctgcggcattgtcgggatcgatgaaaacgcggatccggtaacgccttacatcaactacctcgacagccgcaccatggctgacgttgaaacgatcaacgccaaaaagctggatatctggagccgtgagaccggcaatccagaggcctcccccatgtttcccgcgatgttcgcccgttggttcatcgccaactccgaagccttccgcacgaagggcgtgaaattcgtccataacgccccctacattctgatgagactggctggccttaaaggcaaagatgcctttattgactggggcgccatgtcaggctgggggctgggctacgacgtgcaaaagaaatgctggtcggaagagcagctccagattctcgggattgatccacagtacatgccgaccatccgcaaaccctgggacattgtcggcggactctgtgaagcaatgtccgtgcgcacgggactgccggccggcatccctattcttgcgggtgcgggcgacacgatgcagtccatgctgggttccggggtatttgaagccaatcagggcgtcgatgttgcaggaacatgtgcgatgttctgcgtctccacctccggcatcgtgcccgaactttccaaacccggcatgggtctcatctttaattcaggcacgctgcccgacacatatttctattgggggttcgtgcgtacgggcggcttgtcgcttcgctggttcaaggaccacgtggctcgtcacgagggtgacggcagctactacggcactctctccgaaggtgctgccaaggttcctgccggcgctggcggcgtacagttcctcccttaccttacgggcggatacggcgaagagaaagaggcaagcgggtgcttcctcaacatgacgatggatgacaaccagttcgtcatgtggcgtgcagtccttgaagccatcggctacgactatatgggacttgccgacagctatcgagctgctggcgtgccgctcaaacgcatcaccgtcacagagggcggcagccgcgacggtctctggaatcaaatcaagtccaatatgctcggcgcagaggttgtgcgttttgagaatcctggcggagccgttcttaccaactgcgtattcggcgcttatgctgcaggtgaccttgaaggcgtcgacgacgtcaaggctgcgctcggcagcgtcattaagcgcagcggcgtttataagcctgaagcggccctctctcgccgctaccgcgaactctttgaaaaccgtcaaaagctcgttcgcgaagatctgaaggcagccttcagccgcctcgtgaaaatgcgcgctattcactaaaaatcaggtttttaggccaatacaaaagccgctcggagtttggaattttgcttccaaccgccgggcggctttcttttgatgggttcacgtcggcgcagagggcattgcagctgctggcgaccgtgaacccgcagtgctgattattcctcagtctgctttgcttcacccttcacaaaatcggggcgctgcacttcaacaccgagcgaatgttcgagtgcatcgaggtacccgcggcgatcggattcaccataaacggaggaaagttcacgggtgatgccggcgaggtcctcgggcttagcttcatgcttcttggcttccttcacgtaaatgacaacgtaggagccgtcagcgagcacagcattggtgtagctcggaagcttcgccgtcgggagcgcaagggcagcattcaccacagtcacttcctgattctgcggcgcgcggcgcgaaatccacatctcgtcgccgaagccgtcaacgctcttagcctgctgcaccgaagcgagcttggcctgaccggcctcaatcgccatggcgccagccttttgacgcttgagcgcatcggtaatgagtcccttcacttcgtcaagcgggcgttcggcttccgggaagtattccacgacacgagcagaaaccaaacgatttcccgaaacctcaatagcgctcgtattgcgcttttccttcaaagcttctgtgccgaacagcgattcagccacatgctcggtaatgatctgactgagttccggatctgtcacgccgttgcgggtgacgaaatcagccgtctcaaccttaagaccgaacttcgctgcagccggttcgagcgtatcggactgctcataaaccaggttcgtgaattcatcggcgtgggtggagaactcgcgaatcgcctgctgctgcgcatactcgcgctcgatctcgctcttcacgtcttcgaaaggctcaactgcagccggatgaatgtcggtcacgtagatcacatgccagccgaattccgtttcaatcgggccgacaatatcgcccttcttggcgttaaacaccgcatcttcaaaagccttcgtcatgacgccgcggccgaagaaggacagatcaccgccctgttctgcgctgcccgtgtcaacggaattggccttggccagttcagcaaacttagaaggatcagccttcacttcattggcaagttcttcagccttcttgcgggcagcttccttgtcatcgccgaactcgatcagaatatgacttgcgcggcgctcttcaggaacggtccagcgctgcttattttgttcgtaaaaggtcttgaggtcgtccagactggccttctgattgctgaaagcgtcaggcgaaaagacaacgtactgcgccttgatgtgctcgggcgaaagaaaatccttcaggtgagcgttgtagtaggctttaatctcttcgtccgtaacggcaaccttgtccaggtagtcatccgcaggcagaaccagcgtgcgaacgctgcgctcttcggtgaggatctcgtagaactgctccgtaagcgccttggggaccggataggtcgcactcacgccggaaaccaccgcttccttagcgagatcgttgcgaatctccatcacgaactgctggtcgctcttgccctgagaacgcaggaactgttcataacgctcggcagagaactttccgtcaaccttaagcgcgtcagcgttcttaatgagcgccacagcctgtgcttcactgacggaaatgtggttcttggtcaccacctgattgatcgcagcctcatccatcaacatgcgaagcaggtcttcacgagcctgaggcgtatcgagcaggctggcgtgaaagctctcacccatctgctgacgcaggcgttcaagctgctggcgcttggccaaatcaaaattttcaggcgtaatcgacacctcgcccactttgacgatcgagttgtcactctgagtcatgcggttgtacgaataaatgccggtaaccacaaagctcggaataatgaacaccattgcgatgaccatcagccaacgcttgtgttcgcggaatgcctgcagcataagggatccttgtctaagggccgcttctgcgcatcattgaagaaagcgaagaaacggcgagcatgccagttggaaatgttcttttgccgggacgcagataacaaaaaaggcgaaacctcacggctcgcctttttcaagaaatctttggcggagtggacgggactcgaacccgcgaccctcggcgtgacaggccgatattctaaccaactgaactaccactccgcatcagagatgctgctgtttttcagcctagaaggtgcattatacggagcgaaggagaatttgcaagccttgcggcttcatcatctcttgcgacccgggatgcatctcccagtggactccttaaacccggaatccagggcaataaaaaagccgttaccggcttttctatcagtgctctcttgaagtgttggcggagtggacgggactcgaacccgcgaccctcggcgtgacaggccgatattctaaccaactgaactaccactccgttttctctcggagagcgccttctccgtttcggagaagaattgggattttacagacttcacgaaacctgtcaagaggattgacgaaaaaccacctcaaattcacgtctacatgacgcatacacgtgatcaaagcggctcagcatcacggaggcagaccgctcagcagcctgcgcataacgaaaaatcccggaccgccaactgcgattcgggattcctgcttaaagtccgaaagatgactgatggtggatcctgagggactcgaacccccgacccacgccgtgtaaaggcgttgctctaccaactgagctaaggatccatcggactttgaaacttcgagcgtcaaactcgaaggagagcggattgtagcaagcggcggcgaattttgctcgccgccgcccattcttttcacattgtcgacttagcaggtcagcatcaaattacgcggaaggctgagcagccggcgtattcggcgctgacgacatcttcggcggcatgagcgttgcctcggcatcatccgtgagaggcgtcggctgccgcacgagcgcacgagcaagcacttcctcaatgtgcttcaccggcacaatctcgagccccttcagagcgtcttccttgatctcggtgaggtccttcatgttctcttgcgggatcaagacggttttcaccccgcctcgctgagctgcgagcagtttttctttcagaccgccgatcggaagcacttcaccgcgaagggtgatttcacccgtcatcgccaagtcgcttctcactggaatgccggtaagcgcagaggtcatcgctgtaacgatagccgcacccgcactcggaccatccttcggaatagcgccttcgggaaagtggatgtgccagtcggtattggcaaagatgtcggacttgagacccagctgtttggcacgcgcacgcaccacactgcgggccgcttccacactttctttcatcacgtcgcccagcatgccggtgcgaagcacctgccctttgcccgggaaagctacggcttcaatcatcagaatgtcgccgcccacttcggaccacgaaagaccgttgacgatgccgacctgcggttcacgctgagccgacgtaatgct

SEQ ID NO: 177 - DNA, 23780 bp, synthetic construct
  misc_feature 1..23780: note = Synthetic
  source 1..23780: mol_type = other DNA
agcgcaccttcgctcacattggtcgagccgcccaaaaagcccagtttctcaaggacgagaacgtgcttggcaccggcctgataggccgagatggctgccgcaagaccggctccgccgccgcccacgacgaccacatcagcctgatactgggcttcaacggccggatgctgctcaacatgcttcgtgagcgcggtcatatcgccgcccgcctgcttcaggcagtccttgacgccctgcatcagcgcaaagctcgaaatcgtagcgcccgtcacggcatccacgcccaccgactgatgatcgagaattttcttgctcacaatgtcgagcgcaactcggccgacgccgatcgtctcaagattcttagagtagtcgatcttttcgatacggttcttcccgacggttacctgcacggtgagcggtgcattgtggccgttgacctgtgcagtataagtgccgggtttgaaggtgctcggcgcggtctgagcagcttcgctcgctgacgccagtccggaaacacccatcaatgccgctaccgcggcaaacgctacagctttcaattgcatgcttttacgcattattcctcccttctctgtggtccatcgacggcgcaggaggcgccgttcttttcatccgcagaccacagaagcgtgagcatcggcgctgccgatactcaacttttgcgaggctaagcagaaccattcagactcaacagagggattaacgcttagggtgaaattcgtactacttgaaaacaaaaaagcttacaagcatcgtatacatatcacgacaatattgttctcggtcagcgcagctgacagcgcttgagttcagcgggcggcgtctggaaaaacggatgcgaacgggaggaaagcagacaaggattttgaagctcctggggctttaagcgaacggcccaaagaaacgctccgagtgttttagttttctttgcgttttggcggaggtcactcagcttcagtaccgcaacgcgatcagtctgaggatccacggccgcaaaccgcccttctccgagccaaatgccggcggactgaggttcatcgtgctcaccaaagaacaccaggtctccggctttaagctccgcgccgtctcgtccgcccgagagcggtgcacccaaacgtgccagccgatcgatatcgcctggagccaggaggtcatgcatgcgaagcaccacgacgggaagcggcgcgcctaagacttcggctttgctgccgaccaatccttcggctgacgccgcaagcgccttgagataggccgaaggactgctgcggcgaagctcctcttcgcgctgctgccacgcagagacatcctccagcgccgtgcctgacgccttggccttgcggccgtcgggcaaaagcacctcccaataatcgggctgatgttcgagctgatagagctgaatgcccgctccggcaaagacaagagcatcaccgttttccgggcaaagttctgtgttgggccggcgcataactgcggcattctgacgattccaagacacaaatgccatgtcatttttgagcgccagccaactttctgaaatccatccgagccggccgtccaggcactgtaccagtgcccagcccggggcctctgaagcggtcgccgaagtccgcttcaggattctcacccgctcacccaaaacgactatgcgcaccgtccgctctgtacggccagccgttttcggatcaagatccatgagttcggcgctgccaactttcacaataccccaagtcatcaaatccaaagacttcggttcgggcacttgatccacggcagactcaaacgacaatccttggcgagcggcggccgcaaagaacttagcgagcagcgcgggttctgctgatatccccgtaacagcagccgctccgggaagccgggaaaccgcaggaccaaattgaagcgccaaaagatccactcgatagtcgagcgcttcggcgtccgcaaaattcttccacagcgcagcagcgcgctcttcggatggggcctcacccggcgccggtacgttgaccgcatagtccgccgaaacggaaggctgagcagccgcgcaggctgattcactcccccaaacggcaagtgacagcgtcagcaaaagcccgcccaaaataaagcaggagtccgcgctcgatcggtttgaagcaaatgccatattcgttctccagcgccttgagtcttccattattttcggataaagattttggaaaatcagccttcaatcagctgatttcgcgggcagcggccggcagcagcagcgtcacgcgcgtgccgccgatcgggcttgcccgctcaaccttaacttccgcaccgatgcgggctgcacgctcggccatgattgagaggccgacatgctgtcccttgcgagcttccaccacatcgttgtcgatgccgacgccgtcgtcaacgatgctcaccttcaggtcgtcgttattctgaatcgtcacggtgacactggtagcctgagcatgtttgcgaacgttggagagcgcttcctgaatgatgaagatcacctgaagcttctggcggggcgtgagcttggggccgtcccccgttgcccgcagacgcgctgaaacatgagactgcccctcaaaacggtcaatcacagtctgcacgccctgaaggaagccttcgctgtgcacgcgttcacggaaattgaggagcagctcccgcacatcctgatagcactcctgcacacccgtctgaatggccgaaagcgactcgtcgcgaagcgcatcatctttatttttgatggcttccgagaggaactgaacctgcagattgaggtacgagagcgcctgcgcaatcgaatcatgcagcccctgggccaggagctgacgctcctgaacgactgcaaactgtcgttcacgctcgatcaggcgctgattgtcaatagccacgcccaagtgcgtcgagaaactctcgagaagctgaatcatctgcgaggaaagttccggtgcatcccggaaaagcagcatgtagacgccgatagactccgaaacacttcggaccttaaagcaataggccgttgagaaccccgcacgagcaagcacgacggcgagcggccgctgatcattttcaagccgcacgcgcaccggataatttttttgcagcaccgtacggctgatcgaatcctcaaaagccatttccgcggcttcatgaatatcgctcggcctcaatccgctcgccgcagcaatattaacggccccctgcttggcgtcgaccaatgtcacgagacacgcatctgcttcggtatagcgcacgatgcgttcgacaaacccttccgtgagctcctccatgccgcgctgctgcgagaagaaggatgtgatttcataaagctgcgccaaatgacgattcttttcctcgacagaagccgtcttttcggccactttctgctcaaggttgttgtagaggtcttcgagtcgatccgccatgcggttgaagccctgagcaatgcgcccgatttcgtcttcgcttcgaggcgtcacgcgcgccgtcagatctccgccggagagtcggttgatgccttcgccgagttcgttgatgggacgaatcacccagcgccagagcagaagcataatcgcaaagagactgccgatcgccaacacaatcaagagcatctgcagatagcgaagctgccacaaatacccgcttcgccactcttcaatgcggtgcgcaagattcgttgcttcatccagaaagccgctgagtgcatactcgtcgacgggctttccaagctctctcgcacgcacaaacatgggttcgatactgccgcgccagcgcccttcaaggagatcgagcttgtcggcaatatcaggctctcgcggcagcaggagcggcttccagctgtcgccgctgcgaacgtttttaaagccgtcgagcattgcctgaagttctttgtcgaaatcgagccgcgacgagcccgtctgcgaaaagtacgctgctctataagcatgaaggcgcagttcgcccactgcgtatttggccgatgcgcttgcctcaagctcccagttaacgagcatcgtccaggcaatcgacccggaaacaaagctcacccaaagaagcgtgagaacgagaagacgagccgaaaggcttttaaagtacttcaggatgaacatgaggcgctgcgccgagccctgcggctcggcgggaattgtagattggcacaaaccgcagattagagaagcgttggatcttcgtccaccacttcaagcgtcaaaccgtcatctgtcttaacactgtcggacggagctccgccagctgtgtccgacccatccgcggaatccgttgattcaaggggcagccccgcaatatgttcggccttccaagagagcgcaagcaccttgccgcggcgggcacgatggagcgttgcgccgcccaggatgcgcttagagatctgcgcctctcgcgctttgccgcctcggccggtgccggtaacgattgccccgcgttcatcaaccagcgcgacagatacaagcgattcacccgtctcaagcgtcatgaagctcatgcctttgccgccggaggccgtcacgcgcacttccttcaaggggaataccaagagtcgattggatgacgacaggcaggcaatgagctgctcgccctgcgccgctttgaggggcagttcaatcggcggcagaagcgactcgccttcgcctaacgttacgaaatcgcggccggcctttaagcgcgttgacacgtccgaagccttcagcaccatgcccttgccgccggaagtcacaatcaccgcagcggcattcggatccgccgaaatccagcctgccggctgagcgcctttaggcaaatcaacgaaggccgaaagcggcgaaccatcgccgcggccgcccggcagtgcggagacggcaagcgtatagacgcgccccgcctgatccaagaacgaaatctgactgctcgaacggcactcaatcgtcgcttcgagtccgtcacccgtcttaaagctcatgagcgagcagtcgtgaccatgacccgtacgggcgcgcaggaagcctttgcgggaaatgacgaccgttacaggttcatccgccgtctgcacttcgtgcgccgcttgttcggcctcttcaaccaccgtacggcgaggatcggcaaaactcttcgctgccgcttcaatttccttggccgtctggcgcttcagtgcaccgtcactgccgagaattttctcgagtccggcacgttctttggcgagctgcgcgagctctttctcaatggcaatggccgccaagcgagcaagctgcttcaagcgaatttcaagaatatcgtcggcctgacggtccgtgaggccaaactctttgatgagatcggccttcggatcatctgcattgcgaataatggcgatcacgcggtcaatattgaggagcacaagcgaccggccttccaacacgtgaatgcggtcgagcaccttctccaaacgcgcctctgaacgccggcgaacgaccgccagccgaaatgcgatccaatcctgcagaatttcgagcaggcctttttgccggggcttgccgtccagtcccagcatcacaaggttcaccggcacgttgctttcgaggtcggtttccgaaagcaggtagttcacgaactcatcgcgatcgaccttgctcgtcttcggttcaaacacgaggcgcacatcgacggacttgcccgactcgtcgcgcacattgtcgagcagcgaaagcattgcgctcttggcctgctgctgcttggccgaaagcgtctttttatccttcttgggacgcggatttgaaatctgctcaatgcggtccagaatcgaacgcgcagaagctgccggcggcagctcatcaatcacgagctgccactgaccgcgcgccagatcttcaaagtgccagcgagcacgaacacgaagcttgccgcgtcccgaacggtagatggcgcgtatttcatccttaggcgtaataatctgaccgccgcaagggaagtccggggccggcatcagctccagaatctcgtttaaatccgcgtcgggattctccaaaagccgcacgcaggccgcagcgacttcgcccagattgtgcggagggatctcggtcgccatgccaacggcaatgcccgacgaaccattcagcagcacaaacggcagcttggcaggcagctccaccggttcctgaaaattgccgtcgtaattgggctgaaaatccacagaccccagatccacttcttcgagcaagagctgcgaaatgggcgtgagacgggtttccgtataacgcatcgccgctgccgagtcaccgtcgcgggaaccgaaattaccttccgccacaaggagcggatagcgaagcgaaaaggtctgagccatgcgcaccagggcgtcatacaccgactggtcaccgtgcggatgatatttgccgagcacgtcacccacaatacgggcgcttttgacgcttctgccctcaaatttcagccccatccggtacatgtctatcaggatgcggcgctggacaggtttttgtccgtcggtcacttccggaagcgctcggctctttaccaccgacatggcgtattcgagataagcctgtgaagcatagcgggcaagcgtgagcgccccgtcttcttcggccggaccgactgtggctgcaccgacagccatctcttcagtagcggcttcctcgggtgattcctcaagagcatcgtctggcgatggagcagcatcatccgcatcgagctcatccgtttccggcggttcagagccgtttggctcctttgccgcctccggcgtttcgggggcctctgccgcatcgttgtccgcagccttttcctgaatcgcctgagccccttgagactgcttagacggatcgagttccggcacatcagcattcaagtcgccaaaaagggagtcgtgctcaaaatcgtctttcttcatgcttcatacagacgggttcgtcaatgccgcccccgtctttcacttctttcgtttaaccgctttttcgggtgcgtttttaaacatcgagctctgctcggtcaccataggcttccatccagaggcggcgccccgtcacctgacgttcccccatcaaggtttgcatgaccgtccgggtatccgcttcggaaatactgccgaaagccacggggaggagcttccgcgtatcgggagccagcgttgtctccgcgagctgctcagccttcatttcacccaaacctttgaagcgtgaaatggagagctgctcctcggtgaatccctcctttttgagagactccagcgtacgcgacaattcgcgctcgtccagacaatagatcttgcgatcaggtttgcggcctttcttcggcgcatcaacgcgaaagagcggcggcatggcgacatacacgtgccccaattcaataagcttcggaaagtgcttgaagaagagcgtcagaaggagcacttgaatgtgagagccgtccacgtccgcgtcggacaagatgcagatctttccataacgcagccccttcaaatccggttcaccgtcccggtgatgcggatccaccccgatggcgagcgcaatatcatgaatcgtgtcggagcggaagagttcgccgccctcgacttcccaagtattgaggatcttgccgcgcagcggcagcacagcctgaaattccttgtcgcgcccctgcttggcagagccgccggctgaatcaccttcaacgatgaagagttcgttgcgcgtaatgtcgcttgactcacagtcggtgagtttgcccggcaataccgccaccgtgcttgcgcggcggcgttcgtatttcgcagcctgacgctgacgcgcctgcgcctgcgaaatgatgtgttcaacgagctttttgccttcgtcggcgtggtcattgagccagaattcaaactgcggacgtacgaacccgcccacgagcttcactgcatcacggctcgtgagtttttccttcgtctgtccttgaaactggggatcgagcgactttgttgaaagtacaaaattaacgcgtgaaaagacgtcttcggcgaggattttcacgccctttggctgcagtccatgagcatccatgaaagcacggacagcttgaaagaggccgtccttcaatcccgcttcatgcgtgccgccctgcggcgttggaataaggttcacatagctttcgcgcgtgagcggtccttcagccgtccacaccaccacccaagaggcgccttcacccggcgaaaagctttcggaatcttcatcagcaaagcctgaagcttcaaacggttcaataagactttcgcccttgatttccgagagtagatattcctttaagcctcccgaatatttccaatgcgcttccgttccggtcattttgttgacatagtccacttcgcatcccggaaggagcaccgccttcgagcgcagaagacggaccaatgccggttctggaataaccggactgtcaaaatacttcggatcgggccagaccgttacgcgcgtgcctgtgcgcgacttcgggcgggagcttttcttgatttccaaaggttcagacacgaacccgtcgcgaaagcccatcgttgcttcttggccgtcgcgccagacagtcaccactaaatgcttggaaagcgcgttagttaccgaaacgcctacaccatgaaggccgcccgcaaacgtatagggaccgctgccatcggccttggcgaacttgccgccggcatggagccgcgtaaaaacaatctccagcaccggcgcgtgttcttcaggatgcatgccggtaggaatacctcggccatcatcctccaccgtcactgatccgtccgcggccacctcaacagagattcttttgccgtagcccgcgagcacttcgtcgcttgcgttgtcaatcacctcctgaatgatgtggaggggattgtcagtcagcgtgtacatacccgggcgctgcttgacaggttctaaccctttcagcacgcgaatagcctctacgccgtattcttcttttttcgccatcttcacaaacaaaatgcagccggagattcagaggaaggcgcttacactgcttccctccgatcgaaccagtactgaataaaaggagagtcgaggttgatcgagtttcaccggtcagcctgccgcagtgcttccacttcagcagcaagcagactcaaagagcctgctgctcaggaagcagcgaggagaaccatgcattgtttgatcctcttcgagactcacaaatatatattctagcaattgaagtcaccgggctaaatcctgactagcacgctgtcagcgctggcacccgacaaagcgatttctttgcaacatcccacattcaaaagaccaagcgctaactgaaggtgtacgccaagatatccaaatgcgctgtcagcactagagtgatgatgatgcagagcttgttggtttatctaaccagtaaagcccgtaaaagatgatggtgcctgatactgccggatacagaccgccatgcccgcaatgtgagtatcaaaagttctgttcagatcaagttcacaaagtaaacaatcgcttcacataataattaaataaaaaccttcgtttctttgatctgactaaaaacgggattttatcaaaacaaacagatatatactgctaaatagtggctgaattaaaacagaaatcataacgccacgagctattgcttggaaacggatcctcaacgaacacacaagtacatattcttgcaattgccgccaatcgtccaaactgtcaagagtttcgtgaaaatgggcatagaccccgcttcgtatgagatccggtcaccaaaatgctgaaacgcttattgacgggacaggcgggaggaagaatgtttcggattgacgacagcactagcgctgtgttgcataaaaattaaaaatgcctctagcctacttgcagaatgatttcggagatttgtgaagtctaatctggggaaaacaccattcaattatcatgacacaatctccgtatcacgaccttgttcaatcagtatgtttgctgtcaaactgactgtttgtaagattaatttaactctgtaattccatctgccttaggagttcctcatgacgcaatcggaacgacgcttttcgtgttccatcggcattgatatgggtgccaaatataccggtgtgttttatgcactgtttgaccgcgaagaactccccaccaatttgaactctaaagcgatgaccttggttatgccggaaacggggcctcgctacgttcaggctcaacgtacagcagtccgccaccgtttgcgcggccagaagcgttataccctggctcgcaaacttgcttttctcgttgttgacgacatgataaaaaaacaagagaaacgcttaactgacgaggaatggaaacgcggtagagaagctttaagcggcctgcttaagcgtcgaggttattccagacccaatgccgatggggaagatttgacgccgcttgagaacgtacgtgcggatgtatttgccgcgcatcctgccttcagtacatatttcagtgaagtgcgttctctagctgagcaatgggaggaatttactgccaatattagtaatgttgaaaagtttcttggcgatccgaatataccggccgacaaggaatttatagaatttgccgttgccgaaggactcatcgataaaacagagaaaaaagcataccagagtgccctctcaaccctgcgagccaatgcgaatgtattgactggcttgcgtcaaatgggccataaaccccgcagtgaatacttcaaggccattgaagcagatctcaaaaaagattcgagattagcgaagatcaacgaagcttttggtggcgcagaacgcctcgctcgacttcttggcaacctctcgaatctgcagctgcgagcagaacggtggtacttcaatgcacccgatatcatgaaagatcgcggctgggaaccggaccgctttaaaaaaacactcgtacgtgccttcaaatttttccatcccgcaaaagatcagaataagcagcaccttgagttaatcaagcaaatagagaattccgaagacatcattgaaacgctctgcacgctagatccaaaccgcacgatcccgccttacgaagatcaaaataaccggcgcccaccgctagatcagacacttctgctgagtcccgagaaattgacgcggcagtatggcgaaatctggaaaacgtggtcagcccgtttaacgagcgccgagccgacacttgctccggcagcagaaatcttggaacgctcaacggatcgaaaatcgcgtgtagctgtgaacggtcatgaacctctgccgacattggcgtaccaactttcctatgcactgcagcgcgcctttgatcgcagtaaggcgcttgatccctatgcacttcgtgctttagcagcaggcagcaagagcaataagctcacaagcgctcgaacggctttagaaaactgtattggcggacaaaatgtgaagacattcctcgactgtgctcggcgctactaccgagaagcagatgacgccaaagttgggctgtggtttgataatgcagatggtcttcttgagcggtcagatctccatccgccaatgaaaaagaaaattttaccgttgcttgttgccaatattctgcagacggatgaaactactggacagaaatttcttgacgaaatctggcgtaaacaaataaagggccgtgaaacagtggcttctcgctgtgcgcgcatcgaaacggttcgcaaaagttttggcggaggtttcaatattgcctataacacagcacagtacagagaagtcaataaattacccagaaatgcgcaggacaaagaacttctgacaattcgcgatcgagttgctgaaactgcagattttattgcagcaaacctggggttgagtgatgaacaaaagcgtaagtttgccaaccccttctctcttgctcagttctatacgctcattgaaactgaagtgagcggtttctccgccacgacacttgctgttcaccttgaaaatgcctggcgcatgacaataaaggacgctgtaatcaatggagaaacagtacgcgctgcgcagtgttctcggttgccagcagaaactgctagaccattcgacggactggtacgtcgtctcgttgaccgtcaggcctgggaaatcgctaagcgcgtgtcaaccgacattcagagcaaggtggacttcagcaatggcattgttgacgtgtccatttttgttgaagagaacaaatttgagttctcggcatcagttgcagacctcaaaaagaacaagcgtgtcaacggcacgcagatttggatgatcaagaaccttgccaataaaatcagggaagaactccagaactggtgcaaaacaacaaataaccgactgcattttcaagctgccgcaacgaatgtttcggacgctaaaaacttgagactcaaattagcgcaaaatcagccggattttgaaaaaccagacattcagcctatcgcttctcattccattgatgcactatgttcgtttgccgtcggttctgcagatgccgagcgagatcagaatggttttgactatcttgatggcaaaactgtattgggactctatccgcagtcctgcgaagtgattcacttgcaggcaaaaccacaggaagagaaatctcactttgacagcgtcgccatttttaaagaaggcatctatgctgaacagtttctgccgatttttacgctcaacgagaaaatatggattggctatgaaacactcaatgccaagggtgaacgttgtggtgccattgaagtttccggcaagcagcccaaggaattactcgagatgcttgccccattcttcaacaaaccagttggagatttatcagcgcatgccacttatcgaatcctgaaaaaaccggcctacgaattccttgccaaggctgctctgcagccgctgtcggcagaggaaaaacgcctagccgcgcttcttgatgctcttcgttactgcacttcacgtaagagcctcatgagcctctttatggctgcgaatgggaaatcgctcaaaaaacgagaagatgtgctcaagcccaaacttttccaacttaaggttgaactcaagggagaaaaatcattcaaacttaatggttcattgacgttgcccgtgaagcaagattggctccgtatatgtgattctcctgaattggccgatgccttcggtaaaccttgtagtgcggatgaattgacctccaaacttgcacgaatttggaagcgccctgtgatgcgggatctcgcccacgcacctgtacgacgagaattcagcttgcccgccattgacaatccctccggaggcttccgtattcgccgcacaaacctgttcggcaatgagctttatcaagttcatgcaatcaatgcaaaaaaatatcgcggttttgcatctgcaggcagcaatgttgattggtcaaaggggatcctttttaacgagcttcagcacgaaaatttaacagaatgcggcggacgatttattacttcagccgacgtaacaccgatgtctgagtggagaaaagttgtggccgaagataacctcagcatatggatcgcaccaggcaccgaaggacgacgctatgtgcgtgttgaaacaacgtttatacaagccagccactggtttgaacaaagcgttgaaaattgggctatcacatctccgttgtcattgccagcctcttttaaagtcgacaaaccagctgaattccaaaaggctgttggaacagagctttctgaattacttggtcagccgcgttcggagatcttcattgaaaacgtcggcaatgctaagcacattcgattctggtacatcgttgtgtccagcaataagaagatgaacgaaagctacaacaacgtatctaaatcatgaggtatttaaccgtttcttcttttggtacggcactcggactttcgggagaacgacttgttgttcatgaagcggatggacgcacgtgggagactgctctttcaagactgcgcaccatccgcattgagaaaaaaggtatcagtgtctccacgaatctgatgctcgcctgtgcagcgaggggcattcgattgttcctcgttgattggcgtggcgtgggggtcgttgccttaagtggtcttcatcaacatgccgtcgtcagcatacgcgaagcacagtttctggcgattcactcctctcaaggccgcaccatcgctgctgagatgatcatcgccaagatccgcaatcagcgcactgtacttttatatttttggaagtacctcaataagagtgctccggagaaggcggaaaaactgagagaagctgccgacaccatagctaaaattgtgacgaaaacaaaagcagaaattgaaaatcttcaaacttggaatgaagggatatggtcgaccattctgatgggttatgaaggtgctgctgcaacgctttattggcaagcacttcgcacagcagaattagtgccagaaaccttccttactcgagaaggtcgaggctccgtcgaaatcgtcaatgctgcgctcaactacggctacgcgattctgcagagctacatctggtccgcgcttgataatgctggatttgaactttatgcagggttccttcaccgtcgacgtcctgggaaaccttctttagtactcgatgtcatggaagagtatcgagcatgggttgttgatcgaaacatcatcaaacttcggtcaatgcttaaaaattcaaagcgtggccttacacaggaaatcaaaagtgccattgtcaatgctatcgatgagacgatggcaaatgctgtgagttggcaaggcaaaagcgttcgccttgaaaatgctttgcagcgacaggcgtatcgccttgccggtacagttgttgacggtaaacgttacaaaagcattcgctttagatggtaggaaacgctcgtcatgtcaatctacgcaaagtatctggtctgttatgacgtttcgagcaactcccgcagaaaaaagttctccgacgctctaaaggatctaggcctagtctcaatgcaaggttccgtattctacggcgacctcaagccagctgaagtgcgagctttagcaagaaaagctgcagaacttctagatccgaaggaagataaatgtttctggtttccctgtcgcttagaagtcaaaaacattcaaaaatgcatcggctacgacgattggtcctttgctgaagtggatggccatggaacaatttaacctccccgtatcaatgctgcgtcaacactgcttttgtcctcgcattcctttctttcaactcatgcgcggcattcaacctgttggaccgatgtggctgcagcaaggactgaatcatcatgttcgagaagagatgctcgcaaaacgtcgaaaactgtctcgatttggtatttctccacagagttttcgatttttagaagatatcaagttatacaacgatagcttgggacttcacggcatctgtgacggcgctattttcactgcgaaagaagtgatccctcttgaatttaagttatcagaagtcagtccaccaatgggcgccagactacagttagctgcttacgcaatgctgcttgaatatcaggaaaagagaaaaatatcgaggcgttttgtgctttatggccagaaaggtcatactctggaggtcatagtagacatcaaattacgagctgaagtgcatacagtggcaaatttaataagagaagcctgtaaaaaggctatcgtgcctcatacggcggctacggaatcgcaatgcgcgcaatgtgagtatcaaaatttctgtgcagatcgattttaagaagtaaatactcacttctaaatgagtaaatgaaaacctcatcctttggtctaatcaaagaatgaggttttatatcagaatatccggatatctactaatagatagtggccggattcaatcttagctttaggggatttcagctcacccgaaggtgatttcctatagctcatagcgttatgatctctaatcggtatcctacgatgtattttcgaaaattacaaggtttttttatcaatcagagtattttcgaagaatggtactctgcagatagctacaaaaaccttataaatcacggtgtaggttagggggcgaagatcataacgctacgagctatagcactgaaactgctcaacgcttgagaaagtcgtttgaaccgtcccgcgaagatcataacgctacgagctatagcactgaaacagaaagaggaaaaatttcaccggcagagcgagaccacgcgaagatcataacgctacgagctatagcactgaaacgatgcgctcgttctctgggtgtcagccaatactcgcgaagatcataacgctacgagctatagcactgaaacggatcatctggattatttgtatagcctccttcaacatagcgaagatcataacgctacgagctatagcactgaaacggcaccagtcttaccgacgaagatgagcgactttccggcgaagatcataacgctacgagctatagcactgaaacaccattcatttaatggcctcgaagctacctgcttcgcgaagatcataacgctacgagctatagcactgaaacgttgtgtgtgcgtgtgtttgtttaggcagcttcttggcagcgaagatcataacgctacgagctatagcactgaaactgtctctacgggtggaaagacggagcttcacatgcgaagatcataacgctacgagctatagcactgaaacatgaaaatcggttccttgagataggagagatcctcagtatagagatcataacgctgcaagctaaagcgctgaaactacgcagtctgcggatctgaaattgcttgatgaaagcagagatcataacgagctataacgctgaaaacatcactattcaagacattgcagcaatctcaccttaaaagcatgagagcgctctagtgttatagacacactccattgaaaaagccgcttagcaacgtctacgccaaaccccctacaatagatgcctcatgttgatattggaggctccgtcatgggcaagctctatatgggttttgatgccggcacgcaaagcgtgaaggttgctgtttacgatgaacaatttcgtctggtcacgagccgatcactgcccacatcactcacctatccgcagccggggtgggtggaaatggatgtcaacacttatcttgacaactgcgtggtttgtatggctgaaaccacgagtgaactgcgccgtttggggttcgatcccaaagacgtcagtgccattatgggtgacggcatcatctgcggcattgtcgggatcgatgagaacgcggatccggtaacgccttacattaactacctcgacagccgcaccatggctgacgttgaaacgatcaacgccaaaaagctggatatctggagccgtgagaccggcaatccagaggcctcccccatgtttcccgcgatgttcgcccgctggttcatcgccaactccgaagcctttcgcacgaagggtgtgaaattcgtccataacgccccctacattctgatgagactggccggccttaaaggcaaagatgcctttattgactggggcgccatgtcaggctgggggctgggctacgacgtgcaaaagaaatgctggtccgaagagcagctccatattctcgggattgatcctcagtacatgccgaccatccgcaaaccctgggacattgtcggcggactctgtgaagcgatgtccgtgcgcacgggcctgccggccggcatccctattcttgcgggtgcgggcgacacgatgcagtccatgctgggttccggggtatttgaagccaatcagggcgtcgatgttgcaggaacatgtgcgatgttctgcgtctccacctccggcatcgtgcccgaactttccaaacccggcatgggtctcatctttaattcaggcacgctgcccgactcatacttctattggggattcgtgcgtacgggcggcttgtcgcttcgctggttcaaagaccatgtggctcgtcacgagggtgacggcagctactacggcactctctccgaaggagctgccaaagttcctgccggcgctggcggcgtacagttcctcccttaccttacgggcggatacggcgaagagaaagaggcaagcgggtgcttcctcaacatgacgatggatgacaaccagttcgtcatgtggcgtgcagtccttgaggctatcggctacgactatatgggacttgccgacagctatcgagctgctggcgtgccgctcaaacgcatcaccgtcacagagggcggcagccgcgacggtctctggaatcaaatcaagtccaatatgctcggcgcagaggttgtgcgttttgagaatcctggcggagccgttcttaccaactgcgtattcggcgcttatgctgcaggtgaccttgaaggcgtcgacgacgtcaaggctgcgctcgggagcgtcattaagcgcagcggcgtttataagcctgaagcggccctcactcgccgctaccgcgaactctttgaaaaccgtcaaaagctcgttcgcgaagatctgaaggcagccttcagccgcctcgtgaaaatgcgcgccattcactaaaaatcaggttttaggccaatacaaaagccgctcggagtttggaattttgcttccaactgccgagcggctttcttttgacgggttcacgtcggcgcagagggcattgcagctgctgccgactgtgaacccgcagcgctgattattcctcagtctgctttgcttcacccttcacaaaatcggggcgctgcacgacaacaccgagcgaatgttcgagtgcatcgaggtagccgcggcgatcggattctccatagacggaggaaagttcacgggtgatgccggcgaggtcctcgggcttagcttcatgcttcttggcttccttcacgtaaatgacaacgtaggagccgtcagcgagcacagcattggtgtagatcggaagcttggccgtcgggaccgcaagggccgcattcaccacagtcacttcctggttctgcggcgcgcggcgcgaaatccacatctcgtcgccgaagccgtcaacactcttagcctgctgcaccgaagcgagcttggcctgaccggcttcaatcgccatggcgccggccttttgacgcttgagcgcatcggtgatgagccccttcacttcgtcgagcgggcgttcggcttccgggaagtattccacgacacgagcagaaaccaaacgatttcccgaaacctcaatcgcgctcgtattgcgcttttccttcaaagcttcggtgccgaacagcgattcagccacatgctcggtaatgatctgactgagttccggatccgtcacgccgttgcgggtgacgaaatcggccgtctcaaccttaagaccgaacttcgctgcagccggttcgagcgtatcggactgttcataaaccaggttcgtgaattcatcggcgtgagtggagaactcgcgaatcgcctgctgctgcgcatactcgcgctcgatctcgctcttgacgtcttcgaaaggttcaactgcagccggatgaatgtcggtcacgtagatcacatgccagccgaattccgtttcaatcgggccgacaatatcgcccttcttggcgttaaacaccgcatcttcaaaagccttcgtcatgacgccgcggccgaagaaggacagatcgccgccctgttctgcgctgcccgtgtcaacggaattggccttggcgagttcagcaaacttagaaggatcagccttcacttcattggcaagttcttcagccttcttgcgggcagcttccttgtcatcgccgaactcaatcagaatatgacttgcgcggcgctcttcaggaacggtccagcgctgcttattttgttcgtaaaaggtcttgaggtcgtccagactggccttctgattgctgaaagcgtcaggcgaaaagacaacgtactgcgccttgatgtgctcgggcgaaaggaaatccttcaggtgagcgttgtagtaggctttgatctcttcgtccgtaacggcaaccttgtcaaggtagtcatccgcaggcagaaccagcgtgcgaacgctgcgctcttcggtgaggatctcgtagaactgctccgtaagcgccttggggaccggataggtcgcactcacgccggaaaccaccgcttccttagcgagatcgttgcgaatctccatcacgaactgctggtcgctcttgccctgagaacgcaggaactgttcatagcgctcggcagagaacttgccgtcaaccttaagcgcatcagcgttcttaatgagcgccacagcctgtgcttcactgacggaaatgtggttcttggccaccacctgattgatcgcggcctcatccatcagcatgcgaagcaggtcttcacgggcctgaggcgtgtcgagcaggctggcgtgaaagctctcacccatctcctgacgcaggcgttcaagctgctggcgcttggccaaatcaaaattttcaggcgtaatcgacacctcgcccactttgacgatcgagttgtcactctgagtcatgcggttgtacgaataaatgccggtaaccacaaagctcggaataatgaacaccattgcgatgaccatcagccaacgcttgtgttcgcggaatgcctgcagcataagggatccttgtctaagggccgtttctgcgcatcattgaagaaagcgaagaaacggcgagcatgccagttggaaatgttcttttgccgggacgcagataacaaaaaaggcgaaacctcacggctcgcctttttcaagaaatctttggcggagtggacgggactcgaacccgcgaccctcggcgtgacaggccgatattctaaccaactgaactaccactccgcatcagagatgctgctgtttttcagcctagaaggtgcattatacggagcgaaggagaatttgcaagccttgcggcttcatcatctcttgcgtcccgggatgcatctcccagtggactccttaaacccggaatccagggcaataaaaaagccgttaccggcttttctatcagtgctctcttgaagtgttggcggagtggacgggactcgaacccgcgaccctcggcgtgacaggccgatattctaaccaactgaactaccactccgttttctctcggagagcgccttctccgtttcggagaagaattgggattttacagacttcacgaaacctgtcaagaggaatgtcgaaaaaccacctcaaattcacgtctacatgacgcatacacgtgatcaaagcggctcagcatcactgaggcagaccgctcagcagcctgcgcataacgaaaaatcccggaccgccaactgcgattcgggattcctgcttaaagtccgaaagatgagtgatggtggatcctgagggactcgaacccccgacccacgccgtgtaaaggcgttgctctaccaactgagctaaggatccatcggactttgaaacttcgagcgtcaaactcgaaggagaacggattgtagcaagcggcggcgaattttgctcgccgccgcccattcttttcacactgctgtcttagcaggtcagcatcaaattacgcggaaggctgagcagccggcgtattcggcgctgacgacatcttcggcggcataagcgttgcctcggcatcatccgtgagaggagtcggctgccgcacgagcgcacgagcaagcacttcctcaatgtgcttcaccggcacaatctcgagccccttcagagcgtcttccttgatctcggtgagatccttcatgttctcttgcgggatcaagacggttttcacaccgcctcgctgagccgcgagcagtttttctttcagaccgccgatcggaagcacctcaccgcgaagggtgatttcacccgtcatcgccaagtcgcttctgaccggaatgccggtaagcgcagaggtcatcgccgtaacgatagccgcacccgcactcggaccatccttcggaatagcgccttcggggaagtggatgtgccagtcggtattggcaaagatgtcggacttgagacccagctgtttggcacgcgcacgcaccacactgcgggccgcttccacactttccttcatcacgtcgcccagcatgccggtacgaagcacctgtcccttgcccgggaaagccacggcttcaatcatcagaatgtcgccgcccacttcggaccacgaaagaccgttgacaatgccgacctgcggttcacgctgagccgacgtaatgctgaaacgccgcacaccgaggtacttctcaagcgtttcggccgtgacgcggatcggaagctccgtgggacgcttgtccttcggcgcctcgagctccgtcagaacgatcttgcgcagaatcttgcccacagcacgttcgagcgagcgtacgcccgcttcacgcgtgtagtagcggatgatgtcgcgcaccgcgctttcttccaccaccacttcgttttccttcacgccgttgacgcgcatctgcttaggaatgaggtggcgcatcgtgatgtgcaccttttcgtcttcggtatagcccgaaagcgaaatcacctccatacggtcaagcagtgccggcggaatgtcatagctgttggaggtcgccacgaagagcacgtccgacaagtcgaacggcgtctcaacgtagtggtcttcaaaggcgttgttctgctcaggatcaagcacttcaagcagcgctgcagccggatcaccgcggtgattggcgccgatcttgtcgatctcgtccaagaggaaaagcggattcttaaccttagccttgatcatgtgcttaatgacctgccccggcatcgcgcccacgtaggtacggcgatgaccgcggatttccgcttcatcggaaacgccgcccaaggccatgcgtacgtattcgcggttcgtcgcccgagcgatcgagcgcccaagcgaagttttgccgacgcccggaccgcctacgaggcagagaatcggcgacttcaccttgcccacgcgcttttgcacggcgagatattcaagaatgcgctccttcaccttttcgagtccccaatgatcctcatcgaggacacggcgagcccgttcgatgtcgcggttgacgcggctcttcttcttccagggcagttcgagaagcgtctcgacgtagctgcgcacgacgctcgcttctgaggacgacggcggcatcgttttcaggcgcttgatttccgtaagcgcagcttcttcggcttccttaggcatctgcgcatcgcgcacctgacgctccagtttggcctcttcctcttcggcttctgcagtttccgggtccagaccgagttctttcttgatggccttcatctgctcattcaagtagtactcgcgctggttcttctccatctgccccttaacacgcatctggatgcgtttttcaacctgaccgctttcgagttcacggtcgagcacaccgatgagaatttcatagcggcgcaccggattggaagcacgcagaaagtcaagacgttcagcagtggtcagcggaatgaaagacgcagccacatcacaggcgcgcaccggatctgtttcctccgttacgggacggaggtgttcgggcgtgagcttcttgacgttttgcgcatagtcgagaagctgacgattgagtgtgcgctgataggccgcaagatcttccgacacatcttctgtcggcagttcttccgcggtggctttgtagaacccagatgcatcggtccagctcgtcacgcggcagcgctgcgttccgtgtacaagcgccttcactgaaccatcgggaagacgcagcagctgatccacttcgccgagtacaccgacatcccagaaatcttcgggctttggcgaatcaatgctcttttcacgctgggtgagcagaatgacgcgcccggaatggacacgcatagcagcctcggcggcgagcaccgagatctgacggcccatgaagaccgtcg

SEQ ID NO: 178 - DNA, 23672 bp, synthetic construct
  misc_feature 1..23672: note = Synthetic
  source 1..23672: mol_type = other DNA
cgggtcaactgcgttaagcgcaccttcgctcacattggtcgagccacccacaaaacccagtttttcaaggacgagaacgtgcttggcaccggcctgataagccgagatagctgccgcaagaccggctccgccgccgcccacgacgaccacatcagcctgatacttggcttcaacggccggatgctgctcaacatgcttcgtgagcgccgtcatatcgccgcccgcctgcttcaggcagtccttgacgccctgcatcagcgcaaagctcgaaatcgtagcgcctgtcacggcatccacgcccaccgactgatgatcgagaattttcttgctcacaatgtcgagcgcaactcggccgacgccgatcgtctcaagattcttggagtagtcgatcttttcgatgcggttcttcccgacggtcacctgcacggtgagcggcgcattgtggccgttgacctgtgcagtataagtgccgggtttgaaggtgctcggcgcggtctgagccgcttcgctcgctgacgccattccggaaacacccatcaatgccgcggcagcggcaaacgccactgcttttaattgcatgcttttacgcattatttctcccttctctgtgatccatcgacggcacaggaggcgccgttcttttcatccgcagaccacagaagcgtgagcatcggcgctgccgatactcaacttttgcgaggctaagcagaacccttcgttctcaacagagggattaacgcttagggtgaaattcgtactacttgaaaacaaaaatgcttacaagcatcgtatacatatcacgacaatattgttcgcgtcagcgcagctgacagcgcttgagttcagcgggcggcgtctgaaaaaacggatgcgaacgggaggaaagcagacaaggattctgaagctcctggggctttaagcgaacggcccaaagaaatgctccgagcgttttagttttctttgcgttttggcggaggttactcagcttcagtaccgcgacgcgatcagtctgaggatccacggccgcaaaccgcccttctccgagccaaatgccggcggactgcggttcatcgtgctcaccaaagaacaccaggtctccagctttaagctccgcgccgtttcgcccgcccgagagcggtgcgcccaaacgtgccaggcgatcgatgtcgcctggagccaagaggtcatgcatgcgaagcaccacgacgggaagcggcgcgcctaagacttcggctttgctgccgaccaatccttcggctgaaaccgcaagcgccttgagataggccgaaggactgctgcggcgaagctcctcttcgcgctgctgccacgcagagacatcctccagcgccgtgcctgacgccttggccttgcggccgtcgggcaaaagcacctcccaataatcgggctgatgttcgagctgatagagctgaatgcccgctccggcaaagacaagagcatcaccgttttccggacgaagctctgtgttgggccggcgcataactgcggcattctgacgattccaagacacaaatgccatgtcattcttgagcgccagccaactttctgaaatccatccgagccggccgtccaggcactgtaccagcgcccagcccggggcctctgaagcggtcgccgaagtccgcttcaggattctcacccgctctcccaaaacaactgtgcgcaccgtccgctctgtacggcctgccgttttcggatcaagatccatgagttcggcgctgccaactttcacaatgccccaagtcatcaaatccaaagacttcggttcgggcacttgatccactgcagactcaaacgacaatccttggcgagcggcggccgcaaagaacttagcgagcagcgcgggttctgctgatatccccgtaacagcagccgctccgggaagccgggaaaccgcaggaccaaattgaagcgccaaaagatccactcgatagtcgagcgcttcggcgtccgcaaaattcttccaaagctgggcagcgcgctcttcggaaggagcctcacccggcgccggtacgttggccgcgtagtccgccgaaacggaaggctgagcagccgcgcaggctgattcactccccaaaacggcaagtgccagcgtcagcaaaagcccgcccaaaataaagcgggagtccgcgctcgatcggtttgaagcaaaagccatattcgttctccagcgccttgagtcttccgtcattttcggataaagattttggaaaatcagcctttgatcagctgatttcgcgggcagcagccggcagcagcagcgtcacgcgcgtgccgccgatcgggcttgcccgctctacctttacttccgcaccgatgcgggctgcacgctcggccatgattgagaggccgacatgctgtcccttgcgagcctccaccacatcgttgtcgatgccaacgccgtcgtcaacgatgctcaccttaaggtcgtcgttattttggatcgtcacggtgacactggtggcctgagcatgtttacgcacattggagagcgcttcctgaatgatgaagatcacctgaagcttctggcgaggcgtgagcttggggccgtcgcccgttgcccgcagacgcgctgaaacatgagactgcccctcaaaacggtcaatcacagtctgcacgccctgaaggaagccttcgctgtgcacgcgctcacggaaattaaggagcagctcccgcacatcctgatagcactcctgcacccccgtctgaatggccgaaagcgactcatcgcgaagcgcatcatctttatttttgatggcttccgagaggaactgcacctgcagattgaggtacgagagcgcctgcgcaatcgaatcatgcagtccctgggccagaagctgacgctcctgaacgaccgcaaactgccgctcacgctcaatcaggcgctgattgtcaatggccacgcccaaatgcgtcgagaagctctcgagaagctgaatcatctgcgaggaaagttccggcgcatcccggaaaagcagcatgtagacgccgatagactccgaaacacttcggaccttaaagcaataggccgttgagaaccccgcacgagcaagcacgacggcgagcggccgctgatcattttcaagccgcacgcgcaccggataatttttttgcagcaccgtacggctgatggaatcctcaaaagccatttctgcggcttcatgaatatcgctcggcctcagcccgctcgccgcagcaatattaacggccccctgcttggcgtcgaccaatgccacgaggcatgcatctgcttcggtatagcgcacgatgcgttcaacaaccccttccgtcagctcctccatgccgcgctgctgcgagaagaaggatgtgatttcgtaaagctgagccaaatgacgattcttttcctcgaccgaggccgtcttttcagcgactttctgctcaaggttgttgtagaggtcttccagtcgatccgccatgcggttgaagccctgagcaatgcgcccaatttcgtcttcgcttcgaggcgtcacgcgtgccgtcagatctccgccggagagtcggttgatgccttcgccgagttcgttgatgggacgaatcacccagcgccagaggagaagcataatcgcaaagagactgccgatcgccagcacaatcaggagcatctgcagatagcgaagctgccacaaatacccgcttcgccactcttcaatgcggtgcgcaagattcgttgcttcatccagaaaaccgctgagcgcatactcgtcaacaggcttcccaagttctctcgtacgcacaaacatgggttcgatactgccgcgccagcgcccttcaagaaggtcgagcttatcggcaatatcgggctctcgcggcagcaggagcggcttccagctgtcgccgctgcgaacgttcttaaagccgtcgagcattgcctgaagttctttgtcgaaatcgagccgcgacgaacccgtctgcgaaaagtacactgctctataagcatgaaggcgcagttcgcccactgcgtatttggccgatgcgcttgcctcaagctcccagttaacgagcatcgtccaggcaatcaacccggaaacaaagctcacccaaagaagcgtgagaacgagaagacgagccgaaaggcttttaaagtacttcaggatgaacatgaggcgctgcgccgagccctgcggctcggcgggaattgaagattggcacaaaccgcagattagagaagcgttggatcttcgtccaccacttcaagcgtcaaaccgtcgtctgtcttaacgctgtcggacggagctccgccagctgtgtccgacccatccgcggaatccgttgattcaaggggcagcctcacaatatgttcggccttccaagagagcgcaagcaccttgccgcggcgggcacgatggagcgttgcgccgcccaggatgcgcttggaaatctgcgcctctcgcgctttaccgcctcggccggtgccagtaacgattgccccgcggtcatcaaccagcgcgacagatacaagcgattcgcctgtttcaagcgtcatgaagctcatgcctttgccgccggaggccgtcacgcgcacttccttcaaggggaataccaagagtcgattggacgacgacaagcaggcaatgagctgctcgccctgcgccgctttaaggggcagttcaatcggcggcagaagcgactcgccttcgcctaacgttacgaaatcgcggccggcctttaaacgcgtcgatacgtccgaagccttcagcaccatgcccttgccgccggaagtcacaatcaccgcagcggcattcggatccgccgaaatccagcctgccggctgagcgcctttaggcaaatcaacgaaggccgaaagcggcgaaccatcgccgcggccgcccggcagtgcggagacggcaagcgtatagacgcggcccgcctgatccaagaatgaaatctgactgctcgaacggcactcaatcgtcgcttcgagtccgtcacccgtcttaaagctcatgagcgagcagtcgtgaccatggcccgtacgggcgcgcaggaagcccttgcgggaaatgacgaccgttacgggttcatccgccgtctgcacttcgtgcgcagcctgttcggcctcttcaaccaccgtacggcgaggatcggcaaaactcttggctgccgcttcgatttccttggccgtctggcgcttcagtgcgccgtcgctgccgagaattttctcgagtccggcacgttctttggcgagctgcgcgagctctttctcaatggcaatggccgccaaacgggcaagctgcttcaagcgaatttcaagaatatcgtcggcctgacggtccgtgagcccaaactctttgatgagatcggccttcggatcatctgcattgcgaataatggcgatcacgcggtcaatattgaggagcacaagcgaccggccttccaacacgtgaatgcggtcgagcaccttctccaaacgcgcctctgaacgccggcgaacaaccgccagacgaaatgcgatccaatcctgcagaatttcgagcaggcctttttgccggggcttgccgtccagtcccagcatcacaaggttcaccggcacgttgctttcgaggtcggtttccgcaagcaggtaattcacgaactcatcgcgatcgaccttgctcgtcttcggttcaaacacgaggcgcacgtcgacggacttgcccgactcgtcgcgcacattgtcgagcagcgaaagcatcgcgctcttggcctgctgttgcttggccgaaagcgtctttttatccttcttgggacgcggattcgaaatctgctcaatgcggtccagaatcgaacgcgcagaagcggccggcggcagctcatcaatcacgagctgccactgaccgcgcgccagatcttcaaagtgccagcgagcacgaacacggagcttgccgcgtcccgaacggtagatggcgcggatttcatccttaggcgtaataatctgaccgccgcaagggaagtccggggccggcatcagctccagaatctcgtttaaatccgcgtcgggattctccaaaagccgcacgcaggccgcagcgacttcgcccagattgtgcggagggatctcggttgccatgccaacagcaatgcccgacgaaccgttcagcagcacaaacggcagcttggcaggcagctccaccggttcctgaaaattgccgtcgtaattgggctgaaaatccacagaccccagatccacttcttcgagcaagagctgcgaaatgggcgtgagacgggtttccgtataacgcatcgccgctgccgagtcaccgtcgcgggaaccgaaattgccttcggccacaaggagcggatagcgaagcgaaaaggtctgagccatgcgcaccagggcgtcatacaccgactggtcaccgtgcggatgatatttgccgagcacgtcacccacaatacgggcgcttttgacgcttctgccctcaaatttcagccccatccggtacatgtctatcaggatgcggcgctggactggtttttgcccgtcggtcacttccggaagcgctcgactcttcaccactgacatggcgtattcaagataagcctgtgaagcatagcgggcaagcgtgagcgccccgtcctcttcggccggaccgactgtagctgcaccgacagccatctcttcagtagcggcttcctcgggtgattcctcaagagcatcgtctggcgatggagcagcatcatcagcatcgagctcctccgtttccggcggttcagagccgtttggctcctttgccgcctccggcgtttcgggagcctctgtcgcatcgtcgtccgcagccttttcttgaatcgcctgagccccttgagactgcttagacggatccagttccggcacatcagcattcaagtcgccaaaaagggagtcgtgctcaaaatcgtctttcttcatgcttcatacagacgggttcgtcaatgccgccccagtctttcacttctttcgtttaaccgctttttcgggaccgtttttaaacatcgagctctgctcggtcaccataggcttccatccagaggcggcgccccgtcacctgacgttcccccatcaaggtttgcatgaccgttcgggtatccgcttcggaaatactgccgaaagcaacggggaggagcttccgcgtatcgggagccagcgttgtctccgcgagctgctcagctttcatttcacccaaacccttaaagcgtgaaatggagagctgctcctcggtgaatccctcctttttgagagactccagcgtgcgcgacagttcgcgctcgtccagacaatagatcttgcgatcgggtttgcggcctttcttcggcgcatcaacgcgaaagagcggcggcatggcgacatacacgtgacccaattcaataagcttcggaaagtgcttcaagaagagcgtcagaaggagcacttgaatgtgagagccgtccacgtccgcgtcggacaagatgcagatcttgccataacgcagccccttcaaatccggatcaccgtcccgatgatgcggatccaccccgatggcgagcgcaatgtcatgaatcgtgtcggaacgaaagagttcgccgccctcgacttcccaggtattgaggatcttgccgcgcagcggcagcactgcctgaaattccttgtcgcgcccctgcttggcagagccgccggctgaatccccttcaacgatgaagagttcgttgcgcgtaatgtcgcttgactcacagtcggtgagtttgcccggcaataccgccaccgtgcttgcgcgacggcgttcgtatttcgcagcctgacgctgacgcgcctgcgcctgcgaaatgatgtgctcaacgagctttttgccttcgtcggcatggtcattcagccagaattcaaactgcggacgtacgaacccgcccacgagcttcactgcatcacggctcgtgagtttttccttcgtctgtccttgaaactggggatcgagcgactttgttgaaagtacaaaattaacgcgtgaaaagacgtcttcggcgaggattttcacgccctttggctgcagcccatgggcatccatgaaagcacggacagcttgaaagaggccgtccttcaatcccgcttcatgcgtgccgccctgcggcgttggaatgaggttcacatagctttcgcgcgtgagcggtccttcagccgtccacaccaccacccaagaggcgccttcacccggcgaaaagctttcggaatcttcatcagcaaagcctgaagcttcaaacggttcaataagactatcgcccttgatttccgagagcagatattccttcaaacctcccgaatatttccaatgcgcttccgttccggtcattttgttgacgtagtcaacttcgcatcccggaaggagcaccgccttcgagcgcagaagacggatcaatgccggttcaggaataaccggactgtcaaaatacttcggatcaggccagaccgttacgcgcgtgcccgtgcgcgacttcggacgggagcttttctttatctccaaaggttcagacacgaacccgtcgcgaaagcccatcgttgcttcttggccgtcgcgccaaacagtcaccactaaatgcttggaaagcgcgttggttaccgaaacgcctacaccatgaaggccgcccgcaaacgtgtaggggccgcttccatcagctttggcaaacttgccgccggcatggagccgcgtaaaaacaatctccagcaccggcgcgtgctcttctggatgcatgccggtaggaatacctcggccatcatcctccaccgtcactgatccgtccgctgccacctcaacagagattcttttgccgtagcccgcgagcacttcgtcgcttgcgttgtcaatcacctcctgaatgatgtggaggggattgtcagtcagcgtgtacatgcccgggcgctgcttaacaggttctaaccctttcagcacgcgaatagcctctacgccgtattcttcttttttcgccatcttcacaaacaaaatgcagccggagattcagagggaggtgcttacgctgcttccgtccgatcgaaccagtactgaataaaaggagagtcgaggttgatcgagtttcaccggtcagcctgccgcagcgcttccacttcatcagcagcagactcaaagagcctgctgcgcaggaagcagcgaggagaaccatgcattgtttgatcctcttcgagactcacaaatatatattctagcaattgaagtcaccgggctaaatcctgactagcacgctgtcagcactggcaccccaaaaagcgatttctttgcggtttatcccaataaaaagcacctacgccagctcaaagagacgctaaggcacccaaccgcgctatcaacactgaattgatgagctacagagcttgttggattatctatcccgtgaagcgcgaaaaaaatgattgcgcctcatactgccatctaaagaacgcaatgcccgcaatgtgagtatcaaaagttcttctcagatcgagttcgcgaagtaaacaatcacttaaataaaaaacttcgtttcttcgatctgactaaaaacgggattttatcaaaacaaacaaatatctactgccaaatagtggctgaattaaaacagaaatcataacgccacgagctattgcttagaaacggatcctcaacgaacacacaagtacatattcttgcaattgccgccaatcatccaaactgtcaagggtttcgtgaaaatgggtataacacccacttcgtatgagatcgggacgccaaaatgctgaaacgcttattgacggggcaggcgggaggaagaatgtttcggattgacgacagcactagcgctgtgttgcataaaaattaaaaatgcctccagcctacttgcagaatgatttcggagatttgtgaagtctaatctggggaaaacactattcaatcatcatgacacaatctccgtatcacgaccttgttcgatcagtatgttttctgtcaaactgactgtttgtaagattaatttaactctgtaattccatctgctttaggagttcctcatgacgcaatcggaacgacgcttttcgtgttccatcggcattgatatgggtgccaaatatactggtgtattttatgcactgtttgaccgcgaagaactccccaccaatttgaactctaaagcgatgaccctggttatgccggacacggggcctcgctacgttcaagctcaacgtaccgcagtccgtcaccgtttgcgcggccagaagcgttataccctggctcgcaaacttgcttttctcgttgttgacgacatgatgaaaaaacaagagaaacgcttaactgacgaggaatggaaacgcggcagagaagctttaagcggcctgcttaagcgtcgaggttattccagacccaatgccgatggggaagatttgacgccgcttgaaaacgtacgtgcggatgtatttgccgcgcatcctgccttcagtacatatttcagtgaagtgcgttctctagctgagcaatgggaggaatttactgccaatattagtaatgttgaaaagtttcttggtgattcgaatataccggccgacaaggaatttgtagactttgcggttgccgaaggactcatcgataaaacagagaaaaaagcctaccagagtgccctttcaaccatgcgagccaatgcgaatgtattgactggattgcgtcaaatgggccataaaccccgcagtgaatacttcaaggccattgaagcagatctcaaaaaagattcgagattagcgaagatcagcgaagcttttggaggcgcagaccgcctcgctcgacttctcggcaacctctcaaatctgcagctgcgggcagaacggtggtacttcaatgcgcctgatatcatgaaagatcgcggctgggaaccggaccgctttaaaaaaacactcgtacgtgccttcaaatttttccatcccgcaaaagatcagaataagcagcaccttgagttaatcaagcaaatagagaattccgaagacatcattgaaacgctctgcacgctagatcctaaccgcacgatcccgccttacgaagatcaaaataaccgtcgcccaccgctagatcagacacttctgctgagtcccgagaaattgacgcggcagtatggcgaaatctggaaaacgtggtcagcccgtttaacgagcgacgagccgacacttgctccggcagcagaaatcttggaacgctcaacggatcgaaaatcgcgtgtggctgtgaacggtcatgaacctcagccgacattggcgtaccaactttcctatgcactgcagcgcgcctttgatcgcagtaaggcgcttgatccctatgcacttcgtgctttagcagcaggcagcaagagcaataagctcacaagcgctcgaacggctttagaaaactgcattggcagacaaaatgtggagacgttcctcgactgtgctcggcgctactaccgagaagcagatgacgctaaggtggggctttggtttgataatgcagatggtcttcttgaacggtcagatctccattcgccaatgaaaaagaaaattttaccgttgcttgttgccaatattctgcagacggatgaaactactggacagaaatttcttgatgaaatatggcgtaagcaaataaaaggccgtgaaacagtggcttctcgctgtgcgcgcatcgaaacggttcgcaagagtttgggcggaggtttcaatattgcctataacacagcacagtacagagaaatcaataaattacccagaaatgcgcaggacaaagaacttctgacaattcgcgatcgagttgctgaaactgcagattttattgcagcaaacctggggttgagtgatgaacaaaagcgtaagtttgccaaccctttctctctcgctcagttctatacgctcattgaaactgaagtgagcggtttttccgccacgacacttgctgttcaccttgaaaatgcctggcgcatgacaataaaagacgccgtaatcaatggagaaacagtacgcgctgcgcagtgttctcggttgccagcagaaactgctagacccttcgatggactggtgcgtcgtctcgttgaccgtcaggcctgggaaatcgctaagcgcgcgtcgaccgacattcagagcaaggtggacttcagcaatggcattgttgatgtgtccatttttgttgaagagaacaaatttgagttctcggcatcagttgcagacctcaaaaagaacaagcgtgtcaaagacaagatgttgtctgaagctgaaaaactcgaaacgcgctggctgaacaaaaacgaacgcattaagaaagccagtcggggaatctgcccctatagaggaaagcatctggctgaaggcggagaaattgaccatattctgccgagaagtttgatcaaagacgctcgaggcatcgtgtttaatgctgaacccaatctcatctacgtctcttctcaagccaatcaaatcaagaagaatcagcgctacagcctttcagatctgaaagctaactaccggaatgaaatcttcaagaccagcaacattgctgcaattactgcagagattgaggatgtagtcaccaagctgcagcaaactcaccgcttgaagttctttgatcttttaaatgaacatgagcaggactgtgttcgacatgccctctttctggatgatggcagcgaagctcgcaatgcggtactcgaactgctcgcaactcagagacgaactcgcgtcaacggcacgcagatttggatgatcaagagccttgccaataaaatcagggaagaactacaggactggtgcagaacaacaaataaccgactgcattttcaagctgccgcaacggatgtctcgaccgctaaaaacttgagactcaaattagcgcaaaatcagccggactttgaaaagccagatattcagcctatcgcttctcattccattgatgcactatgttcgtttgccgtcggttctgcagatgccgagcgagatcaagatggctttgactatcttgatggcaacgctgtattgggactctatccgcagtcctgcgaagtgattcgcttgcaggcaaaaccacaggaagaaaaatctcactttgacagtgtcgccatttttaaagaaggcatctacgctgaacaatttctgccgatttttacgctcaacggaagaatctggattggctatgaaacactcgattccaagggtgaacgttgtggtgccattgaagtttcaggcaagaaacccgaggaattactctcgatgcttaccccattcttcaacaaacctgttggagatttgtcagcgcatgccacttatcgaatccagaaaaaaccggcctacgaattccttgccaaggttgctctgcagccgctgtcggcagaggaaaaacgcctagccgcgcttcttgatgctcttcgttactgcacttcacgtaagagcctcatgagcctctttatggctgcgaatgggaaatcgctcaaaaaacgagaagatgtgctcaagcccaaacttttccaacttaaggttgaactcaagggagaaaaagcattcaaacttaatggttcattgacgttgcccgtgaagcaagattggctccgtatatgtgattctcctgaattggtcgatgccttcggtaaaccttgtagtgcggatgaattgacctccaaacttgcgcgaatttggaagcgccctgtgatgcgggatctcgcccacgcacctgtacggtgagaattcagcttgccagttatcgacaatccctctggaggcttccgcattcgccgtacaaatctgttcggcaatgagctttatcaagttcatgcaatcaatgcgaaaaaatatcgcggttttgcatctgcaggcagcaatgttgattgggcaaatgggatcctttttaacgagcttcagcacgaaaatttaacagaatgcggcggacgatttattacttcagccgacgtaactccgatgtctgagtggagaaaagttgtgaccgaagataacctccgcatatggatcgctccaggcaccgagggacgacgctatgtgcgtgttgaaacaacgtttatccaagcgagccactggtttgaacaaagtgttgaaaattgggctatcacatctccgttgtcattaccagcctctttcaaagtcgacaaaccagctgaattccaaaaggctgttggaacagagctttctgaactacttggtcagccgcgttcggagatcttcattgaaagcgtcggcaatgctaagcacattcgattctggtacatcgttgtgtccagcaataagaagatgaacgaaagctacaacaacgcatctaaatcatgaggtatttaaccgtttcttcttttggtacggcactcggactttcaggagaacgacttgttgttcatgaagcggatggacgcacgtgggagactgctctttcaagactgcgcaccatccgcattgagaaaaaaggtatcagtatctccacaaatctgatgctcgcctgtgcagcgaggggcattcgaatgttcctcgttgattggcgtggcgtgggggtcgttgccttaagtggtctccatcaacatgctgtcgtcaacatacgcgaagcgcagtttcaggcaattcactcctctcaaggccgcatcatcgcagcagagatgatcgtcgccaagattcgcaatcagcgcactgtacttttatatttttggaagtacctcaataagagtgctccggagaaggcggcaaaactgagagaagctgccgacaccatagctaatattgtgacgaaaacaaaagcagaaattgaaaatcttcaaacttgggatgaagggatatggtcgactgttctgatgggttatgaaggtgcagctgcaacgctttattggcaagcacttcgcacagcagaattagtacccgaaaccttcctcactcgagaaggtcgaggctccgtcgaaatcgtcaatgcggcactcaattacggctacgcgattctgcagagctacatctggtccgcgcttgataatgctggatttgaactttatgcagggttccttcaccgtcgacgtcctgggaaaccttctttagtactcgatgttatggaagagtatcgagcatgggttgtcgatcgaaacatcatcaaacttcggtcaatgcttaaaaattcaaagcgcggccttacacaggaaatcaaaagtgccattgtcaatgctatcgatgagacgatggcaaatgctgtgagttggcaaggcaaaagcgttcgccttgaaaatgctttgcagcgacaggcgtatcgccttgccggtacagttgttgacggtaaacgttacaaaagcattcgctttagatggtaggaaacgctcgtcatgtcaatctacgcaaagtatctggtctgttatgacgtttcgagcaactcccgcagaaaaaagttctccgacgctctaaaggatctaggcctagtctcaatgcaaggttccgtattctacggcgacctcaagccagctgaagtgcgagctttagcaagaaaagctgcagaactcctagatccgaaggaagataaatgtttctggtttccctgtcgcttagaagtcaaagacattcaaaaatgcatcggctacgacgattggtcctttgctgaagtcgacggccatggaacaatttaacctccccgtatcaatgctgcgtcaacactgtttttgtcctcgcattcctttctttcaactcatgcgcggcattcaacctgttggaccgatgtggctgcagcaaggactgaatcatcatgttcgagaagagatgctcgcaaaacgtcgaaaactatctcgatttggtatttctccacagagttttcgattttttgaagatatcaagttatacaacgatagcttgggacttcacggtatctgtgacggcgctcttttcactgagaatgaagtgatccctcttgaatttaagttatcagaagtcagtccaccaatgggcgccagactacagttagctgcttacgcaatgctgcttgaatatcaggaaaagataaaaatatcaaggggttttgtgctttatggccagaaaggtcataccctggaggttatagtagacatcaaattacgagctgaagttcttactgtggcaaatctaataagagaagcctgtaaaaaggctatcgtgcctcatacagcagctacggaatcgcaatgcgcgcaatgtgagtatcaaaatttctgtgcagatcgattctaagaagtgaatacttacttctaagtaagtaaatgaaaacctcattctttggtctaatcaaagaatgaggttttatatcaaaatatccggatatctactactagatagtggccggattcaatcttagctttaggggatttcagctcacccgaaggtgatttcctatagctcatagcgttatgatctctaaacggtatcctacgatgtattttcgaaaattacaaggtttttttatcaatcagagtattttcgaagaatggtactctgcagatagctacaaaaaccttataaatcacggtgtaggttagggggcgaagatcataacgctacgagctatagcactgaaacaaaacgtagccatgctcaacaaaagacttagagaagcgaagatcataacgctacgagctatagcactgaaacgaagattctcgtctctaaaccactcattgaaaatcgcgaagatcataacgctacgagctatagcactgaaacgaaaagtcaccgaattgaattggacgcttaggagagcgaagatcataacgctacgagctatagcactgaaacgtgctcgctcatcttggcgaacaggctgttcttagcgaagatcataacgctacgagctatagcactgaaacatttcaatcaacgatctccgtcaggctttccagagcgaagatcataacgctacgagctatagcactgaaactcgaggacgttcggcggcttcgagggcttctgttctggcgaagatcataacgctacgagctatagcactgaaacgatgagtgtaagggcgtaggttcaagcgaaccgaagcgaagatcataacgctacgagctatagcactgaaaccgataaggtttttctgctgggaggggttcatgatgtcgcgaagatcataacgctacgagctatagcactgaaactatccgcctttccccggcgaactcggcgtgcgcatcgcgaagatcataacgctacgagctatagcactgaaacaacggaacactaattttcaagtggggagctaaagagcgaagatcataacgctacgagctatagcactgaaaccatcggaaatctgacctaagcgatcaagctcagcctgcgaagatcataacgctacgagctatagcactgaaacttgaacgctccatgtcgagccaagaaagttcctcagcgaagatcataacgctacgagctatagcactgaaacatcgtatcgcttaccttcttcgcacgcgatgccaagcgaagatcataacgctacgagctatagcactgaaacgtgttggacagcggcaaggcgtagaggttgtcagccgcgaagatcataacgctacgagctatagcactgaaacgtctatgcgttcttcgtcacgcttcaaactgctcagcgaagatcataacgctacgagctatagcactgaaacgaggctgtcggcggagcaacggtcggagcggctatcgtgcgaagatcataacgctacgagctatagcactgaaaccctcttgaaattttctacagacttcatcgtgaattttgcgaagatcataacgctacgagctatagcactgaaacgcggagttcgtcccacagctgtcggggtcaattcgcgaagatcataacgctacgagctatagcactgaaatggagtactcggtgaatcacttcgcaggaatgtgtctgcgaagatcataatgctacgagatacaacgctgaaaacacagattcaaaaaatatcactattcaaggcattgcagcaatctctcctcaaatgcgtgggatcactctagtgttatcggcacactccattgaaaaagccgcttagcaacgtctacgccaaacctcctacaatagatgcctcatgttgatattggaggctccgtcatgggcaagctctatatgggttttgatgccggcacgcaaagcgtgaaggttgctgtttacgatgaacaatttcgcctggtcacgagccgatcactgcccacatcactcacctatccgcagccggggtgggtggaaatggatgtcaacacttatcttgacaactgcgtggtttgtatggctgaaaccacgagtgaactgcggcgtttggggttcgatcctaaagacgtcagtgccattatgggtgacggcatcatctgcggcattgtcgggatcgatgagaacgcggatccgataacgccttacatcaactacctcgacagccgcaccatggctgacgttgaaacgatcaacgccaaaaagctggatatctggagccgtgagaccggcaatccagaggcctcccccatgtttcccgcgatgttcgcccgttggttcatcgccaactccgaagccttccgcacgaagggcgtgaaattcgtccataacgcaccctacattctgatgagactggccggccttaaaggcaaagatgcctttattgactggggcgccatgtcaggctgggggctgggctacgacgtgcaaaagaaatgctggtcagaagagcagctccatattcttgggattgatcctcagtacatgccgaccatccgcaaaccctgggacattgtcggcggactctgtgaagcaatgtccgtgcgcacgggactgccggccggtattcctattcttgcgggtgcgggcgacacgatgcagtccatgctgggttccggggtatttgaagccaatcagggcgtcgatgttgcaggaacatgtgcgatgttctgcgtctccacctccggcatcgtgcccgaactttccaaacccggcatgggtctcatcttcaattcaggcacgctgcccgacacatacttctattggggattcgtgcgtacgggcggcttgtcgcttcgttggttcaaggaccatgtggctcgtcacgagggtgacggcagctactacggcactctctccgaaggtgctgccaaggttcctgctggcgctggcggcgtacagttcctcccttaccttacgggcggatacggcgaagagaaggaggcaagcgggtgcttcctcaacatgacgatggatgacaaccagttcgtcatgtggcgtgcagtccttgaggctatcggctatgactatatgggacttgccgacagctatcgagctgctggcgtgccgctcaaacgcatcaccgtcacagagggcggcagccgcgacggtctctggaatcaaatcaagtccaatatgctcggcgcagaggttgtgcgttttgagaaccctggcggagccgttcttaccaactgcgtattcggcgcttatgctgcaggtgaccttgaaggcgtcgacgacgtcaaggctgcgcttggcagcgtcattaagcgcagcggcgtttataagcctgaagcggccctcactcgccgctaccgcgaactctttgaaaaccgtcaaaagctcgttcgcgaagatctgaaggcagccttcagccgcctcgtgaaaatgcgcgccattcactaaaaatcaggttttagccaatacaaaagccgctcgatgtttggaattttgcttccaaccgccgagcggctttcttttgaccggttcacgtcggcgcagagggcattgcagctgcagccgactatgaacccgcggcgctgattattcctcagtctgctttgcttcacccttcacaaaatcggggcgctgcacttcaacaccgagcgaatgttcgagtgcatcgaggtaaccgcggcgatcggattctccatagacggaggaaagttcacgggtgatgccggcgaggtcctcgggcttagcttcatgcttcttggcttccttcacgtaaatgacaacgtaggagccgtcagcgagcacagcattggtgtaactcggaagcttcgccgtcgggagcgcaagggcagcattcaccacagtcacttcctgattctgcggcgcgcggcgcgaaatccacatctcgtcgccgaagccgtcaacgctcttagcctgctgcaccgaagcgagcttggcctgaccggcctcaatcgccatggcgccagccttttgacgcttgagcgcatcggtgatgagccccttcacttcgtcgagcgggcgttcggcttccgggaagtattccacgacacgagcagaaaccaaacgatttcccgaaacctcaatagcgctcgtattgcgcttttccttcaaagcttctgtgccgaacagcgattcagccacatgctcggtaatgatctgactgagttccggatctgtcacgccgttgcgggtgacgaaatcagccgtctcaaccttgagaccgaacttcgccgcagccggttcgagcgtatcggactgttcataaaccagatttgtgaattcatcggcgtgagtggagaactcgcggatcgcctgctgctgcgcatactcgcgctcgatctcgctcttgacgtcttcgaaaggttcaactgcagccggatgaatgtcggtcacgtagatcacatgccagccgaattccgtttcaatcgggccgacaatatcgcccttcttggcgttaaacaccgcatcttcaaaagccttcgtcatgacgccgcggccgaagaaggacagatcaccgccctgttctgcgctgcccgtgtcaacggaattggccttggccagttcagcaaacttagaaggatcagccttcacttcattggcaagttcttcagccttcttgcgggcagcttccttgtcatcgccgaactcgatcagaatatgacttgcgcggcgctcttcaggaacggtccagcgctgcttattttgttcgtaaaaggtcttgaggtcgtccagactggccttctgattgctgaaagcgtcaggcgaaaagacaacgtactgcgccttgatgtgctcgggcgaaaggaaatccttcaggtgagcgttgtagtaggctttgatctcttcgtccgtaacggcaaccttgtcaaggtagtcatccgcaggcagaaccagcgtgcgaacgttgcgctcttcggtgaggatctcgtagaactgctccgtaagcgccttggggactggataggtcgcactcacgccggaaaccaccgcttccttagcgagatcgttgcgaatctccatcacgaactgctgatcgctcttgccctgagaacgcaggaactgttcataacgctcggcagagaacttgccgtcaaccttgagcgcatcagcgttcttaatgagcgccacagcctgtgcttcactgacggaaatgtggttcttggccaccacctgattgatcgcggcctcatccatcagcatgcgaagcaggtcttcacgggcctgaggcgtatcgagcaggctggcgtgaaagctctcacccatctgctgacgcaggcgttcaagctgctggcgcttggccaaatcaaaattttcaggcgtaatcgacacctcgcccactttgacgatcgagttgtcactctgagtcatgcggttgtacgaataaatgccggtaaccacaaagctcggaataatgaacaccattgcgatgaccatcagccaacgcttgtgttcgcggaatgcctgcagcataagggatccttgtctaagggccgcttctgcgcatcattgaagaaagcgaagaaacggcgagcatgccagttggaaatgttcttttgccgggacgcagataacaaaaaaggcgaaacctcacggctcgcctttttcaagaaatctttggcggagtggacgggactcgaacccgcgaccctcggcgtgacaggccgatattctaaccaactgaactaccactccgcgctttcgcgcatttttggctggaaacagaatttgacgcgatcaaattactgcagaaaaactgttggcggagtggacgggactcgaacccgcgaccctcggcgtgacaggccgatattctaaccaactgaactaccactccgcatcagagatgctgctgtttttcagcctagaaggtgcattatacggagcgaaggagaatttgcaagctttccggcttcatcatctcttgcgtcccgggatgcatctcccagtggactccttaaacccggaatccagggcaataaaaaagccgttaccggcttttctatcagtgctctcttggaggtttggcggagtggacgggactcgaacccgcgaccctcggcgtgacaggccgatattctaaccaactgaactaccactccgcgttctctcggagagcgccttctccgtttcggagaagaattgggattttacagatttcacgaaacctgtcaagaggattgacgaaaaaccacctcaaattcacgtctacatgacgcatacacgtgatcaaaggggctcagcatcaccaatatataccacctcacgatattataaataattgctaaaaaatcaaataattactcagctgacagttcagataaactccctttcctgtgccactttaattccctgccttggacaagtcacacccggcttgatgacgagcaatggctccgctcggagccccaaggctaccacctatacacttctattatgttgttgattgtgaagctcagagaaaagtcgtccctaggaacgtcatcattaagaaatgctagatcttcgggctcacacttgtttatctccacttcttgttcagtccactgatgcaacatctcagaattcatacttttccttgcgctggatgaaggcgtcgcgtcctccttccaaaatgccagcaacatgatcacgaatcacaggcacgtctatcgacccttgtaccaaactaagacagtcctgattcttagccgcggtaaagacaccaatccactcagcgtcaccgaacacagggatgtttgcgttgtgcgttgcaaacaagaattgccgacgggtcttagcatctctcaactcggtaacaattcgttctgcgatgaaggcgttgtctaggttgtcttccggctgatccataattagcggatcagcgttctccagaagtagcatgtgcaatatcgccgtgcattgctgaccagtcgatagtttactcaacggacgaaacactggatcagccagaccgtgagcgacgttcaggaaaatatccacccgatgattcagctccagcgcctctaactccatgagctgcgatggttgaagcttggtcatcgcctcggccaccattggagtgacatcccagtcctgttgaacaacggccgcccccttctggatcgactgagccaacgacaacgggcaaatcgtcttagcctcttcgatccacgccaatcgcttctccccaacaccttccagcttgcacccccgcaggaagttgtacaacggagagcgatcgccctccggcacaatctcgaccctgagcttacctttaagtcgattgctcaggcgcttggcagccttctgtagggcctgaatacgcttctctcgtaggccggatagctcgaccaacaggttgcgccgctcttgtttcaatttattgccatcgtcctcatactttgataattttgtcttcattggcttgatgtgctcaatctcggacaaaagtcgttgatattcaacaccgacttcctgcccacttttacccgctaccgaaggaactgtccaaag

SEQ ID NO: 179 - DNA, 17317 bp, synthetic construct
  source 1..17317: mol_type = other DNA
  misc_feature 1..17317: note = Synthetic
ggtgaaatttgtactacttgaaaacaaaaatgcttacaagcatcatatacatatcacgacaatattgttcgcgtcagcgcagctgacagcgcttcagttcagcgggcggcgtctgaaaaaaaggatgcgaacgggaggaaagcagacaaggattctgaagctcctgaggctttaagcgaacggcccaaagaaacgctccgagcgttttagttttctttgcgttttggcggagatcactcagcttcagtaccgcaacgcgatcggtctgaggatccacggccgcaaaccgcccttctccgagccaaatgccggtggactgcggttcatcgtgctcaccaaagaacaccagatctccggctttgagctccgcgccgtctcgctcgcccgagagcggtgcgcccaaacgtgccaggcgatcgatgtcggcaggagccaggaggtcatgcatgcgaagcaccacgacgggaagcggcgcgcctaagacttcggctttgctgccgaccaatccttcggctgaagccgcaagcgccttgagataggccgatgggctgctgcggcgaagctcctcttcgcgctgctgccatgcagagacatcctccagcgccgtgcctgccgccttggccttgcggccgtcgggcaaaagcacctcccaataatcgggctgatgttcgagctgatagagctgaatgcccgctccggcaaagacaagagcatcaccgttttccgggcgaagttctgtgtttggccggcgcatgactgcggcagtctgacgattccaagacacaaatgccatgtcattcttgagcgccagccaactttctgaaatccatccgagccggccgtccaggcactggaccagtgcccagcccggggcctctgaagcggtcgccgaagtccgcttcaggattctcacccgctctcccaaaacgactgtgcgcaccgtccgctctgtacggcctgccgttttcggatcaagatccatgagttcggcgctgccaactttcacaataccccaagtcatcaaatccaaagacttcggttcgggcacttgatccacggcagactcaaacgacaatccttggcgagcagcggccgcaaagaacttagcgagcagcgcgggttctgctgatatccccgcaacagcagccgctccgggaagccgggaaaccgcaggaccaaactgaagcgccaaaagatccactcgatagtcgagcgcttcggcgtccgcaaaatgcttccaaagcgcggcagcgcgctcttcggaaggggcctctcccggcgccggtacgttggccgcgtagtccgccgaaacggaaggctgagcagccgcgcaggctgattcactccccaaaccggcaagtgccagcgtcagcaaaagcccgcccaacataaagcgggagtccgcgctcgatcggtttgaagcaaaagccatattcgttctccagcgccttgagtcttccgtcattttcggataaagattttggaaaaacagccttcaatcagctgatttcgcgggcagcagccggcagcagcagcgtcacgcgcgtgccgccgatcggacttgcccgctctacctttacttccgcaccgatgcgggctgcacgctcggccatgatcgagaggccgacatgctgtcccttgcgagcctccaccacgtcgttgtcgatgccaacgccgtcgtcaacgatgctcaccttaaggtcgtcgttattttggatcgtcacggtgacactggtggcctgagcatgtttacgcacattggagagcgcttcctgaatgatgaagatcacctgaagcttctggcgaggcgtgagcttggggccgtcgcccgttgcccgcagacgcgctgaaacatgagactgcccctcaaaacggtcaatcacagtctgcacgccctgaaggaagccttcgctgtgcacgcgttcacggaaattaaggagcagctcccgcacatcctgatagcactcctgcacacccgtctgaatggccgaaagcgactcgtcgcgaagcgcatcatctttatttttgatggcttccgagaggaactgcacctgcagattaaggtacgagagcgcctgcgcaatcgaatcatgcagcccctgggccagaagctgacgctcctgcaccaccgcaaactgtcgttcacgctcaattaggcgctgattgtcaatagccacgcccaaatgcgtcgagaagctctcgagaagctgaatcatctgcgaggaaagttccggcgcatcccggaaaagcagcatgtagacgccgatagactccgaaacacttcggaccttaaagcaataggccgttgagaaccccgcacgagcaagcacgacggcgagcggccgctgatcattttcaagccgcacgcgcaccggataatttttttgcagcaccgtacggctgatggaatcctcaaaagccatttccgcggcttcatgaatatcgctcggcctcaatccgctcgccgcagcaatattgaccgctccctgcttggcgtcgaccaatgtcacgagacacgcatctgcttcggtatagcgcacgatgcgttcgacaaacccctccgtcagctcctccatgccgcgctgctgtgagaagaaggatgtgatttcataaagctgcgccaaatgacgattcttttcctcgacagaagccgtcttttcggccactttctgctcaaggttgttgtagaggtcttccagtcgatccgccatgcgattgaagccctgagcaatgcgcccgatttcgtcttcgcttcgaggcgtcacgcgcgccgtcagatctccgccggagagtcggttgatgccttcgccgagttcattgatgggacgaatcacccagcgccagaggagaagcataatcgcaaagagactgccgatcgccagcacaatcaggagcatctgcagatagcgaagctgccacaaatacccgcttcgccactcttcaatgcggtgcgcaagattcgttgcttcatccagaaaactgctgagtgcatactcgtcaacaggcttcccaagctctctcgcacgcacaaacatgggttcgatactgccgcgccagcgcccttcaaggaggtcgagcttgtcggcaatatcgggctctcgcggtagcaggagcggcttccagctgtcgccgctgcgaacgttcttaaagccgtcgagcatcgcctgaagttctttgtcgaaatcgagccgcgacgagcccgtctgcgaaaaatacgctgctctataagcatgaaggcgcagttcgcccactgcgtatttggccgatgcgcttgcctcaagttcccagttaacgagcatcgtccaggcaatcgacccggaaacaaagctcacccaaagaagcgtgagaacgagaagacgagccgaaaggcttttaaagtacttcaggatgaacatgaggcgctgcgccgagccctgcggctcggcgggaattgtagattggcacaaaccgcagattagataagcgttggatcttcgtccaccacttcaagcgtcaaaccgtcgtctgtcttaacgctgtcggacggagctccgccagctgtgtccgacccatccgcggaatccgttgattcaagggacagccccacaatatgttcggccttccaagagagcgcaagcaccttgccgcggcgggcacgatggagcgttgcgccgctcaggatgcgcttggaaatctgcgcctctcgcgctttaccgcctcggccggtgccagtaacgattgccccgcggtcatcaaccagcgcgacagatacaagcgattcgcccgtttcaagcgtcatgaagctcatacctttgccgccggaggccgtcacgcgcacttctttcaaggggaataccaagagtcgattggacgacgacaagcaggcaatgagctgctcgccctgcgccgctttaaggggcagttcaatcggcggcagaagcgactcgcctttgcctaacgttacgaaatcgcggccggcctttaaacgcgtcgacacgtccgaagccttcagcaccatgcccttgccgccggaagtcacaatcaccgcagcggcattcggatccgccgaaatccagcctgccggctgagcgcctttaggcaaatcaacgaaggccgaaagcggcgaaccatcgccgcggccgcccggcagtgcggagacggcaagcgtatagacgcggcccgcctgatccaagaacgaaatctgactgctcgaacggcactcaatcgtcgcttcgagtccgtcacccgtcttaaagctcatgagcgagcagtcgtgaccatgacccgtacgggcgcgcaggaagcccttgcgggaaatgacgaccgttacgggttcatccgccgtctgcacttcgtgcaccgcctgttcggcctcttcaaccaccgttcggcgaggatcggcaaaactcttggctgccgcttcaatttccttggccgtctgacgcttcagtgcgccgtcactgccgagaattttctcgagtccggcacgttctttggctagctgcgcgagctctttctcaatggcaatggccgccaagcgagcaagctgcttcaagcgaatttcaaggatatcgtcggcctgacggtccgtgaggccaaactctttgatgagatcggccttcggatcatctgcattgcgaataatggcaatcacgcggtcaatattgaggagcacaagcgaccgaccttccaacacgtgaatgcggtcgagcaccttctccaaacgcgcctctgaacgccggcgaacgaccgccagccgaaatgcgatccaatcctgcagaatttcgagcaggcctttttgccggggcttgccgtccagtcccagcatcacaaggttcaccggcacattgctttcgaggtcggtttccgaaagcaggtagttcacgaactcatcgcgatcgaccttgctcgtcttcggttcaaacacaaggcgcacgtcgacggacttgcccgactcgtcgcgcacattgtcgagcagcgaaagcatcgcgctcttggcctgctgctgcttggccgaaagcgtctttttatccttcttgggacgcggatttgaaatctgctcaatgcggtccagaatcgaacgcgcagaagctgccggcggcagctcatcaatcacgagctgccactgactgcgcgccagatcttcaaagtgccagcgagcacgaacacggagcttgccgcgtcccgaacggtagatggcgcgtatttcatccttaggcgtaataatctgaccgccgcatgggaagtccggagccggcatcagctccaggatttcgtttaaatctgcgtcgggattctccaaaagccgcacgcaggccgcagcgacttcgcccagattgtgcggagggatctcggttgccataccaacagcaatgcccgacgaaccgttcagcagcacaaacggcagcttggcaggcagctccaccggttcctgaaaattgccgtcgtaattgggctgaaaatctacagaccccagatccacttcttcgagcaagagctgcgaaatgggcgtgagacgggtttccgtataacgcatcgccgctgccgagtcgccgtcgcgggaaccgaaattaccttccgccacaaggagcggatagcgaagcgaaaaggtctgagccatgcgcaccagggcgtcatacaccgactggtcaccgtgcggatgatatttgccgagcacgtcacccacaatacgggcgcttttgacgcttctgccctcaaatttcagccccatccggtacatgtctatcaggatgcggcgctggacaggtttttgcccgtcagtcacttccggaagcgctcggctcttcaccaccgacatggcgtattcaagataagcctgtgaagcatagcgggcaagcgtgagcgccccgtcctcttcggccggaccgactgtagctgcaccgacagccatctcttcagtagcggcttcctcgggtgattcctcaagagcatcgtctggcgatggagcagcatcatcagcatcgagctcctccgtttccggcggttcagagccgtttggctcctttgccgcctccggcgtttcgggagcctctgccgcatcgtcgtccgcagccttttcctgaatcgcctgagccccttgagactgcttagacggatccagttccggcacatcagcattcaagtcgccaaaaagggagtcgtgctcaaaatcgtctttcttcatgcttcatacagacgggttcgtcaatgccgccccagtctttcacttctttcgtttaaccgctttttcgggaccgtttttaaacatcgagctctgctcggtcaccataggcttccatccagaggcggcgccccgtcacctgacgttcccccatcaaggtttgcatgaccgttcgggtatccgcttcggaaatactgccgaaagcaacggggaggagcttccgcgtatcgggagccagcgttgtctccgcgagctgctcagctttcatttcacccaaacccttaaagcgtgaaatggagagctgctcctcggtgaatccctcctttttgagagactccagcgtgcgcgacagttcgcgctcgtccagacaatagatcttgcgatcgggtttgcggcctttcttcggcgcatcaacgcgaaagagcggcggcatggcgacatacacgtgacccaattcaataagcttcggaaagtgcttcaagaagagcgtcagaaggagcacttgaatgtgagagccgtccacgtccgcgtcggacaagatgcagatctttccataacgcagccccttcaaatccggatcaccgtcccgatgatgcggatccaccccgatggcgagcgcaatgtcatgaatcgtgtcggaacggaagagttcgccgccctcgacttcccaggtattgaggatcttgccgcgcagcggcagcacagcctgaaattccttgtcgcgcccctgcttagcggagccgccggctgaatccccttcaacgatgaagagttcgttgcgcgtaatgtcgcttgactcacagtcggtgagtttgcccggcaataccgccaccgtgcttgcgcgacggcgctcgtatttcgcagcctgacgctgacgcgcctgtgcctgcgaaatgatgtgttcaacgagctttttgccttcgtcggcatggtcattcaaccagaattcaaactgcggacgtacgaacccgcccacgagcttcactgcatcacggctcgtgagtttttccttcgtctgtccttgaaactggggatcgagcgactttgttgaaagtacaaaattaacgcgcgaaaagacgtcttcggcgagaattttcacgccctttggctgcagcccatgggcatccatgaaagcacggacagcttgaaagaggccgtccttcaatcccgcttcatgcgtgccgccctgcggcgtcggaatgaggttcacatagctctcgcgcgtgagcggtccttcagccgtccacaccaccacccaagacgcgccttcacccggcgaaaagctttcggaatcttcaccagcaaagcctgaagcttcaaacggctcaataagactatcgcccttgatttccgagagcaaatattcctttaagcctcccgaatatttccaatgcgcttccgttccggtcattttgttgacatagtccacttcgcatcccggaaggagcaccgccttcgagcgcagaagacggaccaatgccggttcaggaataaccggactgtcaaaatacttcggatcgggccagaccgttacgcgcgtgcctgtgcgcgacttcgggcgggagcttttcttgatttccaagggttcagacacgaacccgtcgcgaaagcccatcgttgcttcttggccgtcgcgccaaacagtcaccactaaatgcttggaaagcgcgttggttaccgaaacgcctacaccatgaaggccgcccgcaaacgtgtaggggccgcttccatcagctttggcaaacttgccgccggcatgcagacgcgtaaaaacaatctccagcaccggcgcgtgttcttctggatgcatgccggtaggaatacctcggccatcatcctccaccgtcactgatccgtccgctgccacctcaacagagattcttttgccgtagcccgcgagcacttcgtcgcttgcgttgtcaatcacctcctgaatgatatggaggggattgtcagtcagcgtgtacatacccgggcgctgcttgacaggttctaaccctttcagcacgcgaatagcctctacgccgtattcttcttttttcgccatcttcacaaacaaaatgcagccggagattcagaggaaggcgcttgcgctacttccgtccgatcgaaccagtactgaataaaaggagagtcgaggttgatcgagtttcaccggtcagccttccgcagtgcttccacttcagcagcaagcaaactcaaagagcctgctgcgcaggaagcagcgaggagaaccatgcattgtttgatcctcttcgagactcacagatatatattctagcaattgcagtcaccaggctaaatagcagcgctatccgtgctgacacccaaaaaagccatttctttgcggcttatcccattcaaaagacccaacgctaactgaaggtgtacgccaatatacccaaatgcgctgtcagcactagagtgatgatgcagagcttgttggtttatctaaccagtaaagcccgtaaaaagatgatcgtgcctcatactgccggctacagaccgctatgcccgcaatgtgagtatcaaaagttctgttcagatcaagttcacaaagtaaacaatcatttcacataataattaaataaaaaacttcgtttctttgatctgattaaaaacggaattttatcaaaacaaacagatatctattgccaaatagtggctgaattaaaacagaaatcataacgccacgagctattgctttgaaacggatcctcaacgagcaccaagttcatattcttgcaattaccgtcaagcgccaaactgtcaagggtttcgtgaaaatggtcatagacaccgcttcgtatgaaatcctgacgccaaaatactgaaacgcttattgccgggacaagcgggaagaaaaatgtttcggaatgacgacagcgttagtgctgcgccgtacaaacattaaaatgctatccaccttacttgcagaaggatctctgagattagtgaaacctaattcagggaaaacaccactcaatcggtgtgacacaatcttcgtatcacgaccttgttcgatcagtatgttttctgtcaaactaactgttcgaaagattaatttaactctgtaattccatctgctttaggagttcctcatgacgcaatcggaacgacgcttttcatgctccatcggcattgatatgggtgccaaatataccggtgtgttttatgcactgtttgaccgcgaagaactccccaccaatttgaactctaaagcgatgaccttggttatgccggaaacggggcctcgctacgttcaggctcaacgtaccgcagtccgtcaccgtttgcgcggccagaagcgttataccctggctcgcaaacttgcttttctcgttgttgacgacatgatgaaaaaacaagagaaacgcttaactgacgaggaatggaaacgcggcagagaagctttaagcggcctgcttaagcgtcgaggttattccagacccaatgccgatggagaagatttgacgccgcttgagaacgtacgtgcggaggtatttgccgcgcatcctgccttcagtacatatttcagtgaagtgcgttctctagctgagcaatgggaggaatttactgccaatattagtaatgttgaaatgtttcttggtgattcgaatataccggccgacaaggaatttgtagactttgcagttgccgaaggactcatcgataaaacagagaaaaaagcctacctgagtgccctttcaaccatgcgagccaatgcgaatgtattgactggattgcgtcaaatgggccataaaccccgcagtgaatacttcaaggccattgaagcaaatctcaaaaaagattcgagattagcgaagatctgcgaagcttttggaggcgcagaccgcctcgctcgacttctcggcaacctctcaaatctgcagctgcgggcagaacggtggtacttcaatgcgcccgatatcgatgaaagatcgcggctgggaaccggaccgctttaaaaaaacactcgtacgtgccttcaaatttttccatcccgcaaaagatcagaataagcagcaccttgagttaatcaagcaaatagagaattccgaagacatcattgaaacgctctgcacgctagatcctaaccgcacgatcccgccttacgaagatcaaaataaccgtcgcccaccgctagatcagacacttctgctgagtcccgagaaattgacgcggcagtatggcgaaatctggaaaacgtggtcagcccgtttaacgagcgacgagccgacacttgctccggcagcagaaatcttggaacgctcaacggatcgaaaatcgcgtgtagctgtgaacggtcatgaacctcagccgacattggcgtaccaactgtcctatgcactgcagcgcgcctttgatcgcagtaaggcgcttgatccctatgcacttcgtgctttagcagcaggcagcaagagcaataagctcacaagcgctcgaacggctttagaaaactgcattggcggacaaaatgtggagaagttcctcgactgtgctcggcgctactaccgagaagcggatgacgccaaggttgggctgtggtttgataatgcagagggtcttcttgagcgatcagatcttcatccgccaatgaaaaagaaaattttaccgttgcttgttgccaatattctgcagacggatgaaactactggacagaaatttcttgatgaaatctggcgcaaacaaataaagggccgtgaaacagtggcttctcgctgtgcgcgcatcgaaacggttcgcaagagttttggcggaggtttcaatattgcatataacacagcacagtacagagaagtcaataaattacccagaaatgcgcaggacaaagaacttctgataattcgcgatcgagttgctgaaactgcagattttattgcagcaaacctggggttgagtgatgaacaaaagcgtaagtttgccaaccctttctctctcgctcagttctatacgctcattgaaactgaagtgagcggtttttccgccacgacacttgctgttcaccttgaaaatgcctggcgcatgacaataaaagacgccgtaatcaatggagaaacagtacgcgctgcgcagtgttctcggttgccagcagaaactgctagacccttcgacggactggtgcgtcgtctcgttgaccgtcaggcctgggaaatcgctaagcgcgcgtcgaccgacattcagagcaaggtggacttcagcaatggcattgttgatgtgtccatttttgttgaagagaacaaatttgagttctcggcatcagttgcagacctcaaaaagaacaagcgtgtcaaagacaagatgttgtctgaagctgaaaaactcgaaacgcgctggctgaacaaaaacgaacgcattaagaaagccagccgggaaacctgcccctatacaggagaccgcctggctgaaggcggagaaattgaccatattctgccgagaagtttgatcaaagacgctcgaggcatcgtgtttaacgccgaacccaatctcatctacgcctcttctcgaggcaatcaactcaagaagaatcagcgctacagcctttcaaagctggatcctgactacctgaacaaagtcttcaagaccagcaatattgctgcaattaccgcagagattgaggatgtagtcaccaagctgcagcaaacgcaccgtttgaagttctttgatcttttaaatgaacatgagcaggactgtgttcgacatgctctctttctggatgatggcagcgaagctcgcaatgcggtactcgaactgctcgcaactcagagacgaactcgcgtcaacggcacgcagatttggatgatcaagagccttgccaataaaatcagggaagaactacaggactggtgcagaacaacaaataaccgactgcattttcaagctgccgcaacggatgtctcgaccgctaaaaacttgagactcaaattagcgcaaaatcagccgaactttgaaaagccagacattcagcctatcgcttctcattccattgatgcactatgttcgtttgccgtcggttctgcagatgccgagcgagatcaagatggctttgactatcttgatggcaaagctgtattgggactctatccgcagtcctgcgaagtgattcgcttgcaggcaaaaccacaggaagaaaaatctcactttgacagtgtcgccatttttaaagaaggcatctacgctgaacaatttctgccgatttttacgctcaacggaagaatctggattggctatgaaacactcgattccaagggtgaacgttgtggtgccattgaagtttccggtaagaagcccgaggaattactctcgatgcttgccccattcttcaacaaacctgttggagatttatcagcacatgccacttatagaatccagaaaaaaccggcctacgaatttcttgccaaggctgctctgcagccgctgtcggcagaggaaaaacgcttagccgcgcttcttgatgctcttcgttactgcacttcacgtaagagcctcaagagcttctttatggctgcgaatggtaaatcgctcaaaaaacgagaagatttgctcaaacccaaacttttccaacttaaggttgaactcaagggagaaaaagcattcaaacttaatggttcattgacgttgcccatgaagcaagattggctccgtatatgtaattctcctgaattggccgatgccttcggtaacccttgtagtgcggatgaattgacctccaaacttgcacaaatttggaagcgccctgtgatgcgggatctcgcccacgcacctgtacggcgagaattcagcctgccagttatcgacaatccctctggaggcttccgcattcgccgtacaaatctgttcggcaatgagctttatcaagttcatgcaatcaatgcgaaaaaatatcgcggttttgcatctgcagacagcaatgttgattgggcaaatgggatcctttttaacgagcttcagcacgaaaatttaacagaatgctgcggacgatttattacttcagccgacgtaactccgatgtctgagtggagaaaagttgtgaccgaagataacctccgcatatggatcgctccaggcaccgagggacgacgctatgtgcgtgttgaaacaacgtttatccaagcgagccactggtttgaacaaagtgttgaaaattgggctatcacttctccgttgtcattaccagcctctttcaaagtcgacaaaccagctgaattccaaaaggctgttggaacagagctttctgaattacttggtcagccgcgttcggagatcttcattgaaagcgtcggcaatgctaagcacattcgattctggtacatcgttgtgtccagcaataagaagatgaacgaaagctacaacaacgcatctaaatcatgaggtatttaaccgtttcttcttttggtacggcactcggactttcaggagaacgacttgttgttcatgaagcggatggacgcacgtgggagactgctctttcaagactgcgcaccatccgcattgagaaaaaaggtatcagtatctccacaaatctgatgctcgcctgtgcagcgaggggcattcgaatgttcctcgttgattggcgtggcgtgggggtcgttgccttaagtggtctccatcaacatgctgtcgtcaacatacgcgaagcgcagtttcaggcaattcactcctctcaaggccgcatcatcgcagcagagatgatcgtcgccaagattcgcaatcagcgcactgtacttttatatttttggaagtacctcaataagagtgctccggggaaggcggaaaaactgagagaagctgccgacaccatagctaatattgtgacgaaaacaaaagcagaaattgaaaatcttcaaacttgggatgaagggatatggtcgactgttctgatgggttatgaaggtgcagctgcaacgctttattggcaagcacttcgcacagcaggattagtgcccgaaaccttcctcactcgagaaggtcgaggctccgtcgaaatcgtcaatgcggcactcaattacggctacgcgattctgcagagctacatctggtccgcgcttgataatgctggatttgaactttatgcagggttccttcaccgtcgacgtcctgggaaaccttctttagtactcgatgttatggaagagtatcgagcatgggttgtcgatcgaaacatcatcaaacttcggtcaatgcttaaaaattcaaagcgtggccttacacaggaaatcaaaagtgccattgtcaatgctatcgatgagacgatggcaaatgctgtgagttggcaaggcaaaagcgttcgccttgaaaatgctttgcagcgacaggcgtatcgccttgccggtacagttgttgacggtaaacattacaaaagcattcgctttagatggtaggaaacgctcgtcatgtcaatctacgcaaagtatctggtctgttatgacgtttcgagcaactcccgcagaaaaaagttctccgacgctctaaaggatctaggcctagtctcaatgcaaggttccgtattctacggcgacctcaagccagctgaagtgcgagctttagcaagaaaagctacagaactcctagatccgaaggaagataaatgtttctggtttccctgtcgcttagaagtcaaagacattcaaaaatgcatcggctacgacgattggtcctttgctgaagtggacggccatggaacaatttaacctccccgtatcaatgctgcgtcaacactgtttttgtcctcgcattcctttctttcaactcatgcgcggcattcaacctgttggaccgatgtggctgcagcaaggactgaatcatcatgttcgagaagagatgctcgcaaaacgtcgaaaactatctcgatttggtatttctccacagagttttcgattttttgaagatatcaagttatacaacgatagcttgggacttcacggcatctgtgacggcgctattttcactgagaatgaagtgatccctcttgaatttaagttatcagaagtcagtccaccaatgggcgccagactacagttagctgcttacgcaatgctgcttgaatatcaggaaaagataaaaatatcaaggggttttgtgctttatggccagaaaggtcataccctgaaggttatagtagacatcaaattacgagctgaagttcttactgtggcaaatctaataagagaagcctgtaaaaaggctatcgtgcctcatacagcagctacggaatcgcaatgcgcgcaatgtgagtatcaaaatttctgtgcagatcgattctaagaagtgaatacttacttctaagtaagtaaatgaaaacctcattctttggcctaatcaaagaatgaggttttatatcaaaatatccggatatctactactagatagtggccggattcaatcttagctttaggggatttcagctcacccgaaggtgatttcctatagctcatagcattatgatctctaatcagtatcttacgatgtattttcgaaaattacaaggtttttttatcaatctgagtattttcgaagtatggcactctgcagatagttgcaaaaaccttataaatcaatgtgtaagttagggggcagagatcataacgctacgagctatagcactgaaactgagaacggtcaaagactgatcgaggaatctgagtgcagagatcataacgctacgagctatagcactgaaacaagtttctcaagcgtacgactacgatataagttatgcagagatcataacgctacgagctatagcactgaaactatcgtcgtcagcagtgccttgagcgtagatctcgcagagatcataacgctacgagctatagcactgaaactcatagtgctcaagctttaaaggacctgtaatttgcagagatcataacgctacgagctatagcactgaaactgttcaacgaaagacttagagaatccatgaaacgaatcagcagagatcataacgctacgagctatagcactgaaacatctcgagtgctgatatggctgatgcggaaaagctgcagagatcataacgctacgagctatagcactgaaaccgctatgggattcactggtgagaaagccgacaagttgcagagatcataacgctacgagctatagcactgaaacgtccagtcaaaagatcgatatccctgttgtcgccgcagagatcataacgctacgagctatagcactgaaacggtgcgtaccgggacaacggatcaaatgcgtttcggcagagatcataacgctacgagctatagcactgaaacagtcgtctgatagctccgccgtgtaggccgtatggcagagatcataacgctacgagctatagcactgaaactaccatcatagtgctctaacttcaaaggaccagtaagcagagatcataacgctacgagctatagcactgaaactcttttgtcttttgaccagcaagacgatacgctgttatgcagagatcataacgctacgagctatagcactgaaacttttatgtcgatgaagttttgcctggcgatagtttgcagagatcataacgctacgagctatagcactgaaactgaggcgtcgtttcattagttgaagaagtctgctgaagcagagatcataacgctacgagctatagcactgaaacattgttcccttcatggacaatctctatcttgagactttgcagagatcataacgctacgagctatagcactgaaactgcatagacgccgcgcgcaagtagcgtcagaccgacagcagagatcataacgctacgagctatagcactgaaacgttctcgaccttcagaaagaagctctgtactttcgcagagatcataacgctacgagctatagcactgaaacgacaaaacagccttaacggctgattcgtcttgaatagcagagatcataacgctacgagctatagcactgaaactgtgctttcgtcttctgcgtcgatgatcgtccagtgcagagatcataacgctacgagctatagcactgaaactatggctccctacgaatccaattaaggattcaattaggcagagatcataacgctacgagctatagcactgaaacgccgtcaagagggcgactctgctcccgcccttgatctctggaccacccacccgctgtcaagcggtctaccgctgtttttgattccggaactgag

SEQ ID NO: 180 - DNA, 8397 bp, synthetic construct
  source 1..8397: mol_type = other DNA
  misc_feature 1..8397: note = Synthetic
agcatccatgaaagcacggacagcttgaaagaggccgtccttcaatcccgcttcatgcgtgccgccctgcggcgtcggaatgaggttcacatagctttcgcgcgtgagcggtccttcagccgtccacaccaccacccaagaggcgccttcacccggcgaaaagctttcggaatcttcatcagcaaagcctgaagcttcaaacggttcaataagactttcacccttgatttccgagagcagatattccttcaaacctcccgaatatttccaatgcgcttccgttccggtcattttgttgacgtagtcaacttcgcatcccggaaggagcaccgccttcgagcgcagaagacggatcaatgccggttcaggaataaccggactgtcaaaatacttcggatcaggccagaccgttacgcgcgtgcccgtgcgcgacttcggacgggagcttttcttaatctccaaaggttcagacacgaacccgtcgcgaaagcccatcgttgcttcttggccgtcgcgccagacagtcaccactaaatgtttggaaagcgcgttggttaccgaaacgcctacaccatgaaggccgcctgcaaacgtgtaggggccgcttccatcggccttggcgaacttgccgccggcatggagccgcgtaaaaacaatctccagcaccggcgcgtgttcttctggatgcatgccggtaggaatacctcggccatcatcctccaccgtcactgatccgtccgctgccacctcaacagagattcttttgccgtagcccgcgagcacttcgtcgcttgcgttgtcaatcacctcctgaatgatgtggaggggattgtcagtcagcgtgtacatacccgggcgctgcttaacaggttctaaccctttcagcacgcgaatagcctctacgccgtattcttcttttttcgccatcttcacaaacaaaatgcagccggagattcagaggaaggcgcttacgctgcttccgtccgatcgaaccagtactgaataaaaggagagtcgaggttgatcgagtttcaccggtcagccttctgcagcgcttccacttcagcagcaagcagactcaaagagcctgctgcgcaggaagcagcgaggaggaccatgcattgtttgatcctcttcgagactcataaatatatattctagcaattgcagtcaccaggctaaatagcagcgctatccgtgctgacaccccaaaaagccatttctttgcggcttatcccattcaaaagacccaacgctaactgaaggtgtacgccaagatacccaaatgcgctgtcagcactagagtgatgatgatgcagagcttgttggtttatctaaccagtaaagcccgtaaaagatgatggtgcctgatactgccggctacagaccgccatgcccgcaaagtgagtatcaaaagttctgttcagatcgagttcgcgaagtaaacaataacttcacataacaattaaataaaaaacttcatttcttcgatctgattaaaaatgggatttcatcaaaacaaacggatatctactgctaaatagtggctaaattaaaacagaaatcataacgccacgagctattgctttgaaacggatcctcaacgagcacacaagtacatattcttgcaattgccgccaagcgtccaaactgtcaagggtttcgtgaaaataggcgtaacatccacttcgtatgaaatcctgacgccaaaatgctgaaacgcttattgacgggactggcgggaggaaaaatgtttcggattgacgacagcattagcactgcgccgtgtaacaattaaaatgatctccaccctagttgcagaaggatttcggagatttggaagcccaattcagggaaaacaccatttaatcggtatgacacaatctccgtatcacgaccttgttcgatcagtatgttttctgtcaaacttactgttcgtaagattaatttaactctgtaattccatctgccttaggagttcctcatgacgcaatcggaacgacgcttttcgtgttccatcggcattgatatgggtgccaaatataccggtgtgttttatgcactgtttgaccgcgaagaactccccacaaatttgaactctaaagcgatgaccctggttatgccggaaacggggcctcgctacgttcaagctcaacgtactgcagtccgtcaccgtttgcgcggccagaagcgttataccctggctcgcaaacttgcttttctcattgttgatgacatgatgaaaaaacaagagaaacgcttaactgacgaggaatggaaacgcggcagagaagctttaagcggtctgcttaagcgtcgaggttattccagacctaatgctgatggagaagatttgacgccgcttgaaaatgtacgtgcggatgtatttgccgctcatccggccttctgtacatatttcagtgaagtgcgttctctagctgagcaatgggaggaatttactgccaatattagtaatgttgaaaagtttcttggtgattcgaatataccggccgacaaggaatttgtagactttgcagttgccgaaggactcatcgataaaacagagaaaaaagcctacctgagtgccctttcaaccatgcgagccaatgcgaatgtattgactggattgcgtcaaatgggccataaaccccgcagtgaatacttcaaggccattgaagcagatctcaaaaaagattcgagattagcgaagatctgcgaagcttttagaggcgcagaccgcctcgctcgacttctcggcaacctctcaaatctgcagctgcgggcagaacggtggtacttcaatgcacccgatatcatgaaagatcgcggctgggaaccggaccgctttaaaaaaacactcgtacgtgccttcaaatttttccatcccgcaaaagatcagaataagcagcaccttgagttaatcaagcaaatagagaattccgaagacatcattgaaacgctctgcacgctagatcctaaccgcacgatcccgccgtacgaagatcaaaataaccgtcgcccaccgctagatcagacacttctgctgagtcccgagaaattggcgcggcagtatggcgaaatctggaaaacatggtcagcccgtttaacgagcgccgagccgacacttgccccggcagctgaaatcttggaacgctcaacggatcgaaaatcgcgtgtggctgtggacggtcatgaacctcagccgacattggcgtaccaactttcctatgcactgcagcgcgcctttgatcgcagtaaggcgcttgatccctatgcacttcgtgctttagcggcaggcaacaagagcaataagctcacaagcgctcgaacggctttagaaaactgcattggcggacaaaatgtggagaagttcctcgactgtgctcggcgctactaccgagaagcggatgacgccaaggttgggctgtggtttgataatgcagatggtcttcttgagcggtcagatctccatccgccaatgaaaaagaaaattttaccgttgcttgttgccaatattctgcagacagatgaaactactggacagaaatttcttgatgaaatctggcgtaagcaaataaaagcccgtgaaacagtggcttctcgctgtgcgcgcatcgaaacggctcgcaagagtttgggcggaggtttcaatattgcctataacacagcacagtacagagaagtcaataaattacccagaaatgcgcaggacaaagaacttctgataattcgcgatcgagttgctgaaacagcagattttattgctgcaaacctggggttgagtgatgaacaaaagcgtaagtttgccaaccctttctctctcgctcagttttatacgctcattgaaactgaagtgagcggtttttccgccacgacacttgctgttcaccttgaaaatgcctggcgcatgacaataaaagacgccgtaatcaatggagaaacagtacgcgctgcgcagtgttctcggttaccagcagaaactgctagaccattcgacgggctggtgcgtcgtctcgttgaccgtcaggcctgggaaatcgctaagcgcacgtcgaccgacattcaaagcaaggtggacttcagcaatggcattgttgatgtgtccatttttgttgaagagaacaaatttgagttctcagcatcagttgcagacctcaaaaagaacaagcgtgtcaaagacaagatgttgtctgaaagtcaaaaactcgaaacgcgctggctgaacaaaaacgaacgcattaagaaagccagtcgggaaacctgcccctatacaggagaccacctggctgaaggcggagaaattgaccatattctgccgagaagtttgatcaaagacgctcgaggcatcgtgtttaacgccgaacccaatctcatttacgtctcttctcgaggcaatcaactcaagaaggatcagcgctacagcctttcaaagctggatactgactacctgaacaaagtcttcaagaccagcaacattgctgcaattactgcaaagattgaggatgttgtcaccaagctgcagcaaacgcagcgcttgaagttctttgatcttttaaatgaacatgagcaggactgtgttcgacatgccctctttctggatgatggcagcgaagctcgcaatgcggtactcgaactgctcgcaactcagagaagaactcgtgtcaacggcacgcagatttggatgatcaagagtcttgccaataaaatcagggaagaactccaggactggtgcaaaacaacaaataaccgactgcattttcaagctgccgcaacggatgtctccaccgctcaaagattgagactcaaattagcgcaaaatcagctggactttgaaaagccagacattcagcctatcgcctctcattccattgatgcactatgttcgtttgccgtcggttctgcagatgccgagcgagatcaagatggcttatccgcagtcctgcgaagtgattcacttgcaggcaaaaccacaggaagagaaatctcactttgacagcgtcgccatttttaaagaaggcatctatgctgaacagtttctgccgatttttacgctcaacgagaaaatatggattggctatgaaacactcaatgccaagggtgaacgttgtggtgccattgaagtttccggcaagcagcccaaggaattactcgagatgcttgccccattcttcaacaaaccagttggagatttatcagcgcatgccacttatcgaatcctgaaaaaaccggcctacgaattccttgccaaggctgctctgcagccgctgtcggcagaggaaaaacgcctagcagcgcttcttgatgctcttcgttactgcacttcacgtaagagcctcatgagcctctttatggctgcgaatgggaaatcgctcaaaaaacgagaagatgtgctcaagcccaaacttttccaacttaaggttgaactcaagggagaaaaagcattcaaacttaatggttcattgacgttgcccgtgaagcaagattggctccgtatatgtgattctcctgaattggtcgatgccttcggtaaaccttgtagtgcggatgaattgacctccaaacttgcacgaatttggaagcgccctgtgatgcgggatctcgcccacgcacctgtacgacgagaattcagcttgcccgccattgacaatccctccggaggcttccgtattcgccgcacaaacctgttcggcaatgagctttatcaagttcatgcaatcaatgccaaaaaatatcgcggttttgcatctgcaggcagcaatgttgattggtcaaaggggatcctttttaacgagcttcagcacgaaaatttaacagaatgcggcggacgatttattacttcaaccgacgtaacaccgatgtctgagtggagaaaagttgtggccgaagataacctcagcatatggatcgctccaggcaccgagggacgacgctatgtgcgtgttgaaacaacgtttatacaagctagccactggtttgaacaaagtgttgaaaattgggctatcacatctccgctgtcattgcccgcctctttcaaagtcgacaacccagctgaattccaaaaggctgttggaacagagctttctgaattactcggtcaacctcgtgacaagatattcattgaaagtatcgtcaatacaaaacgaattcgtttctggtacaccgtcaagaatagcaataagaagatgaacgaaagctacaacaacgcatctaaatcatgaggtatttaaccgtttcttcttttggtacggcactcggactttcaggagaacgacttgttgttcatgaagcggatggacgcacgtgggagacagctctttcaagactgcgcaccatccgcatcgagaaaaaaggtatcagtgtctccacgaatctgatgctcgcctgtgcagcgaggggcattcgaatgttcctcgttgattggcgtggcgtgggggtcgttgccttaagtggtctccatcaacatgctgtcgtcaacatacgcgaagcgcagtttcaggcaattcactcctctcaaggccgcatcatcgcagcagagatgatcgtcgccaagattcgcaatcagcgcactgtacttttatatttttggaagtacctcaataagagtgctccagagaaggcggaaaaactgagagaagctgccgacaccatagctaatattgtgacgaaaacaaaagcagaaattgaaaaccttcaaacttgggatgaagggatatggtcgactgttctgatgggttatgaaggtgcagctgcaacgctttattggcaagcacttcgcacagcagaattagtgcccgaaaccttcctcactcgagaaggtcgaggctccgtcgaaatcgtcaatgcggcactcaattacggctacgcgattctgcagagctacatctggtccgcgcttgataatgctggatttgaactttatgcagggttccttcaccgtcgacgtcctgggaaaccttctttagtactcgatgttatggaagagtatcgagcatgggttgtcgatcgaaacatcatcaaacttcggtcaatgcttaaaaattcaaagcgtggccttacacaggaaatcaaaagtgccattgtcaatgctatcgatgagacgatggcaaatgctgtgagttggcaaggcaaaagcgttcgccttgaaaatgctttgcagcgacaggcgtatcgtcttgccggtacagttgttaacggtaaacgttacaaaagcattcgctttagatggtaggaaacgctcgtcatgtcaatctacgcaaagtatctggtctgttatgacgtttcgagcaactcccgcagaaaaaagttctccgacgctctaaaggatcttggcctagtctcaatgcaaggttctgtattctacggcgacctcaagccagctgaagtgcgagctttagcaagaaaagctgcagaacttctagatccgaaggaagataaatgtttctggtttccctgtcgcttagaagtcaaagacattcaaaaatgcatcggctacgacgattggtcctttgctgaagtggatggccatggaacaatttaacctccccgtatcaatgctgcgtcaacactgcttttgtcctcgcattcctttctttcaacttatgcgcggcattcagcctgttggaccgatgtggttgcagcaaggactgaatcatcatgttcgagaagagatgctcgcaaaacgtcgaaaactgtctcgatttggtatttctccacagagttttcgatttttagaagatatcaagttatacaacgatagcttgggacttcacggtatctgtgacggcgctattttcacgaagaatgaagtgatccctcttgaatttaagttatcagaagtcagtccaccgatgggcgccagactgcagttagctgcttacgcaatgctacttgaatatcaggaaaagagaaaaatatcaagaggttttgtgctttatggtcagaaaggacataccctggaggtcatagtagacatcaaattacgagctgaagttcttacagtggcaaatctaataaaagaagcctgtaaaaaggctatcgtacctcatacagcggctacggaatcgcaatgcgcgcaatgtgagtatcaaaatttctgtgcagatcgattttaagaagtgaatgctcacttccaggtaagtaaatgaaaaccacatcctttggtctattcaaagaataaggttttatatcaaaatatccggatatctactactagatagtggccggattcaatcttagctttaggggatttcagctcacccgagggtgatttcctatagctcatagcgttatgatctctaattggtatcttatgatgtattttcgaaaattacaaggtttttttatcaatcagagtattttcgaagaatggtactcatcagatagcggaaaaaaccttgt

SEQ ID NO: 181 - DNA, 16758 bp, synthetic construct
  source 1..16758: mol_type = other DNA
  misc_feature 1..16758: note = Synthetic
attacgatttgggaaagttctaatgtatggttcttccgcttgatgggacatacccaaaagcaaaaggtaaacttacattattaagaatagctgatattgacagttctgagaaagtggcactttttaatcaagatccaaacaaattctctaagtacgaaaataatcaatacattatttgtaacagcggaccatctgagcctggagctataggtgtttggaattggactgcaagaccgaataataagaatccagaaaaagattatgtcgaagctaattatatcagaaagaatatttacaaaatcgttatagatagaaatattttagatataaaccaattggttttgaagttaaaaaaaggaattcaaatagattcttttgacacagatatttcaattatgtatgcgtttggagaagatgattcttacgttggtattttagtgcaaaaggataatttcgataatgagggaaaatgctttaaattaaaaggtgaagtatgtaagttgaagtattatagaataaaaatagaagatacatgtaaataccaagattctatatttaatcaggagtacgtttttctatcatccacaatattgccgaagtttgaagattttataattgtacaagaggcagaagactacataaaaaatttttttattgaacgtttatgttggaatgatatgaaaaaaaacgatttccataaaaaggattataaagattttaaatcttttttaatgggcatgcgaactgaagattttcgtaaaaaggtagctgaagaatatctgattcctcaggaagaagcagaagaaaagataaaatcttttatttttaattcagaaagttatttcaactacgaagatatagattctaaatacatagatgatcttgttatttctcatcccaaattacgccaaaaatgtattgaattagtttcagctcaaaaagaaagtgaaatagaagctttagataaagatatcgaagaaaaagaagccataaaagacaaacttgatcagaaaataaaagaattggaaaaaaataaaaatgagttagaacaaagtatagcaaaacaagaaacagaaataggtcttttcgaagaaaatgttaactcaaaaatctctgctgtacagaataatgtgtctgatttctatgctcagatatctttgatgcatccacttttgtcccaaatgttttctcagtcccaaaataaagtttcttatgttcaagggaaaactattgatgatgataaaatcattccatactcaaataaaagagatttactagataatatccgtgttgctttgtctgatgccggaattgatgacaaaaggctagatatggtgtctgccttccttttatcagcttgggaaaataggattcctgtacttctttctggaccaaatgcaaatgaagtagccgatgcaatgtctatagcaatacatggaaaatttgcagatagaataaagtgtctaggtaattattcagaaattacgtgcagaaaagctggtggaattgtagtcattaataatattttttatgctgattggttatctcatgttgatgaaataattaacaatgatgcaaattattattacgtaaccagtaattttgttgaagatcttttgattgaacctaagggaatttttaattatatggttcctcttcttacagatgtatttattagcaaaaaagcaaaaataccatctgaaggaggaaaaagaagtgctgattacgtcgatgatgtatcagaggaattaattgagagatgcagagtggatagagtattatccaaaataggtacaagtaaattatatatgaataacattagccaaataatggatcacattggctatgattttttgaaaaaggaagatttaaatcattattttgtgtatttgccgtatttattgcttactaatcatagagaatatctcatagataatttgaataataatcgtgataaagtttcttcagattgctatgaaacaattagaaattatttaggaattaacgaataaatagcatgaagttagatctgtttaaagaaattgcttcttctttgagaattgaaataggaaaaacagaatcgatgtcttcgtggcatactaggatagcttacagtgctgccggtaggattgctatgacatctttgtgggattctacagaggatgagaattccgatggaatttctattacacattttaagcataaagtaatacgtgaattaaaagcattctgcgaaatggaggaagaaataaaatttttctctgatcatgaggaagattttattaaagatattgctgatgagatttatagaatctatttgaatactggctatttttatcataaaaattatgtgatttatccagctcctgatcgttttaccacctatgaacaaattactcttgttagaggaagtgcattacaagagtcaattaatatgtctggactaggtttttataccttatcactgaacaataaaaataagtattttcaggtaggtagtatatgcgagatgtttaatatctcttctttaaatttagaacaaatatggcataagattattagtaggtacgaaccattaactcacatgtctttagataatatggaatacctttccctatctcctaattattcttgttattggagtagtgttcctgaaaaaataaataatatttcattattaagaaataaacagtgtgaaaatcgttgttattacttatgtaaaagctctagtgaatgtgttttatattgtaaactaccagattttttggttcagaatagagaatatttgcgaattgctaattgtttattgaatgagagtcaaaacttgccatcatcaaaatacaaagaggatggcgatattgtatatttatatatatgttatttatatcctccatcaatcttaaatttcatcaaattatatagttggccgtatatgaaaatttctaatgattttgaaagaatcgttaacaaagaaatttttgaattgattaaatcagtacttaaacccctaggatatagctttactaagataaaggagtaattcaaatgtcaaatggtgcaaatcaggttcatcaaaaattatgtgaagaattaataaattatatcaaatcgcaatattttgaaaaaacacctgtattactgtcagctataaaagacataattactgaaaaaggggtactgtataaacctccatatatagaatcttcaccagcatatatatcagtagaagatggtatttctaaatcaaatttgcctgattggttaaaaaatttcttcgcggagttgtcacaggctaaacttggggtttatccagcaccttttaaacatcagatacaggctttagagaattacttcgatggaaaagatctttttgtttcaaccggtactggttctggtaagacagagtgtttcatgtggccactgatcgctaagattgcaacggaagctagaaatactaaaacatggaatagtcaacaaggtgtaagagccgtaatcatgtatccaatgaatgcattggtttccgatcagatcagtagattgagaaaattattgggagatcctgataataaatttattactattttgagaaaaaactgtggtgcagatgttagacgtccaaagtttggcatgtatacgggaagaacaccatatccaggagaaaaaccagataaaaaacaggatcaggaattggctaataatcttaaaagtatggccagtgcttctacggattcggaaaaacaatatttgcaacaacttcaaaaagaaggaaaaattccagcaaagaaaaatttgcaaaaatttatagataaattgagtctgtcggaacacatacctgatgcagaagattctgaattaattacaaggtttgaaatgcaggaatgctgtcctgatattttaattactaactacacaatgttggaatatatgctcctcagaccaagagagcaaaaaatatgggaagacacaaaagagtggttaaggagtgattcttctaacaaattactatttataattgatgaagctcacatgtacaaaggggcgccaggtggagaaatagcacttttaataagaagatttttccataaattagggatagctagagatagggtacaatttattttaacaacagcgagtatgcctaattctagcgataaagataagcaaaaagttaaacgttttgcagaggattttacagcggcggaaaacaaagattcatttgttttcttgactggggaaagacagaagatagatggtgtacaaaagtttgatatttctttggattattttcttaagttttcttcagatcaatttgaaaatgaacataatagattagaggctttaaatggtttttggtcacatgtggaaaatggaccgaagcctttttttaatctagagcaagcctatgaatggatgtttaacaatcttgtatcgtatgtacctttttataaattaatttctatgtgtcgagggactgctgtagctcttgatgaattagctgatgctatttttataaaacaaccgcacagtcaggctcttcatgctgttagtataatgcttgcaattgcaccattagctaaggataagaatagttctgtgcttttcccggctagaatgcatatgttatttaagggattaaataatgtttatgcttgcactaatcctaattgtccacattcacatagcgagggtgggattacattaggtaaagtgttcttttctgatggtgttctaaaatgtccggaatgtaatagttctgtttatgaattgttccaggacagacagtgtggagctctatttttctcggggtatatttttgaagatgataaattgagagataatgagaaacaatatctttggagatacccaggattggtaaatcctcagcaaatgaggagaatcaatttgtatattccacctaaggattacatcccttcagatgaacttaaaagtattaaaccttgttacatggatgtcagaagtggatttattagtttttttgatgattctttgaatggtatatctggattcagaaaactttattattccacgaaaaaaccgacagatgactcccctgattttagtaaatgtcctcattgtttgagtaagttaaaatacaatcatttaacttcatttgctactaaaggcaaccaatcattttttaatcttataaaaactcaatttcagcttgaaccgcctattgagactaaagatccaaacaaatacccaaatcagggacgaaaagttcttattttttctgatagtaggcaacaggctgctaagctggcattaaatatgtctgaagcttcagaaataatggcagccaggcaattgtttgctctagccattaaagggatggaaaaatataacagatgttcaatggataaactctatccttttttttgcaaggtagcaatggataaaaatcttgaactattccagggtgataataaacagatatttttggatggctgtgaagaaatagaaagaaaaatatcacgtagaggagaggattatctaactcaattgtctttgaaagttcccgatacatataatgaatacttgttaagattgttttgtggaaccaataatctgtatacatgtgcatcatgttggatagagcctatttctgatgcaattgacgatatattgtatgatactgacatcgaatctaaagattgggtccttgaaatttttaatgccttattcttatctttgtttaaagatgaattagcactagactataaatcaaatgatataccattagaagtacgccaaaaaataagaattggtaataaatttggtttggatgaagattggaatttttcaaagaatattgaagatgcaatatgtgaaagttacgataatggaaagccgttcctagagaaaatcaaacaggcatttataaataatatttttgttaaaaaatttgatgcagacaaaacaacatactatatagatctagaaaaagttgtacctaggtatgatcaggatcatgtctggtataaatgcgaacgttgttcaaagataactccatttaaattgaaaaataaatgtccttgttgtggtttttctcaaatacatgagttaagagaagctgagaaagaagcacttaatttttggagaaaaccaattgaggatgctataaatggcagcaagattcacattatagatactgaagagcatacagctcagttatcatatagagatcagcgagatgaacttttgtcaaagacagaacagtatgaattacgcttccaggatcttctaaaagatgatgaaacaccagtcgatattttaagtagtacaactacaatggaagttggtattgatataggttctttggtagccgttggtttaaggaatattcctcctctccgagaaaattatcaacaaagagctggtagagctggtagaaggggcgttagtctgtcaactattgttactttttgtggcaacggacctcatgatacgttgtattttaataaccctgtacctatgttcagaggtgaaccgagaagtccgtggattgatatatcaaatgaaaaaataatccaaagacatctaaacatggttgcaatacaggaatatttacatcttgacaataatagtatagataaaatacccgtagcagaatttataaataatcatttaaaatcatttaataatttcttagaagaatttttatgctctaaagattcggtattattacctaaagatgcaaaattaaatactgaatcattttctaaaaagctaatggaacaattaactaggataaaaaacagtttgaggattcatcctgaattttacggaataaaagaagatggctcatatttaaaaaatgccaaaaatcttcttgattcgctctatgaagaaggtattattcctacatattcattcccaaaaaatgttgtaagtatgtacatttcagattctaatgggaaagtaaaatataagactgataggggactggatcttgctattagtgaatttgctcctggaaaatcattagttatagacaagaagaattacttggtaggtggattatattatccaaaaagtgaattaggaagttggaagtcaccagcaaagctatatttagacgatcagaattacgttaaagaaatccgtagatgtaatgattgtaaatggtttggattgaaaaaggattttgagactactaagaaatgtcctttctgtggagggggtaatttggtagatgctcctagacctttagtgaagccgtggggttttgcgccgaaaaacgcaacagaaataaatgaatcctacattaaggaatcgtattcttctactttaccacctttgtattctacattaccaacatctgatgaaatgaatcttgtgaataacgctagaaatattagaatggctctaagaccaagccaaagtattattatgataaatagcaatggtgataatggtttttgtatttgctctgactgcggggcggctgcacctaataaaagatataacagtgatgaggttttgagtgattttgaaagaccttataaaaccaagaaccaaaattttataaagccttgccttcataaaaatgtaaaaaaaattgatttaggtttcgactttattacagatatgcttgttatggagttcagacttgatgatgcgttaaacatcgaatatgattccaaaaatctatggttaaacagggcagcgcagtcgtttgcagaaactttgcgattagtggcttgtcaagagttggatgttgacttttctgaacttgttacagggtatcgtattagaagaaattcgaatgggactttcgtggatgtatatttgtacgatagtttatccagtggcgccggatatgctgtaaatatacaagataacatgagtgaaattttaaataaaatagaactgtatttaaataagtgtgattgcgagagtgcttgttttaagtgtttgaaacattatagaaatcaatatgttcatagtcatttagatcgttttgctgcactagattttctctattggggaagagacggaaaaataacagaaaaattagatttaaaggaccaagtagaacttataaaaacgttggagaatatcctgaatatttcagattatcacgtggttgtacaggaatcgtgtattgctattagccacaatggtaacaatgttcaattggttatttatccttccatgagaaaagcgccagaaggacatgaatgcatatacataaacgaagacatcataaaatacgcaaaaccatttgctataaaagcgatagttgattattttaagtctttataaaaagataattcaacaatgaatgttgtctagtaatctttttgattgctgatgaatgactaaagaatgatgacaaataaaaaagacaacatttagattgtcttttttgtttaggtgatatgaatatttggttttttttgtagcgtactagatagttttattgttaaattacgaataataattgcattcatttataaataatcatacagtaagaagattcattgattatataaataactatccaacaatctgttttcgttctgtttaattagttaacttcgagtttagaaaaaactttaggagtaatgaacatgatagataaattttccagtcaaactatcaaagaactagaatattacgtttatgtgtattcagatccagatactatgaaacctttttatgtgggtaagggaaaaggtaatagggtttttcaacatctgtgggatgactctgaaagtgaaaaggttcaaaaaatcaaagaaatcacggctagaaaaaaagagcccttaattgaaattcttgctcatggtcttgatgaagaaacagctcttaaggtcgaagctgctgtcatcgatttaataggcattaataatctcactaatcaaaaacgtggttatgaatatggtacatatggaaagattgaagtttcagcacttgaagccaggtattcaggtgaagaattatcacctgacgatattaagcataacttaatgctaatcagaataaatagagtttacagaaacgacatgaccccctatgaattatatgaaggaacaagaggttactggaaactcagtttagatagtgcggagaaagttgattacgtattatccgtttacgacggaatggtgatggaggtttataaacctgtgcagtggtttgaaggattatcaacttttaccaataaagatgacgataaaagtacgtggactcagcaaaggtatgagtttgtggggcgaatagcagatcctaaggtaagaaagaagtatgtcggaaaatcagttgcagaatttttccagaaaggtgatcaaaatccgataaggtatatttgggggaaatagccaacatgtccgtaactaatatttatatcttaacttttcatatgtagaacgatcgaaaaagttgaccacctaaacgaattaaagttgaccacctgcaaacaagaaaaaaagacaacggagtggtcatgaaaaaagccaaaaatcgtaaaatgccggaatatctcgtatggaaaaaacgatattacaagatgtttgattcaatatttggtgattcattcaacctttaatgtatattcagtcaaatctcatttttgaattctgaagaaggcatagctttgctgcgccatatttttatgagagatggtctggagatgacgggactataactgaattcaaaacgtttttaaaataaatatgttccgggatgactgctgacagaaaactgttcaaaaccaagataataagaattgtgaagataatttaattgcacatctctgaggttgtgtatggattgttttgattattcaaaatcagacgaattatacatatttttcaataaatacaggagtataatatagatgaatattattttaatgtttataagattaagatgataagatttacataagttatgtttatgataaataatcattcacaaactgagaaaatataaatttcaataatggtcggttcacattgggagggtatcaacagtgagcaatacatattactctaatatagcaatagacatgggtggcaaatatacaggctttatttcatacacgtctaatgatttaccagactccgagaatgtaaaagccgctattattgaaatgcctgatgacggaagcgtgattaattacactgtgaaaaacagaacggcagtaagacatcatttaagagctaacaacaggtataagaaagccagaaaattaatttttaccatactggctgatactattaagagaaatttgactcagagtgagcaggaagcaatttcatcactaatgctgaggagaggctacaccagacttgaaacggaaattgacttggagcagttaaaagaatgtcccgtagatctgttctttcaatgctgtccaggcctgtttaccggtgatgtacctttgtatgatcagtttattaataactgcaatgatgacacagtatacgtatacagagaatccttgtcttcaataaaagaaaccgtatctaatttgagtgataaaacagaaaaaagcatgtatggctctgcattgaaaacaatggtggattttgttgataaattcattgatcagaaagaattcggacataaacacaggactgagtaccttgcaaacatcagaaaggatatccagaaagacagtagattaaatgatttgataaaactgatttcaggtgaggacagattatacaactgcataggtaatatatcgaatcttcagttgcgagccctgcgctggtatttcaatgataggggcatgagcggaaaagccgtatttgataaaaaacgctttaaggatgtatggtacagagcgtataaatattttcattacacagctggcagtaatcagaaagacaatgcagaaaaagtcgatattatcaagaaaaaaaatgaatttcttaaaaggattgaacagaccgaaaatataacggatttactgcttgctcaggatcctgtatttaccatccctccttatgaagatcagaataacagacgtccgccagttgatcagacactgctgttatcaccacagtcactggatgcccattatccgggaaaatgggaattatgggtacagaagtttatggattacggttctggttcatactcctcgctttcagatgaattggaacagatagtaaaactgactgacagaagcagtcgtctgcagtcagcggggggaaaacaatctgaccatattgcatcatatacagagcagaaactgattcacagttattatttgcaaagacttttggatataacgtacaacaggggtaatcctgaatcacaaataagaaaatgggcccaaaatcctaactcatgttcagcaaccaatgccgtaataaaaaatattctgggagagagtgatattgattccttttttgaactggccaataactattacagggaagtgtctttatctaaaaaagggttatggtccattgtagaacatccattacttgaaatttccggtatacatcctcctatgaaaagcaaaatgctggaagaactggttgcaggtgttttaaacataagaaaaggatttaatttagaaagattcaaagaagtatggaactcaactgtaaaaggtaaaagtacagttagatcattatgttcatacatagaaaaaacacgcaaaaaatatggtaactgttttaaacaggagtataaaaatgtctgccggtatgaagaactaaaaaacaaagccagtgaggtgcatttcagttctgatataaagattgataaggaagtggtaaaagtctatgaatacactaaaaacctatctaaatttataggggaaaaattagagttaagtacagatcagcaaagtaaatttgccaatcctttctctttggctcagctttatacgattttagaaaccgatgtacatggtttttccggtaattgcaaggcagtatgtctggagaatacatgtcgcatgcagatgtctgataaaggaaatgcactctgctgcagacttcctgcggaatcaaccagaccttttgacggttcattgggtaatatacttgacagacaggcatatgaaattgcaaaaattaaaattgcagaaattaaagaactttctgcattaaaaaatacaaaggtgaaactcagtgtattggtagaagagaattcttttgaattcagctcctcactttcgacaatcaaaaaatcattaaaagctaaacagttgagagaatttgctttgaaagcagaaaaaactgaaagggaaaaatggaaatcaaaagatgaaagattaaaaaatgattcccataatatatgcgcatatacaggtatggcattgagcgatgatctgagtgaaaatgatcatattgtaagtcgaagtgaaacaaaagaatcctacgggactatttataattccgaatttaatcttatcagagtttcccgaaggggaaatcagctgaaaggtaacaatatttatacacttgacaacctgaatccaaaatatcttgaagccgtttttggaacaagtgatactgcaataattacaacaagaatcagggaaactctaaacagactactaatatcaaatcctaatttaaacattgacataatgactgaagaagaacgtcaatgctgtcggcatgcattgtttacttccagaacaggagttccattcaatcagataattcaggctatatcaaaacaatatagagctcgtgtaaacggaactcaggcctggtttgtgaagaatcttattgcaaagatagatgagggattaagggaatggaaaagtatcaataatataaccgtggaatacaatgcttacaaaatagatgcaggttccacgagtgaaataagacatgacataggaaaactggatgcaagatatgagaagaaggatattcaacctataacatctcatgcaatagatgcagtatgcttattgggaaatgcctcaacacaacaggaaatatctgaagaaatatccggaaataatgaaatttctgtactgtcagatgtaaaggaactgattaaactgatacctgacagatttgatattattcgaatctccagtttgaattttgcagagaagaataatcctgaatcaaagcagttatttaaagatacaatttatgctgagcacttcctatgcattatggaaaaagatgataccgttaaagtcggattcgattttggcagcaattccatccaaatagttaagggggggaaacagctgttaagctgtttagcaaactatctcgagtccccaaaacaaaatgaaactaccggattccgtacatataaagtatgcaagacagctgcgtttaagctttttgaaagattttatagaggactggttgctgaaggatctgatgaggaactggcatatttggcactaatgagtttgcgttacaccacattgcaccaggatgtgttttcccttctgtatgacgtaaagtccaagaaatttgccgcaaagaaagacattcttaaaaatttggatataaaaatttcttttccttcagttcttaaacttaaaactgataaagcatcactggtattaccttcatttaatgaatgggcgcatattgcttctatttttgaagattatttaggtaaaaaagatgagcaggaaagtggatatgacaaattaaagcagtatcttggaacaattttaaataaaaccattaacaagaatcacgctaagagtaagagagtgtacagtcttcctgttgtcgcttctccttcaggaggtgttagaatcaaacgtttaacgcacacgcacggggatatatatcagcttgttgcggcaaatactcctgtcacttcaataagtaaaggttttgcatctgcagacaatggagatgtattgtgggatgaagctgtgatggttgatagttatacaaccaagaatttaacggttattaataaaaaaatatcaggggataaaaattttgtatccatggacgaacagagacttgtttatgaatctcctgatgaaagagtgtatatgaccccggcaacagacataagacgaggaataacaattgagcagaaatttgaaaagtttgtttactgcatagaccagcagaatatctataagtcatttcatgatttaccgacagaaataaaaacagatccaaaaatttttatggaaagacttaacatagatatatgcggtaaaccaagaggtaatttaaaaatattaagtataggaaatattataaaatattcatatatggtagagagcagtaatagagtaatgaatcaggtatataacaacccaatagacaaaggaacaatttttaagagcaactaaacaagctgttcccaagataagtttcagaatctatggctctaatgatttttcgggaaatgggggttgcccttacttcccggaattatcatgttgttcagaggtagtctttatgcgacatatagtaatcaatcagtatggaacttttttgggacttgtaagtgaaagactggttgttaaacaaaaagatgaaattgtagaggaattgccactttccagaatcagaacaatcagtattgccaaaaagggtatttctctgtctgtagatcttattcatgcctgtgctatacgtggaattcgtatcttttttctggactggaacaacagaattgtttcagctgttatggggcaaaatcagcatgccgttgtatcactgagaaaagctcagtttgatgcgataaaaaatgataatttatcgtgtgaactgtccaaaaaagtaataataacaaagataaaaaatcagcatgcggtaataatgtattttacaaagaacacaataaagaattcacaaaatagtccaattattaacaactataacaatctcattgataatcttaaaaaaattatacttaatacttctcctgatgctcatgatatttccaactggagaaacagacttatgggtttagaaggaaaagccgccactgaatactggcatacacttgtaaaactccgtctgttaccaggtgatttcactaatagagaaactagattcactgagtcagtaaccaataaagctttaaattatggatatgcaattttattgagtaaaatctgggcggctgtagataattctggaatggaagcgtatgccggtattttgcataccgacagaccggggaaaccttctcttgttcttgatcttatggaagaatacagagcctggctggttgacagaataatcatcaagctcagaaatcaaatatcagaatacatgaatttggatatgaatctcaaaaaaattatcagtaatgaaatacataaatctttgatgacaaaatatacttttaataaaaagagaataaagttagaaaatatcattcaacgacagatttacaggtttgcgggggcattggtcggtcagaaaaaatataaaggttattctttcaaatggtaaagcattatgaatctttattcaaaatatcttgtttgttacgacatagaaaataataaaacacgtactaaattttttgaaaaaatgaaggattttggattgcaacccattcaaaagtctgttttttatggatttcttaatcaagctgagtttaactctgtaagaaaattagcgtttgaattattagctgcaagtaatgataaatgtattttcatgaaatgtaatatatcaccggaagaatttaaacaacaatttattggttacgataattttatttttttggaacctgatggttatgaaacaatatgatattcctgtatctatgctccgccagtactgtttttgtccaagaatagtttatttttatttggttagacagcttactccttcagaaaaattatggatgaaacaaggtgttgatgagcacaataggcagataatgctgaataacagaaggaatttatccagataccatatttgtgctgataattggaaaatcagaaacaatattgagctatacagtaaaaatttatctattcacggaatatgtgattgcataattgaaacatcagacgaaattatagtcgttgaattcaaaagtaatgaacatttaatgtgttctgccggtgtcaaaatacaactgtgtgcttatgtaatgtgttgtgaggaaaaatataatatttctattaatagggggtttatattatatggacgtaaaggtcagacatatgaaatatgtattgatgaaaagcttaggattaaaacaattgaagtggtaggcaaaattaaaaaaattattgacacagaaattctccccgactctacagccgaggcaaaaaaatgttgtcagtgcgagttttttaacttttgcgctgacagatactgaagataccaagatgtaaattacagttgcttggtctatatcttaacttttggtgatttcagctcgccataaagacgacttcatatgtagatactttttatagtatattacttttttctcataaatcaactttttttatgcataattgaattatgagaaaaattaagaatatttttctctacttaggtactgatttttaacgattcctaagtagagtatcaattataagctgtatctacatataactgaaactgctgtctgccgtgctgtgtttctttactgttattgtatcaattataagctgtatctacatataactgaaacagtcttatccaatgatatccaatgatatccaatgatagtatcaattataagctgtatctacatataactgaaacttcaacgcttgaaaaattaaattcaatcaaacgtagtatcaattataagctgtatctacatataactgaaacc

SEQ ID NO: 182 - DNA, 24473 bp, synthetic construct
  source 1..24473: mol_type = other DNA
  misc_feature 1..24473: note = Synthetic
ataaaaaataaggaaaggaaatgttgaaaatgactgggcttgcaaaagcctacataacttctgatattaaaacacaggcgcttcagccatttgatttagctatagggcagggagagtttgtttcagttatcggtccttctggttcgggtaaaaccacttttttaaatattgctgggctactcgaaaatcatagcgaaggtctgtatgagctcgatgggcaagatgtttctaagatgtctgataagcaaaaatcggcttatagaaatgaaaaaatcggctttgtttttcagagttttaatctgatccctgaacttaatttatacgacaatattgatatgcctctgcgctatcgaaaattcaatacaaaagagcgtgatgagcgcatcatgaaagcgttagagcaagttggccttgctggtcgtaaaaatcattatccaacacaattatcgggtggtcagcagcagcgtgttgctattgcccgggcgattgcaggttcaccaagagttatctttgccgatgagcctacaggtaatttagactcaaaaatggcgcaaggcattatgacattgctgcaagacattaatgcgtcaggcacgacgattattatggtgacccatgataatgagcaggcacaacttgcacagcgaattgtgcaaataaaagatggtgtgctaagtgaagaatcgtctattttgactcaagctatcgcttaaggagtcatgatgttttcgtattatgtgaaattagcgatgattagccttaagcgaacaccattacttagttttttaatggtaatgcttattgctatgggcattggtgcaacaatgacgacctacaccgtcaactatatgatgagccaagaccccaaaccttcaaaaagtgacaacttatattccgtgcaaatagatagtagaggtgatggcgtagattacagttacctagatactatccctccagaaatgacctatcaggatgcaatgaacatcctcaaatctgatattcccaaatatcaagctgtgattagtgcaatccgtactaccgtaaaaaatccagccaagtatgacactgcagtaacaagagaagtacgcacaaccagtgctgatttttttccaatgcttgaagtgccatttttatatggcagaggctgggatgaaactgcagatagcaacgcagagcaagttgttgtattaactaaacaagcgaatatgcgcttttttgatggagaaaactcaattggccaatcactacagttaggcgaggatttatatcaagtagtgggcgtgcttgatgattggttaatagttcctaaattctatggccaaaataatgctatgtactcacaacctttcgatattttcatgccatttagtacacaagttagcaaagaaatttttactacctcactcattaatatttcttgttggaagcctgctgaagatgaaagtacagctgcttttctcgcatcggaatgtacttggatcaaaatttgggctgagctagaaaatgatgaaaaaaagcagcaattccaactgtttttagataactatgcgcaacagcagcaagcacaagggcgctttgctaaccgcattttgaataaacttgtatctgttaaacaatatcttagcgaagaaaagattgtccctgaagatagcaaaatagcagtgtggcttgccgcactctttttaattgtttgcttacttaactgcatggggctgatgatggcgaaattccatggtaaagccggagaagctggattacgccgtgctgtcggagcaagtaggcagcatttaattgcacaattttcagtggaactagcggttgtaggctttattggtggtgtattcggtctgctgttggcgcaacttggcttagttgctatgacgaatttatacagtcacttacatagttcgctgatgcaaatgaatgccttaatagtgattgctaccttggctttggctgttgtgatcagttgcgtttttggtttgataccgattctaaaagccagccgtgttcaactttcaagccaactgaaaagtttataggagttaagcatgaaagatttagccccgataattaaagctttatttaaagagaaattagtaccttttcttcttattttgcaaatatcagtcacttttatggtaatggtgaatgctgcaaatatgatcagtgaacgtgaaaagttgatgtccagacccacaggtgttgatgaagagaacgcattttatgttttgacgaatttgcagggaccctcagagaagtttgtagcaaacttgagtcatgacttggctagtttacgcgcaattgagggggttcaagtggtttctcctttaaacggtgtacctctaggattgtggggtaattatgtttcagtatatcgaaacttggatgatgaatacccaatagataatgctggttattatggttctgatgaacatattgttgagaacttaggccttaatttaattgctggagaaaacctagccttaagtgatacaactgtgagcatgactggtaatcataatatctcttcaagtatattaattaccaaagcctttgcagagttagtgagccccgatgattggcgtcaagccgttggacagaccatatatacaactaacacacctcaacgcattaaaggaatagtagaggccatgcaaggtgcttggccacggtggtatggtgtaaacggttcaattatttatcccgttatcgaagtagataatacaattcgttattttgtaagggcagagcctggacagctcgagaatgtaatggaagaagtcaataaagtacttctaaacacacccggacgcgtcattgaaaaaatgcagacgatggaagaggtgaggttaagggcgtataaagatgataatgcgagtagcaaactacttatatcagtctgtgttggattattatttgcgacgagcctaggcatttacggccaagcgcgcttttcagtaaatcgccgtaaaagacagataggcacacgcagagcattaggtgcaagcaaagggcaggtaatgcggttctttatgcttgaaaacgctgtggtcagccttacagggcttgttattggttttattgcagcattatcactgagcgaacaatttgctcaacactttggtttaacacctgtaccgctgccgtatttattatcaggtatggcagcattgtttgtgttaggtcagctatcagtaagttaccctgcactgcaagcgtcaagagttgagcctgctatcgcaacgcgaagcgcttaaacactttagcttaattgaaaaagccagatcatatttttactaggtaaaattttgatctggcttttttgtgtctgaacaatattttcgtgattttttataccaatcctcttaatgaagcgatttattttggggcaaggaaaacttgtcgattgcaccgctcacgcgtcctgctatcgcctaggtaaatacgtccatgtaggcaaggcaaaaattttgctatttagttgttctaaataagaaatttttaacgaagctagtgttagttttagtccctcaaaatgattgagtattatttaggattagtattttctatcaattgcttaatctctttgactaaggcaatactggcttcattatcgccgtgcacacacaaggtatctgcttttagtgccaacgcgcttccagagcccgttctgactgtgccttgagttaataactgctttacttgcgctaataacgcaggcttgtcatgcaccgcattaggctcagctctaggggttaaacgcccttcgttggtatataagcgatccgcaaaagcttcaaataacaatggtaggttatatttttcagccatggccaagtgtgaagcttgctcattggttgctaatagcattagttttagtggctttgaatagctactcactgcctgcatgaccgtctctaaaataccattatctgccatcatatcgttatatagtgcaccatgtggttttacataactaattgataaacagtgtacttgtgccatgccatctagcgcagcaatttgatagtgcaaacaatttactaactcatcatgactgagcttcatcgaacgtcgaccaaagccttgcttgtcgggatagcttggatgagctccaatttgcacgttatgttgtttagcaagcgttagggtttgtgccatcacatcagggtcgccggcgtgaaagccacaagcaatatttgctaaatcaattacttgcatggcatggctatctaaccccatttgccatgcgccaaagctttcgcctaaatcgcaatttaataacatgttttcctcctttaaatactgacaggaagttggccttctggcttgtctaagcccaaaatcactttagcgagcgcagtaaacgcaggaccagagatcacatttttactaactacatcaatattgtaggcgtaactggccaaaactgcttgtgcgtaaggcgcataactcggtatctcataaggggcgcgcaggctaataaatagcgttggcttttcagcaagctttgcctgcttaagcagcgctaatagtgcttttggctgttcgcttcgtttgagcttaaaactgtcaagggcctttacatcatccatgccaccaatctcaactgcactttgttgtgggctggcatgggcagctatgatcaggtctgagttagtaatattttgatctgcttgctttggatcgaatccttgtaaactgctacaggtgatgcgtaactcttgcttacttaaagagagtaaggcttgctcaagagcatgacatttttgtgtatcaggcatgactaaatgaattcgtttgtgtttagcttgaataggcaatagaccttggtttttcacttgagtgatggccgcaacagcgagttcactttcaagttgtcggtgactagggttacctaatgtcgctttagcaatggcggcagagcggggcgctgggcttgctaaaaattggtgtttgagtgaaatgatacgctgtgccgattgtgctatttcagttttatctagctcacctagagcaactgccgcattcagtgcactcattagttcatcaagcttttttatatcgtcaggggtacgaatggcaatcggcatcagagctatatcaaccccggctttaaaggtttcaatcactgcggatgttggggtaaagaaatggctgatccccgccatatcaagtgcatctgtgactgttacgccttggtagttgagcttttctcgtagcaagtcatgcataattttacgcgacaatgtagccggtttaaccatgacctcaccttgcttattcacaaaggtgctgttatcgagtgcagggtattgaatatgcgccgtcataatcatacccggcgcgtgcttatcaataatgtacttaaaaggtgccagctcaacctgttcaatgcgttttaaatcgtgtttaacaagcggcaagccagtgtggctatcgaccgaggtatcaccgtgacccggaaaatgcttaagcgctgaaacgacgttttgcgcttcaaatgcttcaacttgtgcagcgcccatgtttgctacttcaagtgagttctctgagaaagagcgaacgttgatcaccggattacccgcgttgttattcacatcaacggtcggcgcaaagtttacgttaatgccaaggctatttagctctttaccaatggcggtggcaactgcacttgcgtagtgagtaccgtatttatgataggtggctcctatgctcatattacccgtgaaagaagtcgcctcagcacggttgattcgagctacacggccaccttcttggtcaatcgatataaacaagggttgtggatgtttagcttgctgagcagccgtttgtaagtcattggtgagctttacgatttgcgcagtatctggcacgttttcagcgaataagatcacgccaccaatgtggtgtttagcaatcaaatctgcaagtgctttaggcaactcggtcataccttgtctacaggcttttgactcgccgctttcgcagtaataacgaaaatctagcatcaatttttgaccaatttgtgcttctaaaggtagttcagaggcatgattgaactttttcgctgcactgctggcactgattgtcatggcgatcaccatcccgatattttttaaaaattgcgtcacaggctacctaaattatctggccttaaactgaatgggctaatttagcatttgcagcactgaattaataacctacgtcgataaaaacatgacacttgtcatatcgatcagtgacaaaactcactgaaaccctttgaagcctttagtcatactaaacccatcaaagttaatctcgcactgaggaattggttatggaaagcatcatatgggcagttttaggtatggcatatagtttaatcgcattcgcattaagcacttataaatacaatcgcggtaagccgtttaatggtaaatcaagaaacaccgaggtgaactatgactaattcagcagtagtttcagttaaaaacttacaccatagctatggtaacaaagccgtgcttaagggcttagatttctcgctacaagcgggccgagtttacgggtttttaggtgccaatggcgctggtaaaacaacgttaattaacttgttactcggccgtttaaaagcgtcacaaggcagaattgaagtactgagtagtacagcgggttctgctgctgcgaaggccaaagtaggcgctatgctacaaataggcagtttacctgcgaatttaaccgtacttgagcaattaaacttattcgcaagctactatgagtctcctatgcctgtctcaaaagcactgcgtttgagtgacttaaatgcccatgaaaatacaccatttagcaaattatcaggtggcttgaagcaacgtttgctgtttgccattgccattattggcgacccacaactggtatttttagatgagcctagcttggcaatggacgtaaatgcccgtcaacaaatgtggcaaaccattcgacaattaaaaacacagggtaaaacggtggttttaaccacgcactatatggaagaagctgaagccctaagcgatgagttattcattttaaatgagggaaagattatcgcacagggctcgccaagtgagttaagtcacaatatgcagttaagtgaagtgagctttgcttgcgaactaaatgagtctgaactctcgactttattacctgagtggtcgtggcaagtgaatgagggtaaggccgcaacccgctgtaaatcaccaaacacactgttaaagcaagcatttgcaaatgggcttagctgcgacttactcagtgttaaaccttcatcgttagagcaaacctttatttcactgacagaaaccgctgaacacgaaaataaaacaccgacaaattcagcatcagacaaatcagccaaggagcaagcagcatgagtagcataagtttatatagtctcaaacaagaagcgtggtgcgattctaaaagtgtatttagaaacttaggctttgtgatcccgaccttagcgtttccatgtgccttttacttgttttttggtgtcgctatgggagatgaaaaaaccagtagctatttgctaataaactacattatttttggggtgatgggccccgctttattcaattttggggtcaatgtcgcaaccgatagagagcaaggcttattggcgttgaaacagctatcgcctatgcctgctagtcaatacttaatgggtaaaacttttactgctttattgttttcgacgctgatatttattcttctttctagttttgccgtgttattcgcaggcgtgagtatgtcgctacttaagtggggtcaggtctatgcgttagcgctgttaggcacattaccattttgcatgcttggcttagtgatgggcttaagtttttcagccaaatcggcccccgcgcttgtaaatttgatttacttacccatttcgatgctgtcaggtttatggctaccaattactatgtttcctgaagcactacagtggttcgcatggatattgccaagctatcatttatctcagttaggtctgagcattttagagatgcaccaaggctttaatttagtgtggcatttattaggcgttgcattatttacattgccgtgtggatatctagcaacaaaaaagtacaactccatgaaataaaatcatattgtaacgcccctttacagagaggggctttacctctgggcttcattcctttactcttaacctgttgttaattatttcttaaaaaacatgaagtttagttttcagattttccagttcgattgtgaacacaaaatccttacccgccacggaaaggttattaagctaaaagacagagctgcgaatatgctcaagttctttattttgaataacgatagaattctgtctaaagcagagctattagaaacggtttggcctgacaaaaccgtgtctgaacaagtcgtctttcagaacatcagccacttgcgtgccatttttggtaacgatgccattaaaaccttttcaaaaagaggctatcagtggcaattagagcttaccgaagtcacagagcaagctgaagaagtaactgcggccccagcgtcacaagcggctactagcacagcacctgttgtagaggaaagcaaggctgagagtgagtcaaaaaataatgaaagctcagacagtcctcagaaaaatgatgcgccagcttctgaaagttcatcagagcagcctgcaaaagagagcaagtcgacagcttggctcggcattttaggtgctgcggctttagttgtggcaacagcgatttggatggctgttaagtcttaatttactatcctcatagttttaataaagcgatgccaaacatcgctttattgccttctttttctataaaaatcataatctttaaaatttttttgaactttcttgtacccttctcagtcaatagcataactactctatcaaggaagcttaatcatgaaattatcaaccgtatttgctgctagcgtattaattagtagctctctttttagtcagtttagttatgccgaagggcgtagtattgaatatggaaagataaatcagctccgagatttagcgactaataaagtaaaatcaaaatatctcaccccactttttaagctgcaaataagtaaccaagacatcaaaatagacgatataaagctttggcttgaacaagaagaaaaagtcattgcgaaagctacttttgatgaagagggcaatatcaatttgcctatcttgtctcaggctgatgccgaaaagaccttactacactcgaactatagcaaagacgatgttgggttcattctcaataccagtttaaagcctttagaaagtaaagagctcaaatactcagacgtatttattttgcttgatgacatcaataattttacagaacacatggctggcggattctctatgttcgttccgagtatggacgaaattaaattcacctttgatgcccctgcaagcattactgtaaaagacagcaaagataaaactaaaacatacaaaacagacgatgagtttgtgattgaaattccaaaaaagaaacgctggatgcaaagcgacacttggctgcaatttagtgctttaccgactagatacgagccgattaattaactttaatattttctgaacactatattcaatccgaaacttatacccttgtaggtcgtcgtttacggcgacaatacatttggtgttatttttcaggcctaagctataagttgcaattttacatcttataattgaccttctcatagaagcaaaccctgtaggcgcgattttacatcgcgcaatttaccccgcgcaaagtagctcaaacactcaagtattactttactaaaaaccgtaaagcccctttacaaactaacactgtaatctgctgtaatgtgttcagatcaacaattaaacgcctttttattgttacaaagcaactgcttgggtaaggtaaacaaaaacgaatttaaaatcgagcagtgaaaaaattggatttacagctcaataataaggaatagtttaatgaagtggctttatcctatcgcgctagatcttggcgcaaaaaataccggcgtgtttaatttaagttatgcagcgggtactaaacttgaaagctttattaacgctaatcaagttacaaaaaacgcctttgtagcccaagtgccagagactaagcagggcggttatcaatttctacaaactaatagaacagccacgcggcattcaattcgttgtcgtaaacgcagaaagcaagcgaagaagttatttttatttctacttgagcgtgtttatcgttttcaaacacaaggtcatacagaagcaattaatcattttctaaatcgtcgtggttataattatcatgagtctcaaatagattttgaaacactagaacagttcgagcaagaagactggattgcattacaaacttttttgattgagcaaaatgcgtcatcagtgcttgagcaattagacttctcagaagtggcagagagcttattacagttacaagcttttgagttagaggaattacaacagcacttagagtgcatagaaaagccaaagaaaaactctcctgctgctgcacttttaaaagtgacgaaagagttaaagcaagaaaaaattaaagagcaaacttcgggagctaagcatcgtcgggattattttgacgcggtgcgccatgatattgaagaaatggcgaagagcaaagataagcaattcaaaaaactttataacgcgctaaagcacgcaaaaggttttaaacaaggtgagtttgttaatgtattttggcagctgctttgccatgtgaacaactttgacttaaagctgctcaatcgtattcataaagccctgaatgactcaactacttcagaacaagttgatgccacacttgccaaatatgtaagtcattgggtattaaagctttggcaaggctctgatgcaaacacggcagaaagaaagcagtttaagcaaacccttaaaagccacataaaaacaaatcctaaccaaatattgcagtttttattgcaaaccagccctgagcataccattgcgccatacgagtcacacagcaaccgaaaaccgccttattgccaaacgttgatactcaatgctcaaaccttaaataatcaatatcctgcatggcaaaattggcttcagttgcttgcaaatggttgcgagcaaactcagcaagcggttgagcaatatcaaactaagttacgctgtaagaccagcaaagaaggcaatattctagtagagatagaaaaacaaaatggtttgctcgaattgcaggctcgaacattgcagtttgtatttgatgccagtgttaaaacatgcccttataaacttagtgaaatttggggcaagttaaaacaaattaatcaattaaagcgaaacagcaaagagacaaagaaggtacaagcaagccttacaaatttgttagcacaaagccagttacctgatactttaaaacttgcatgtaatagcaaccctgaggagggcagtttttggcatctaataaacaaatactatcaggctcgacgaagaactaaacaaggtcgctattttattcatcgcgataactcacaaaactctgagttgaataaatggcaaagcagagatcagctctttcagatttgccaacataaacctaaacagctaaagcaccaagctttgaccgatgtattgcaattgttagggctagaacaaaacaagtttcaggtacttaatggtagcaatgaagctgtattgttagaacagctagcaacagaaattaagggttctgcgaaaggcattgttggagtggcgaaaaatgcacataaagcgcaaaaagattatggtatagatctaaaagcagccattgcgacagaatcaaaacttcaatcattggctgataaagcaaaagtgctaacacaaaaattagctgagcacttttttacaaacaaaatacagcaagattattttttcgaacgtaataagagcttgtttacattcgcgcagttacatagtttattgtttaatgttgagcgcagtggcttcgcgaaaacttgccctgtttgcagtgcagacaatgcagcaagaatgcaaatgaatcaaggcgtagcgcaggcttctcgtttatcaaccatgagtttgcgtttgattgatggtggtttaaaacgattgttaaaccaccaagcccaccatattgttaatcgtttatggcccgaattagaacatcatttaaaacaaggccacaaagtcgatatacctttgattttagaacaaaaccgttttgattttagtgcccatttacacgcgttaaaagggcaaggcaaaaataaacagcagcgaccgcctgaagacgaaagatactttgagcaaaaacaaacccgtatttttgatgctggcaaacagctttgcccatacacaggtgatgcacttagtttaaatcaggctgatatagatcatattattccccgttcaggtgcatacggtgtgttaaatgacgaagcaaatctaattgcagcaagcactgtagggaatcgcaaggtaaaacaagatcgtattttacattttgaagatttaagcaaagcgtacttacaagcgcagtttgacactgcaaatgttgagcagatcaaagcgcatctatatacaacgctttgggatgcaaataaaaaacagtttgtgtttgagcagtacaaacaattcattgcactcacagagatacaacaaacagcatttagacatacattgtttttagaaaacacagacgaactaaagcaagcagtaattagcgctatacagcatagtagtaaaagcagagtaaacggcactcagcgttttatggcacagttactggcagatatattctggcaaaaagccaaggtgatacagtgtgaaaacctattacattttgactactttgaatactcagctaacagtcaagacgaactctctacaaccagcttgcgccgtactttaacgcaaaccttcgctaatacagagtgggatttaactccgtttaacaagcaaaaaggccatagccaagtgccatatagccatgtaatagatgccatgtgtgcaatggcattggctgtagagcaacatcaaggcgaaggggcgttagccgttgatgtaggtgacacttcagtatggcctaaaatagataaacaaacgggagaataccaagctagtaattttaatatgctagctataaaggctgaacaactcgcacctgaggtcagtgttaaaccaacaagtctagcgactaaaattaagcagcaaggtttaaccagcaaacctcatacggtcatctcccgccgtatttttggtgaaaatgccttaggtatcagattctatgacctagcaattgataataatcaagtggttaaaggctattatcacgagcaaaacggccaccaagagtttgtgcgcgctacaactaaggtggtcgataaaaccacggctatgttggaatggttaacaacgaaccagtattaccagctaaaacaaaaacaagcggttgaattttatgtacctaatcttcaggctattttgagtttgatgtttagagtgttaagtgctgctaaacaaactaaatttgataaaaagtcagatgaatataaagcagtaaaatggttatttggtaaaggtgatggtcagctgttttactatactaataaagcagcacttcaagctgccccaagcattattgataagctaaaaagtagcaatcctctgatgaaaaaatggcagcacttttatgctggctggcaagccatttgtggtgggagtgccaaagtcaatcaaggccaatttgtcatcgaagctgaacagctaaatcagtggcaaaattattgccaagcatttctaggtcaatcagttgagcgtaataaacatagcccagtacgtaattacactatgtttaatgaaaccgttgcaagaggcaatgttgcactgcaattcaagcgagataaatttacgctatatccattcaataataatgatgtgcccaaagcgcagagcatgcatattatgcttaattcaccaaatttagtcgcttttgaaagctcagttttaactaaagggtacgtggttgagcttgaagaaaagaccaactacaaaggcacgcatattaaggtcaaaaccctaatcgatgaaaataaggcagatgcattaaagctaaacttagagcagctaagtataaaagtgcctagtaatacgcaaattaacattagtggagtgtgtaagacttggtttgaacaaaacttgttactaaagcgagctgttgaagctgatgcttggaagaaaagaacgagcctaggttttgataagtacgacgacgaaaagtgtgcagtaattactgacacgctcaaaagtgtacttaaaacagctattcgagcagaaagaaacaaaagcttaaaactgctacacacagaagcagcactgactataggcctacctgttaaagcagaacatatagctaagttactagccaaacaaaatagtgagggctaaaaacacaaaaagcgccgaaaggcgctttttgtgactcaaggtgtgcgatacagagcttgatccataattgactgtaaagtgattccagctttacagctgatttgttgcaagacctaaattacataaatcaatgagttaacgcaagtaaaaatttcaacaaggaggcaggatgcaacacgttgtaattcaagagcatggtcgttcgttggggattacctctgagcgcttagtgataagagaaggagacaaccctgaaaagcatatcccactgagaaaaataaataccctatctattcaaaaaaatggtgtgagtgtgtcgtcaaatttgcttagtgcctgtgcgcggcttcatagcctatcgcaacaaatcagctactgaaacatgcgcttaatggtcggataagcaaagtagttggtaagcttcatagcctatcgcaacaaatcagctactgaaacctctgattgatacaagatgaccaccaaagaaaagggcttcatagcctatcgcaacaaatcagctactgaaacaccagaaactcggtcattattagtccttatcggtgcttcatagcctatcgcaacaaatcagctactgaaacggccatcttttagcactttgactttgaacttcaagcttcatagcctatcgcaacaaatcagctactgaaaccgcctttagaatttttcagctaaagcatggcactgcttcatagcctatcgcaacaaatcagctactgaaacattgaacagttcatgagtcaaacctaggccccctgcttcatagcctatcttaacggttaaaacatggaaagggcctttataccctcttttaaaaggcaaaaaaataaccgcgtggggcgcggttatttgaggttgtgcatgaaagcacttgctttatctaattaaaagtctagtaaagcgtgtgggtttgtcaaattgggtacgctttaattaaatactgaatatcaatattgtcgtttagtcatttaaaaagcgtactttaactttaagcccatgtttctcggttcaccaacaaagtagcgatgattgccaaaggcaaaatcggcacgctctgcgtagcgctcgtcagtgaggttcatcactgaaaatgacgcgcttaactgtggattgatctgccaatctgctcgcaggttataaattttatggcctgcatagctttgtgtattggcagcatctaaaaagtagtcgtctatttgctggcgttctaactgagccataatagttcgtgtaacttgccaattgatctgcaggttaagtaataatttgggcgcggtatctatgtcgttgcctttgatttgcgcaccattagtagggttatttaaataagtgtgctcgctatagctaaaggccagctttgtactgatggtacgcgttacttggcgattaagtgcaaactcaatgccctggtgttcggtatcgaggccatttaaatattggcggtcggcgtcttggtaaatgccgtcttttttctttaaatgataaactgagagctcagcaaatagatctttatctacatatcgaacaccaacttcggtttgtctggctttgacactttttacatcgctggtgagctgaccgttctgaaggcggtataattcgctggtatggggggctctaaagcttcgatcatgtttggcgaatagtcgtgtttgtttatcaattttataactgtagccaagtgcataactgatatcgtcaaattgattactttgacttgcagggcgagtataacgacaccccccgaagccacaggctgtgccatcgtcttttaaattacctgtgcttaaattgttttgataatcgtagtcggtgttatcgtaacgcagtgcggcaaaggcattgtgttcgtctgtgattttggcgtcgagctgagcgtaagtggcaaaacttagcgcatcaacgtcataatcatagtgctttcctttcggtaatacgccacgtaaaaacgcagagtttgattcggtgtcgttagcttggttttgttttaaaaagccgcgagagatgtcgatgtcagagccaagcgttaaactgaacatatcagacagttgacttgcccgacgtacttgtaaacctatactcgaatggccgttttcttcgacaggcgtgcccggtaaaaagtgcattaaaaagtccatgtcggtatggcgtaaatatggattaacctgccagaccgcatttggcgtatttaaggtgttaaacatggcgtagcgcatcgacaaactgtttcgatatgcatctggaaagtcattaatgcgaagtaataatttatcttgataggcgttttcgccacgctgcaaatagcccgctgtatcttgctctaaattggtcagcgtcactctgtgggtagtttgccaatcacctaaactgtgcgaagccgccaatgagagtttttgttgttcgtagcccgaactatcttgaaagccgccatcggaggtaagtgttaagcccattaaagtatcgagcgcttctgtttgctggctgtaaaggccatttacacggtaaaagctatcttcacctaattctacgctcaccataggcattgcatataaacttggactaaacacattgatagtgccatgaatggcatttgagccgtagcgagatgaattcgcgcctttcaccacttcgatgttatctgcaagctcaaagtgggtgtcgaataattggtttacattacaaaagcctggcgcgcgcaagctaataccattttcaagcgttaaaaactcagcacacgagcctgcgccggttaaaacaggtgaacgcactgataacaatgattcttgtccgttaccacgacttaaccaagtgctagatgcttggcttagcaattggtttaaatgctctgcgttactttgctcaatgctttgtttggtaattttattggtgttaccaatcaagtctaaatgctgggtttgtgtgcggttggcggtggtgactagggtttcgatgtctttatcattggcgtttgataaggcctgaaaactgatgctcacgcaacttaaaagagccaaagacaaaatagaaaatttaaacgtttctcgcacagacatgttcctttatcgcaacttgacggtattttaccaatcctcaataatacttgaatcattttgagggattaaaactaacgctagcgtcgttaaaaatttcttatttagaataactaaacagcaaaattttcgcctagctatcgatacgttttccttgcctcaaaataaatcacttaattaagagtattggtattacaaaagtgcctcattatactgaataaattcaaaacacgatctaccgttgagcaaaattatgtatcaaaaagtgtttaaaaccacgctgttaagtgcagcttgtatgttgagcatggcctcacatgctaataaccagaacgttgaacagctatttaaaacaacctgtgcgtcgtgccacggtcaagagttaactggtggcatggctggttctttaattgataaccagtggatgacagaaggcactgatactgcgctggcgaatgccattaaaaacggtattgtttcggcaggtatgcctgcatttggcgcgacgttaaatgaagaacaaattcgtactctggttgtatacattcgtgaagcaggtgcaagagcaaagcaagcgaaacagcctgaatcgcaaatgggcaagtcgtttaatacgtattatcacaaggtgacaaccaaagaagtgaccaacactgatggcatcatctgggcgatggattttttacctgacggcagtttgctttataccttgcgcgaaggtgagctttggcacatgaccaaaggcggtaaaaaaacgcatattaagggcacgcctagagtatggcataaacgtcaaggtgggctgttagatgtgtatcctgatccagattacaaaaacaatggctggatttatttgtcgtatagtaaagacgcaggtaaaaacagccaaggccaagaggtggcgtttacagccattgtgcgcggaataattaaaaatggtgagtgggaaaagcagcaaaccttatttgaagccaaaccagaaaatcatcaaaatcacggttggcactttggctctcgttttgccattaaaggcgattacttattctttaccaatggtgacgaagggctacaagatggcgcgcaagacatcaccacgcaaaacggtaaagtacaccgcattttcaaagatggtcgcgtgccaaaagataacccgttttataacgaaaaaggtgcgcaacaaactatttggacctacggcaaccgtaacccgcaaggcttaacgttacaccctaaaactggagccctgtggtctacagagcacgggccgcgtggtggtgacgaattaaacctgatcactaagggcactaactatggctggccaaaagtgacgtatggtatgaactataatggtacgcctatcacgccacatactgatttacccggcatgcagctacctgtgcaccaatggacgccttctattgccgttgcaggtatgaatttttatacgggcaacaagtttaaacattggcagggcgacttatttgtcggcagtttggctaagaagcaactgcaccgattgcgaattgaaaacggcaaagtcacagaagatgaaatcatcttaaaaggcctaggtcgtattcgcgatgtcgtgactgcaccgaatggtgagatttatttaaccattaatgaccgtaatgcgaatcaaagtaagatcattgcaatcgcgcctaaataagtcttcataagacgcgaaataaattcgctgctaccgttgttttactcggtagtacctgctttacgtaggattaaaccttcacaaagaagacgcgaaatgaattcgctgctaccgttgttttactcggtagcaccgactttacgtcgggtaaaagccttaacacgaacatcaccgtaaagcacctttacatactctttgattcagattcaaacctcacgacatcatctttaactccttgctgtgatttaaaacattgaacatacagcaatttcggtcaagtaaatcgtttgatgtatgattaagcttgtctgcagttttactaacacataggcgctttatgcaaagcaatcttttacagcaacgcatttcgctggtttgcgattacatcaatcaacacttagatgatgaattaacggtgagtttgcttagtgatgttgctgctttatctaaatttcattttcatcgcgtatttatggcttttatgggcgtaaatgtgggcaagtatattttgctggcgcgattaaagcgggcatcttttcgcttagcgtttgagagcgatattaaaattattgatattgcacttgaagcaaagtttgacagtgcagaagcgttttctcgcgcctttaagcgtacgtttgagcaaagcccttcaaaatttagacaagttgcaaattggcctagttggtatgacgtatttgatttttcaccgcaaccaatagagaaacaaatcatgcaagtagacattatcaactttgagcaaattaacatcgcgtttttagaacataaaggcgcagcaaatcgcattttcgaaacagctgggcaattcattgcttggcgacaaaatagtgggctttcaccactcaatacgagtcgcacatttggcatgccaaatggcgacccagaagccatggctgaagacgcatttcgctttaaattatgtggctctataaaggccgaagtacctgataacgcgtttggtgttgaaaatggggttattcctcaaatgcgctgcgctaaagtcaggcacttaggcagtcacgataacatggagcaaacgatacgttggctttaccagcagtggcttcctcaaagtggtgagctaccgagcgaccaatgctgttttttcgaatatcataattttgtgcatcaagtcgatgaatgtgacctcatcactgatatctatttgccacttcaaagttgatgagtaataagtttgctttgccgagtcgattactttgggttattggtatgatgaacaataatttaaatttgtgttttttatcccaaacaatgattaatagagtgaatttttgtctgatttttgttctattagtcattgttataaaaaaaatttaattaaattcgaataaacccaaatggttaataatgaaatcttacatcactcaccttgaattcatgcaaaaaactatattttccaagataattagttaggttttcttatttttattaagtttttatattttcttattcaatattctgtatttctttagttgctgattatctaagttgcgttgcttttttgtcaatgttgaagctgcaatctatttaccaataaatttatttttacatttgttttaacttagtataacaaatattgattcacataataaaactcaaattgacagcgctgtcattcgggcttagagtggcggttatcaacttgattctgtttagttgatactaattttctgttattttataaggaactataaatgaaaatacgtaattttgctgttgtggctttttcgttggtgacaagtacatatagttttgcaaactcgcaaaatatattcgatattgatggttatgatcgttatacagagtatgctcaaggtcctgtgtcagcatcagttattgcaagcgactatgcgcattatatggatgtgtatctacaccctagcgcaactgcaaatgcatgttactctgctgaagttaaaactgaaaatacaggggagtttatagcttcagcgaatataagaacggttgatcaacatggccgcattcaccaagcttattcgactatacctgatgagtacttatcagttaataaaaaattagtagttacttgtgatgatgatgcaggtgatgagtataaaatacacgtaaaaattcctagcgcccctaaaattcactgggatgttaccgttgaactaactgagagcagtgagtatatccagcctagtcgttcttttggttatcatagtgaatataaagtgagtagttcacttcgcgtggaaaaccaaacaacagactctttctgtcaaacaacatcgcaatatagccctgctttgggtttatttaacggtgaggtaggagctgataagtttaattcaaatgtattcttaagcaacaagattgtgaacaatcttgtaaaccctaaaccagtattaatgcagtcgatagagtgtcagaactcggcaggtaaaactgttgcaagaaaagtatatgatttaactaataaagatgcgattgagttgctttatgatgaagtcgaatataagtaacttttactaaaaatctggcccattgcttaattattaaaatgatgggctaatttaaattcatatttttaattaaagttttttattgttgactttaaatttaattttatattttttgtttttgtttttgtttttgtttttgtttttgtttttgtttttgtttttgtttttgtttttgttctattttatttttgagtttttattttcttatttattttttaaaaataaatgaattgttttcgtaattatttaaaggagtgggtgtggttattgaatagaataagtggtgagaaaaaatcattttaattgcttgttgagcatgttttttaaattataaaatttattgagactttgcgattttaggaaaagactcataaaatagcatgattaattataattagagctaatcaagtatgttagttcccgttgttatagctggtggctcaggtacccgcttatggcccctgtctcgtactcactacccaaagcaatttctctctttgacaggcgagcagtctttgttacaacaaactttgctgcgattaaaaggcctagatcatgatcccgcgattattatttgtaacgaagcgcacaggtttttaaccgcagagcaagtgcgattaactgagataccgcattttcctattattttagagccagaggggcgcaatacagcgcccgcgattgcattggctgcatttaaagtattagagataaatcctgatgcaactctgttagtgatgcctgccgatcatgatattggcaatgttgaacagtttttaaatgcgataacactggcggcagagagcaccaaaaaaaacaagttagtcacctttggtatcgaacctacctctgcgcatactggctatggttatattcaaaaaggtcaaagcttggaaaggggctttacagcaaaacaatttgttgaaaagcccgatgaagtaaccgcaatgcgttatttagagtcaggccagtttgtatggaatagcggcatttacatgtttaaagctcaagtatatttagacatgctaaagcgttttaatcatgacatatttcgagcctgctttaacgccatgcaaaaccagcaatatgatttagattttacgcgtgtagatgcctcagcctttctagcttgcccaagtgattcaatagattatgcgatcatggagcctttaacagcacaacaagatgatgctgtggtgatggtccccatggcagccaaatggagcgatgtagggagttttgatacgctttggcagttacttgataaagatgataaacaaaatgcgatttgtggtgatgtgatcgcaatcgacactcaagatagcttgctgctgagtgaaaataagttgttagccacggttggtttaaaggatgtggtggtagtacaaaccaaagacgcagtgttaattgctgataagaataatactcaagcgataaaacaagccgttgctcagctagagcaaatatctcgtgtagaaatccatcagcatcgtgaagtctatcgcccttggggtaagtttgatgccattgacgaaggcgaacgctttttggtgaagcggatcacagtaaatccaggtgcacgtttatcaatgcaaatgcatcaccacagagcggagcattgggtggtggtaagtggcatcgctaaagtcacaatagataaaaaagttcagtatgtgaccgaaaaccagtctgtgtatatacctattacaactgttcatagccttgaaaacccaggtaaaatcgctttagagctgatagaagttcagtcgggtagctttttagatgagagtgatatcgtgcgctttgatgatgagtacggcagagctgatttgcaacaaggtaactttgatgaccacactgagtgacttactacaagaaagttcgattaaatttggtaccagtggggcacgagggttagtcgaagactttacaccaaatatctgtgctgcttttgctatggcatttgtgcaacatggcgttgcgagtttgcagctcgtgcagcaagccacaccggtgctcattggtatagataatcgccccagtagttacgaaatagcacaagctgttgccacaggtttagccgagataggcgtttcttatcagtttcatggggtgctgcctacacctgctttagcctttacagctatgcagttaaaacagctctgtattatggtgactggcagtcacattccttttgaacgaaatggcctgaagttttattaccctcatggagaaataggtaagcaggatgaagagggaattttacgtcaagagattgaactgcctaattcgctagttcttattcagttaacagagcaaaatattgcaactgaggcttatatctcacgctatttagacttctattctgatcttaacctaggtggcaaaaacattggggtttattcccactcaagtgctggcagagacatttatatcagcatattaaaacagttagacgccaatgtgattgagttaggccgaactgaacattttgtgcctattgacaccgaagctgtgagtaccgaggaccaagcgttagcaagggagtgggtcaaggttcatcagttggatgccattatatccagtgatggagatggcgatagacctttaattgcagacgaaaaggggaattggctacgtggagatatcttaggcctattagtgagtcaaaaactaaacatagaagccctaagcatacctgtgaattgtaattcggcggttgaattgagtgg

SEQ ID NO: 183 - DNA, 10419 bp, synthetic construct
  source 1..10419: mol_type = other DNA
  misc_feature 1..10419: note = Synthetic
agcgacagaagttaatagctagagtagatagatacttagacttaaaaaatattatcagatattttccaaatttagttggtacgtgaaaacggactgacaccctaatttgcttggtaaccatagcgttttggacccacctgaccccatgccgaactcagtagtgaaacgaaacagcgccgatgatagtgtagcatttgctatgtgaaagtaggacattgccaggctccaaataaaagaaacccgttgcagcgatgtgacgggttttttgctatctgggatttaataaatagccaagtgctcatgccaagctcagtattcaaacaaaacagctcgaaggcgagccccgacgcagtgataatgtcccatttgctatgtgactctctaccgctgtgggcactacgacattgccaggcttcaaatacaagaaagcccgactcgtaagagccgggcttttttacgtctgcagaaaagtgaaatgcggacaattaatgcacactcatctacttctagaatgtaggtcgggcgagcgtagcgactcccgacacaatgataatgtcccattttctatatgactctctaccgctgtaggcaccacgacatcgccaggctccaaatacaagaaagcccgactcgaaagaggcgagcttttttacgtccgcagaaaagtaaaaatactttccagattttattcgcacagtctccaccacctccgtagcgtgggttgagtatcacgaaacccgcggcaaaagcccactacagaactcacactctttgtactaaagccttcaatttcagttttaatagctgtttagcatgctaaatccgctattgaaaagtgctcttttatcccaagctatagttatagagcatctacacacttatttatggcgagtttttatgttaaataaacaaaggcatatttacacaaaagagcagattcgctcttatgagggagaggcggctaagcaatgtggaatagatttatttactttaatgcagcgagcgggagaggcagtatacaagcagtggcagtcttttaacgctaagcttactttgattattgtaggtaatggcaataatgcgggtgatgcttacatagccgcgtgtttaattaaggactctggtgcagaggttaaagtttgcgctatagatcctgtaaaaacactcagtggtgacgctgctaaagcaaagcagttatggcttgatactggtggcatagttaacgagtttgcaaagagtgatttagattactgtgactgtgtgattgatgggttactaggtactgggcttaattcacctgttcgcgaaaattattgtgagattattaccgccatcaaccaaagcgaaaagcctgttttaagtattgatgttccctcagggattgatgcaaatacaggtgaagtattaggtgcagctattcaggcaacaaaaacggttacttttattgcaactaaacaaggcctttctacagggacaggtaaacagcatgccggtgagttgattctcgatgaattagcaattgaagatacttttagtcaactcgcttcaccttgtgctcacttgataaatatagatagctttaaacgcttgggctctcgggctgtaaatagccataagggcaatcatggcaagttattatgcgtagggggcaaccaaggtactgcgggtgcaatccggctcagtagtgaagctgcgctacgagcaggcgcggggatggtgaaggtttatacgcaccaaagctctattatgccaataagcataggtagggcagaattaatggtcatgagtgaaaaccttgaacaggctttagagtgggcaagttgtgtagtacttggccctggacttgggcaggatgaatgggctaaaaaaacgttttgcactgtaatgcactattgccaagagcacaatacgccgcttgtacttgatgctgatgcacttaatttattagctgaaaatgcaagtgcttatacattggctcaatgtatccttactccgcaccctggtgaggcggctcggctcattagcaaaaacacctctgaaatagagtcaaataggtttggaagcgtgcgactatgcgcaaaacggtataatgctacttgcatattaaaaggcgctggctctttaattgataacggtaaaaacacttgggtgtgtgaaaatggcaacgcagcacttgccgttggagggagtggcgacgtacttacaggtattattggtgcattgcttgctcaagggcttagtatcgatgaagcagcgcgatacggggtaactcttcatgctagagcaggtgaggttgcggctgaagagcaagggcagcgtggcatgctaccctcggatttatttcaaatagtcaggtcgttaatcaactaagtatttagctctgttgaataagatcccatttgttaccatagagatcttcaaatacggccaccgtaccgtaaggctcattacgaggctgctcatgaaatactacgccattttctagcatgctttcgtagtcgcgccaacagttgtcagtgtttaaaaatagccatacacggccacctgcttgattgccaacagcgttaaactgctcaggctctgtggcttgtgcaagtaatatatgtgtgccgtttgagttgggtggggttattaacacccagcgttttccatcacctaaatccgtatcttccactaattcaaagcttaatttttttgtataaaatgcgattgcttcgtcatagtcttttacaacaagagcaatactacctatatgctgctttggcataacttaaaaacctagagttgttttatgtttgtgtattttcacatatcaatacagggatgaatagtataggtaaatgtttattaaagcttattttgagggggttgtacgttatacattggcttcgcatatagggttagtagtaaaaaggttcactctattttaaaccttagagcatgcttaaagcgtccttaaagagtgttttaatttacgtagctaaactggcttactcatcttcattagtagggtcgtcacctgagtcttcttttcgtttacgctgctcttgcttggccttttgaacattttcataagtagggggtggaataggcataagtgaaattagtggaaaaaatgctaaaaataaatacgcccctttagacatgctcttaccccatataacgagcttaagcataatccaagcaataaataccactaaccctgttataagtgaaaccaaaataaagaagatgattatttcattattattaagcaaatccttttaccttcaatccaataactcatggtatagatttggagataaattaagcaataacaataggcttgtactaaaaagcaaaaacccagccgaagctgggtttttatataagcaaggtgcttaaaggaggatgattacatcatgccgcccacctacttgcttttaaaggctttgagagataattcttaatttataccccaaaatctacccccgattgtaggaggtactatggtttggtatataaaaccaattctaagccatgaagtaaagtatgatcttagcataattcagaaagaatagaggagatgttcttttcattcatgagtatatatttaagtgtaaggcatgttttaaattaattgaaagcttagcgttaataaaggctgtctggagatgtagttttataatttgagtttgaaaggctcttcagaggtgctaatcgtgacatattcagtgtcaaccatgacacactccgtgccaactatgacgcgttgcgtgccaaccatgtcgcgttgcgtgtcaaccatgacgagttacgtgtcatccatgacacgcaagtattttgattttttagtttttttatttaaaaacctaatgagtttattctctacattacttttatttataattttataattatttataatcgttatattaatttataacatatttgatgcggactgtaatatttaaaagcggcattaactcacactttaagaacttagttttgctgtagttgaaaattaaatcctgtgtcgggctgagatttgttatttaaagggccaattgactctcctatagcctgtggataataagtagaagaattcacatataaatcaacgctatcataaaagcttctctgactttatagttaagtagtaatgcttttaatcaattatccgctataaatattagtaatcatttggtaatttaaagtatttataaacaaaaataactctatcttacaggaagtaaatatggactggttatatcctatagccctcgaccttggtgcaaaaaacacgggagtgtttaatcttagttatgcagcaaatacaaaactagcagattttgataaaaagaataaagttttgaaaaaagcttttgttgcacaagttccaaatataatgaatggtggttaccaatttcttcaaataaacagaacagccacccgccatgctatccgctgtcgcaaacgaaagaagcaagccaaaaaacttttcttatttttactcgagcatgtacataactttaaaacacaaggccatcaagaagctattaatcattttttaaatcgccgtggctataattatcatgaatcagaaattgactttacggctgttaaacaggtagagcaagagcactggatcgcattacaagcttttttgattgaggctaacgcttcacctgtatttgatcagctaaacttctcagagatcgaagagagtttattacaattacgagttttcgagcttgaagagttgcaacaacatttagagagtattgataataaaaagaaaaactctcctcaagctttacttctaaaagttgttaaagacttaaaaaatgaaaaagcgcaggtaacgggagcaaaacatcgccgagattactttaaagctattcatcacgacatcgagcatatgtctaaaagtgaagacaaaaaatttaaaaggctctttaatgcgttaacccatgcaaaaggttataaacagggtgagtttatcagagtgttttggtcgctactttgccatgtaaataattttgatttgaaactacttaatcgtattcataaatctttagatgataaattaacctatgaccagattgatgcgatacttaaccaacatattagccactgggtattaaagctctggcaaggaacagatgcaaacactccagaaaggaaaaaatttaagcaaactctgaaagcttacacccaagcgaatcccaaaaaaatattacagtttctactgcaaaccaatcctgagcatacaattgcgccatacgaatcgcatactaaccgtaagccgccttattgccaaaccctattactcaataccgaaacattaacatcacagtacccagagtggcaaaaatggttagtacagctttctagctcttgtgagaaaatgcagcaggcgcttagcaattatcaaacaagattacgtagcaaaattagtaaagaagggaatgtgcttgttgagtcagaaaagcaaaatggtgtattagaattgcaagctagaagcttgcaattcgtttttgatacaagtgctaagcagtgcccctataaattaagtgagatctggggcaagttaaagcagatcaatcagttaaaaagaaaggggaaaagtacagataaagcagaggcaaaccttgcaagtttattagagaagagctggctaccaagtaatttaaaagtagagtgtaccagccagcctgagcaaagcgaattttggcacttgataaatctatactatcagacccgccgacgtactaagcagggccgctactttattcaccgagacaataaacaaaattcggagctgaataaatggcaaaaaaatcgtaagttattgcaagtttgtcagcacaaacctaagcaattaaagcaccaagcgcttggtgatgtattgcaattacttggtttagagcaagagcaactatttacaatcagtacgaatgatgaagcaatatcgttagagaaacttgctgaacagataaaaagcgcagccaaagggattataacactagcaaaagatgcgcataaagcacaaaaagattacggaatagacctacaagcagctatagtcagtgagccgaagttgcaaaagttagccagtaaagctcaagaggtaactcaaaagcttgcagtatatttcttccaagatacatctcaacaaaactatttttttaatcgcaataaaagcttgttcacatatgcgcaattacatagtctattgtttaatatcgaacgcagtggctttggtaaaacttgtcctctatgcagcgctgataatgcagctaggatgcagattagtaatggatttgcgcaagcatctaggttatccacaatgagcctgcgattgatagatgggggcttaaagcgtttgttaaatcatcaggctcatcatattgcaaattatctatggcctgagcttgagggtattttaaaacaaggtcatagagtttcattaccgttagtattagagcaaaaccgctttgactttagtgctaacttgcatgctttaaagggtcaaggaaaaaataagcagcaacgactgccagaagacgagaagtacttcactcaaaagcaagagcgtatatttaatgctggcaagcaactttgtccatatacaggggaggtaatcaatttctccaaatcagatatagaccatattattcctcgttcaggtgtattcggcgtacttaatgatgaagctaatctaatagcatccagcgttactggtaaccgtaaagttaaacaaaatcggctactatctctgaaagatttaagtaaagagtatctgcaagcgcattttaatacgaccgatccagagctaattaaagcgcatctatatgcaactctttgggatagcaataaagccaagtttgtttttggccaataccgtcaattcatagcactaacgccagttcagcaggtagcatttaggcacgcattatttttagacgagtttgatgagttaaagcaaggcgtaataagtgctatacagcatggcagtaaaagccgtgtaaatgggacgcaacgttttatggcccagttattagcagatgctttttggcagaaggccagaataatacaatgcgaaaaccagttaaacttcgattactttgaatattcagccaatagccaagatgaactctctacaaccagtttacgccgtgtactcacgcaggcattagttaaaacagactgggacttaacacccttttgtaagaacaaaggtcaaagtcaacggccatatagccatgttatcgacgctatgtgtgcaatggcattagccgttgagcagcatcaaggagagggtgccttgagtatcgacgtcggtgatagctcaatttggcctaaggtagatgcgcaaacaggcgaatataaagccagtaattttacatctttggctataaaggctgagcaactgcaacctgagctaattgtaaaacctacaagtttagcgaataaaattgtaaaaaatggccctatcagtaaaccacatacagtaatttcccgtcgaatttttggcgaaaatgcattaggcatacgtttttacgatttggcagtcgataacagcaacgttgttaaaggttattacaaaagtgaaatcgaagcaggtgaatttgttcgtgctacagcaaaagtggctgataagaatgttgaaatattacagtggttaaccacgcatgcttattaccaattgaaattaaaacaaggaataaaattttacactccaaactcatacgcaattttaagcctcatgttctcggtattaatgacggcaaaaaaatcaaatttagataaaaattctcaagaatataaagctgtaaagtggttgtttgggaaaggtgatgggcaattattttattataccagcaaggcccctttgcaagcggcaccgaatattgtagaaaggcttaaaagtaataacccccttatgcaaaagtggctgcacttttataatggttggcaagctatttgtggtggaagtgccaaagttaatttaggccaatttgtcatagaatctgggcaactaaatcaatggaaaaattactgccaagcatttttaggtcaaacagaaaagttcaataagcatagtccagtgcgtcactacactatgtttaatgagacaacagccagaggcaatgtagcgctacaatttaaacaaggtaaatttacgcattaccccgttaataacaacgaagtccctaagtcacaaagtatgcatatattacttaactcaccaaccttagtcgcatttgaaagctcagtattaactaaaggttatctagtggagttagaagaaaaagtgagttttaaagatgcgcaaattaatgtgaaaactttaataaatgaaaaaaaagcaaaagtattaagtctaaacattgacctgttaaacattaaagtactaagtaatacgcaaataaacatcgagggagtttctaagcaatggtttgaaaaaaaccttttattaaaacgagcaatagaagctgaagcatggaaaaaaagatcgagcctgaatttcgataaatatgatactgaaaagtgtgtgatagtgacagatacattaaaaagtatacttaatacggctatccgagcagaaagaaataaaaccgttaaagtgcaacatatagacgaaacagtttctttaggcttgccagttaaagctgaacatatagctaaactagtagctaagcaaaatttagaagaagcaaagtcacaaaaagcgccataaggcgctttttgtgactcaaggtgtgtaatacagagcttgagccataattgactgtaaagtgattccagctttacagctgatttgttgcacttaataagttacataaagtatgcaactagtgcaagtaaaactttaacaaggaggtagaatgcagcacgttgtcattcaagaacatggtcgttcgttggggtaacctctgaacgcttggtaattagagaaggtgataatccagaaagacatatccctctgagaaaaataaatactttgtccattcaaaaaagtggtgtaagtgtctcttcaaatttactgagtgcttgtgctaggtatggaataaaggtctttataggcgacagagcgcaagagctttgttgtttacatggtaatgcgcaacatgcagtggttcaaaatagactaaatcaattaacttttttacaacaaagcgaacagtgctaccggctggctcgtgcgatcatttatggcaaaatccgtaatcaaagagctacgttactctactttcacaaacaaaaatgcacaccagagaaaaagcaggctgcaagctactgtagtgagcagctcgcaactttagccgaaaaggttcgacatttaccttatcactgtcaatggcaaagccaagtaatggggcttgaaggtcaagcagccgcacaatattgggctttgttaaccaaacaccagttgttgggacaagagtttgtgtcacgaaagggaagaggcgcacaagatcctgctaatcaagcactcaattatggttatggtattttggctagcgtgatatggaatgcgctcactaatgcaggattagaagtctacatgggcgcgctccatgctatacggcccggaaaacccgctctggtacttgatttaatggaggagtatcgaccttgggtggtagatagagctgttattaaattacgctcagagttacagggctcagaacttaaagcaaaaacccgtaaaaagctgacagctaatatccttaatacacttgaaaatcctattccctatagggggaaaaaagtgcgtttagaaagtgtaatgcaacgacaatgttatcgattatgtggattatttgccgacgatcaaaaatatcgaccactattattcagatggtgatacttatgcttaaaacaaaaactaccgaagttatcattgcttatgatattaccaacaataaagcacgcactcgtttatataatcagctgaaagacgtaggtatggtatcagtacagaaatctgtcatgtgggggcgtttattacccgcagatatagccttagccaagcggatcttgaagcatgagcttgacaaaagtacagacaaagccttcatcctagtaagtaaattgtccgaaaatgctaacttctatggatatccaatggattttgcggagtatgatcagcatgccatattttgatgggttaataccaattagctatttacgacaatatagcttctgcgctcgtataccttggtataaaactattatgcagtttgagccacctgaacaagcttgggtaaagcaaggtaagcagtggcattgaacgcctaatttgtatgaaaaagttaaaactgctccttcatagcctatcgcaacaaatcagctactgaaacaatatacagtaccgacatcaatacaaaatataaaccttcatagcctatcgcaacaaatcagctattg

SEQ ID NO: 184 - DNA, 13175 bp, synthetic construct
  source 1..13175: mol_type = other DNA
  misc_feature 1..13175: note = Synthetic
aaaaaagtcgggcaggacgttgggcgccgtgcccctgtttctcctgtattgcagaaatattttaccggcaagaaacagtgcctcccggggaatttcaagaaccttggcgcctatgtgtccaattgctgattcagtctcctcgattttgttaaagccgatcgagacttcggtgtaaacgattgcattgatgtacagggtgttggtccggctgtactgctcgagggtgttttccgaccagtggcgccacttcggatcattggtaaagagatcgagcagcacgcacgagtcgatgagcacaccgttcatggggaccctgcacaatggccattctggccaacctcatttttctctctggtaagacccaatatttcatcggtgctcatgttcgcggtggcgatcccacgcagtctggcaaatttctttttgggcttgtcaggtgaggtctttacaatgtagaatttaccgttttcttcttgaaaatctacatctgtttcaggagtgattcctaaaatctcgcgtacatcttttggtatggtaacctgtcctttcatggtgactcgcatcacgtatcctcctttagagacggtaatacaagtatagtattacttggttttcgccgcaacccccttttcacacacttttcaccgtctgttcatacctgcttcacgaacggctgctatctcttgtccataatctcttgtcgaacaattcaacccacaaggaggggagtatggatgcggtaaaactgttgtggacgatatgcgcggtggtagtgattacggcgggccccggcctggccaatgcggatcagcaaaccctttccccctactttttcgtagcgggcgatgaaccgtcggcggagcagtttcccctgaaagacaccaaggtggaggtgaccatcagcggggtgattgccgacgtgaaggtgacccagtactacgaaaataacggagcggcacccatcaacggcagctacatctttcccggttccacccgggcggcggtgcacggcatgaagatgcgcatcggcgagcggctgataaccgcaaaaatcaaggagaaggaggcggccagacagattttcgaagccgccaagaaggcgggcaaaagcgcttcgctgctggcccagaaacggcccaacgtcttttccatggaggtggcgaacatcatgcccggcgacaaccttaccgtggaactgcgctacaccgaactgctcattcccgccgagggcgtctatgaattcgtctatcccaccgtggtggggccgcgctattcaaatctgcccgccgacaccagtgccccggatgagcgctgggtcgccaacccgtatctgcgtgaagattcagagccccgtaccgatttttccatcaccatggccattaacgccggcatggatatcgcaaaggtcaccagccccagccacgatacgaccatcacctttgacaccgcccagcgtgcccgcatcgaactcgccgatggtcatgagtttggcggtgaccgcgacgtgatcgtccgttatcagctggccggcgcggccatttccactggtctgctgctccatcagggcgaggacgaaaatttcttcctgctgatggcgcagccgcccgagcgggtaacacctgagcagatacccccacgtgagtacatcttcgtggtggatgtgtccgggtccatgcacgggtttcccctcaacaccaccaaaaaattgatgcagcggctgcttggcgggttgcgggccgaggacagcttcaatgtcctgctgtttgccggtaccgccaatatcctggcccctgcctcactgccggccaccaccacgcagatcaacagggcgattgagtttatcaacgatcaggacggcggcggcggtaccaaactgcttaccgccatgcgccgcgccatggccctgccgcgggccgagggcgtgtcacgttcgctggtaatcgtcaccgacggctacattaacggggagcgttcggtatttgaggaggtcgagaaaaatctgggccacaccaacgtctttacattcgggatcggcagcggcgtcaaccgctacctgatcgagggcatggcccgggccgggcgtggctatccgttcgtggtcaccgaaccggcccaggcgcccgggacggcggcccggttcaaagagtatatttcgacgccgctgctcaccgatatcgcgctcagctcatcaggtgtcgaactctacgatgtggagcccgccgccattgccgatctctttgcggcccgacccattctggtctatggcaagtggcgtggggcgaccagcgaggcaaccctgaccctgaccggcgccaccgccggcgggagctacgatagcaccgtttcatttggtgatgggccttccgggccggataacccggcgcttggctacctctgggcacgctctcgtatcgcccgcatttccgattatatcagcggtgctcatgatgatgaactcaggcgccggatcgtctctcttggcttgacctataacctgctgacaaaattcacctcatttgtggcagtcgatgagatcgttcgtaacccggacggccaggcaaccgatgtcaaacagccactgccgctgcccaaaggggtctccaacctcgccgtcggcaaatctatacgcaattattccgaaccgtcactggcccatatcgccgggatgctgctggtggcgctcggttttgtacttttgaggcgcagatcgaaggtgtcaatgaggtaataaaacagagggtggactctacaggcgcggggatcgcgccataatcggtccccgccacaatgtgaaaaaacagcaggcccacaaggtgatgaattcgtaaaaacctcaaatttgcttgccaccgtcattcccgccctcgataacaacactcaagggcaggctgcagcgggaatccagtaatttcagataattatggatttcgattcaactccacaatgaccgtaattggggtttttacgacaccatcataaggtgatatcatgaaaacacgactcatcatctccatcctggccatcgtcgccccggccctgtggttgaagaagacatacggcgccgcctccggtaaggaacttgactggattctggcgcccaccgccgccctgataaacatggtgtctgatctgcactttgtccgtgaaagcgggctaggctggatcgacgccactcacaacgcggtgatcgcaccgtcgtgcgccggcatcaattttctgatcgtcgccttctgcgccgtggggctgcgcggcgtctgggggtttcgttcccccatcgcgcagctgggctggatagcggcggccctgccggcggtctttgcggcgacgctgatggtcaataccctgcgcatccggctcttgatcgaattgcatcatcttgatatctatggcacccgtttcactgctgagctggcccatctcatcggcggggtggttatctactacggcagtctgctctgtctgttctggtgggtatcggttatactaaaaagacgagcgccggtggcaaatgccaccgggtgggcgccgccaccctgggcctggtggctggtgccgccggccgggtatctgctgattaccctgggggcgccgctggttaccggcaattttctcagcgacgtggccgccttcacccggcacgcgaccaccgttgtgctgctaagcggcgcactcagcctgccggggcttgtggtgacgctgatacctcgctcgataaaaggatcgtaaaataatcacccacacgcctcgacaccctgtgccgggaacaacagataaccatctatgaaaccacgtatcctcatcgtcgaagatgagccggccatcgccgataccatcgattacgccctgcagaccaacggctgcacaaccctgcgcgttactaccggcggcgcggtggcggacgagctggcccaacagcacatcgacctgattgttcttgatatcggcctgcccgatatcgacggtatcgaggtgtgccggcaggtgcgcgcccattcgtcggtgcccattatctttctcaccgcccgctccgatgagatcgaccgggtggtgggtcttgagatcggcgccgatgactacgtggtcaaaccgttcagcccccgcgagctggccgcccgggtcaaggcggtgctgcgccgcaccggcagagattccagcgctgacgagccggtttcattgttcagcctggatcaacccagacagcgaattgaattttgcggcacaccgctggccctgtcgcgctacgagttcaacctgctcgccgtgcttatcgaccatccgggccgggtcttttcccgtgaacaactgatgaacctcgcctgggaagaaccgcaggcaagcatggaccgcaccgtcgacgcccatatcaaaaacatccgcgccaagctcaaaaccatccgccccgacctcgaccccatcatcacccaccggggcatcggctacgccctgcgggagtgatgaattcgtaaaaaccctgatcttacttgttttcgtaattcccgccctcgataacaacactcaagggcaggctgcagcgggaattcatgaatttcaagtgattatcgatttcgggtcagctccaccatgacggtgatagatgtttttacgattccatcaggagtagcgaggcggggttttcaggtcttttattttagcattgtctagaatcttttcagtggaccagcaatggaaaacagctgtgtttaacggcagtggttgctctccccaatttacgcgatttttgtggcgaaaaaggaaaattatctttaaaatgatattttaggtaaagtatgattaccttaatatgcacttttgggtattttcatgatcgcttcctcgtctgaattcatcacggtgcttcgccattacaatccctggtggcgcggctcctcaccggccgatctccccacctggcggcggcccgtgtttgattatattttcaggtggatgcaatcacccccggcgccgcgggcactgctgctttccggcgctcgacaggttggcaaaacgacgctttttctgcaggtcattcaggcgctgattgaagacggcgttggtgctgagaaaatcctctatgcaacgtttgaccaccccttgctcaaatccctcggcctcgatgggctcatcaaattgtggcgcgagttcgagccggaaaccgacgggattgaatatctctttctcgatgaaatccacactgtcaccgattggcagacgtggctgaaactccaggtcgatttcgagaaaaaacgacgcatcgcggtgaccggctcggcgacaccgctagtcaccgaaggacaggaatcaggggtcggccgctggcatacgctgcgcattttcaccctttcattttatgaatacctgcatctcaagcagatcgacatacccgcgcctcccgctcttgattcgcttgctgaactatttgactggtcaccagagcagttcgccagggtgggggctgatagtgcgccgatggtcgctcatttccatgaatatttacttcgcggcggctttccccagactgctctcatgaacagcattaccgccgcccagaaacttctgcgtgaagatatcgtcgacaaggtcttgaaacgcgacatgacggcgctctttggcgtccggcgcgtgctcgagattgaacaggtgtttgtctacctttgcctgcatggtggcggcataatggacatgcagatgctttgtcggaacctggagttgaaaaagccgacagtcaacaatttcatcaacctgatggaagcggcccatctgatctataaagtgccgccgttcggctacggtaaagagattctgcgtgcccgttacaagatctatctggccgatctcgccattgccccttcggtgctgctcaccgcggcaacgttgttggaagacccgacagcccttggcgcggccgttgaaacaacatgtttcaagcacgccttcgcccgctattacccggtgagagttggtttctcctattggcgcggcagaaaagaccgagaggtcgatatcgttgccgaagtacgcggcgaggtgatccccttcgaagtaaaatatcgtgctcgaaacaccggcattgcagatctgaaaggtctggccgagttctgcacggcgcgtaaggtctcgcacggctatgtcatcaccagagatagcgcggatttttccatcgtttctccccctttgaaggttgagtcgacacgcggccttgagccggtgcggtgggcaaggattccggccccgctcgcctgttactggctcggaaaaacagagcttgacgagtagaaaaatagacctgcatggtatctctctgctctgccatgagcggggttaatggcgccttcttcaattccgaataacgtgtgccggacaagcggcgccgaccatggtgcagcgcactaatggcgtgaaaaaatgttcgtacagtagtagtgtcccgacttcacatgttttcatacagggataattgattcatggcctccttcgaccgcgtttacgagcttaccgccatcctgcaaagcagccgctacgcggtaagcgcccaagagctggccgcccgccttgagtgctcgctgcccaccgtcaagcgctatcttgccaaactgcgcaacgaatacaacctgccggttacctacagccagaaatatcagggctatatcctcgacaaaaaaaacgatgaccaggtggaatttcccggcctctggttcaacgtctccgagcttcacgccctgctggccatacatgagctgatcggcggccttgatccgggcctgctcagggccgaactgcagccgctgcgcgagcgcatcgaaaaactgctggccgggcgcggcgtcagcaccggcgaactggtcaaacgcattcagtttgtcggcgccggtatccggctctgctgtccgctcgccttccgggccgccgccaccgcgcttatcgagcgcacccgcctcaaactcaattatcacagccggggtgaaaacagtatttccaccagaaccatatcacctcagcgcctgctctactaccggggcaactggtatctggccgcctactgccatacccgcggcggactgcgcgtcatggctcttgaacggatgagcgatatcgtcacccagaaccaccccgccacggaagtcgacgaccagaccatggccgccgaactgacctcgtcgttcggcatcttcaccggcccccccaaccaccaggcggtgctgcttttcaccagccacagcgcccgctgggtggcggaagaacagtggcaccccgcccaggaaggccgctggctgagcgacggccggtatgaactgcgtgtgccctattccgaccagcgcgaactggtcatggaaatcctgcgccacggccccgacgtgcaggtcatcgccccgccggagctggcccgggcggtatgcgctcgcctggaaaaagcgttgcaggcctgcaaaaaaaatgaaaaataattctcaccggatcattttttgatacgcgggggtggtagggtagggtaaagaatctttgttattccgctgtatttactgacacaaaagagaatattttatcgttagctgaacagctaaaagtgtttttaatgagagggtaggtgcgatggaaaacgaaacatacatttctccgattgcaattgatttaggggcggcccacaccggtgtttattccctgatttacaaggctggaagcacccttgccgatgttgaagagaaaagcggtgtcgtctatgagctggacccgcaaaacaataccttgctcatggttagtcggagacagaaaagacatcagcgccgcaatttagaccgtcggcagatggccaagcggcttttcaggctcatctgggagaaacattttggtttgcaatgggacgcggacgctgcccaaagcattggattcttgtttaaccggcgcgggtttagtttcatcaccgagcactatgacattcaggcgttggccaacttcccggaagaggcgtggcaggagcttccgcgcgcgtttacggatttgattccagttgatcttcgcaactcatcaggcctcgccgaattcatcatggcgctaccgcgcgatgaacctttaagtaatagttgtctttgtgagttatataaagaaactaacaaaatcaaaaaagagcttgtttttacccagaaaagtattgcacttgcgaaggcgtgtgaggctatcgggcagggcagaggcgtgccggtcgagaggaggaaaaaagagagccccctcgcctctgtttctaaatggattgtggagcgctggcgtgatgaaggcgtatgcgggctggaggcggttgaacctacggggccggtgtataacattgccggatttttaaccgaacacccttcgttggcagagacagtaactgcaacgctgccagattaccgggctgctcaaaatgaatcgaaacaatcgatgtggaattttgccatcgataaattcaagctggaagaagcggagtttgaacggaccggtgaaacaacaagtgaaaagcaagattttattcgtacccatcttcaccatcttgcctttgccatttatacaatcagtgatgagctgagaagtggtgcacgacatcgggcaagatattttgaggaagttgagaaagtacttaccggcatcacccaccggcatggctatctgcagcggttttgcggctccctacagcaagaacattttgccgggttaacaccggcaaagctgaccaggttgatcagccatatcagtaatctggagttaaaaccactccggaaatacttcaacgacaagaagcaccagggcggcttctattgggacgaagagcggctcaaacgatgtttcagtgactgggtactggggcagtggcgggtcgacctcgccaaaaacagggacaagggtgccgggaaaccccaggattaccaaaagcttcgcacggtcttacaaaattacgaaggcggcatcatcgaattctggattgggcacgacccgcaattgagtattcccccctaccaggataacaacaaccgtaatccgccccgctgccagagcctgcttctcaatgcctgtttccttgaccacgcctatccctcatggcgcagatggttagaggcattgaaagacaatgcggcagaccatcttggcgatcttgaaacaaggcttttagggttggaaagtggcaagaaaaattcctatttcaaccaggcaaagagtggcgatcaaaggaaagattctcaaaaactgggtatggcggacctcgacgcccggctctttcagttcattttagaccgccgaaaggatagtgaccccttgcgtctggcagatatctacggccacgcaaaacgactacgtcagcttggctggcgtacggagttgaccgagcctgaaaagatggagcaggcacgccatcaacaaaagctggcacaaacggttctagagagtggattgccgccggatttgaaaacttccccccaattcaatcaacaagatatttttccggcgggctcgtttctgcatctggtctgccgctatttcaaaaaccggcttcgggctcgcgaagggcgtctgttcatccacccggactatcagcggacggcccaccgggggtaccaatttcgtaaccgttttatcagtgaaaataatctcttgcgctattgcaacctcaagccgcgccagaaacgatatcagatggtcaacgatgtcgccggtgttttacaggtaagtccagaccggcgggtactggtggcacgacaaaatcataatgatggcagccaatctgaggccgttttcgcctggctcaaggatttcaggggcctgcaaactgcctgtaaaaatgcggcggattcccagaaagaacatcgcggactgttgaaaaccaaactgttggccggtgacagagccctgcagcgccttcaggatcgatgcacacagctgagtcgccttattgcaagagagatttgctctggtgatgaagacccggaggccagggcacagaaattttcttccatcttttcttttgcccagttatatgccatcgccttttctgaccgtgccggtaatgcctccacctgcccggtctgcagcctggacaacagccgccgcatggagatggttggtgaggatcagagggcaaaggcgcagcgcctcccggctatctcaaccagggtcattgatggcgcggtcaaacgcatggcacggattctcggcaggaaaatcgccaatgaccgatggcccctgctcaagcagaagctggtgcagggcacaccggtgcgggtgccgattatcactgagtccaaccgcttcgagttcgaaccggccctctccaggcttaaaccgggagttaaagaaaaatctattggaaaggatacttcttacgaggataaacgaaaccgcattgccgaacagggtgggggcatctgtccttacaccggtcagcctgttggtgaaaatggcgaaatcgaccacatcataccgcgctcctctagcttcggtacgttaaatgatgaggcaaatctgatatttgccaccgaacagggcaacaaagcgaagggggggcagttctattcacttaagaatctttcaagaacttacaaacaaggtctttttggcaccaataccgatgaacagatagcggcgtggattagagaaaccctctgggatgaacgtcgtggcagattcagattcggaaactacctcagttttatcaaccttggcagtgatgaacaaaaagcgtttcgtcacgccctgtttctggaagacggggatcacgtgcgcgagcaggtcgttgccgccattagcaatcgcagccgggcctttgtcaatggtacccagcgctattttgccgaagtgttggccaacgagttctacaaagaggcgttggatatcggcaaagagcggttgatcagctttgactactttggggtcgaagccacctcaaccagccggggagatggggtcagggactggcgccggcactacgaagagttttaccctggtgagtttgccccttataggaaaaaagatggaatcagccagcatccctattcccacctgcttgatgctcaaattgcctttgccattaacgccgacaaacatcgtggagatggggggctgcggctgcgcatcccagaccacatggggctggatgcgttgaacatggacacgggggaaattctacacgacaatatctttcacgccatcagggtgcttccggagcagatgactgcggtgcatgttcagcggcgcagacccagcgataacaggtgcacccatagggcctttacccgtgacttattctatgctgatcgatacttgcccattttgctgaagcaggaagaaaacggggtcatcctgaaagccgggttcacctggaaaaacgctgaagtgtttaataaaaaccagcggagactgttacctcaattgctgccgcttttgacccaggcaccgcattacccggcccggctttctcaagaacttgataaaggatccaccgctggaaccgcgttcgagcagcggttataccaactgctgataaatactgattatttcaaagagcagatcgataggaccggcgccatctatctcaccattaaccgaaagaccctgcacgaactctggctggagcggcacaacaccaaaaacggaaccccctttgagaacaaagatcatgccacgctgtttgaattctgctggggaaagttggggtaccgaacggaaaagaaacacatagctacggaggatgatcttaagaaattggaagctaaggagggtaattttacaccacctttaaccgcacgaaaatcatgctgccgtttaaacatgactgggtaaaacttcgccggcgctggaacgtggccaagagcgagggacaagactttgatgatttcctgcgagactttttcctcaagaaaacaaaggagcctgccccccaccacagagtacgaaaacagttttccctgcccgtgaaatcaacccagagtaaatttatgctgagtcgtacggggtgggataacacgcagaccttccagattatcaatgaatcgctggcgcagggacagattaacaataaagcagaggccatgctcaggccgcacaaaggtgatgccaaacaaaaaaagacgctcaccccatgggcacgatcagcctcgttcgtcaagctcacgaaagaagactatttccaggggcagcccgttgaccctaaccagtggtatctcgttaccgataccggtctttatccccgggatgaacatggtgaattagtggttgaccgggtgtggctgcgtgtggacgatgtcacctcgccttctgttgccatcaggcttgcccgtgatgcagatgatataaccagacctgaaatcatccttgatgaccgattatgtggcaggaagttcgagaaaaaaacagagaaaaaaccgacagggggtaaaccgggtgagcctgccatgaccgctgatcaggtgatgcgcgaatattgggagacagacattaaacaccagcgcgccggtgcgataattacctataaggcaagcaaacagtataatagagagcgcctgcaagccctgacggcggagtgttccatcgcggtagatcgcctcgaatagcagctcgtgaagcatctgaccatctgcgattacggcgcctttctcggtaccagggaggggatgctcctggtccgcgggcgcgacagctcggagcggctttatccactgaaccgcctgtcgtcgctcagcattgccaagcgcggtgtctcgctgtccagtgacctggtggaaagcctcagtgaacggggaatcaaactcttctttctcggatttcgaggcaccagccacgcctcgctgatcggtaacgtccgccatggcgtggtggccgccagagcacaccagtatctgttttgccgggaagacaccttgcccctcgcccgccggattatcgccgccaaaataaagaaccagcgtgccgtgctcggctattatggcaaatatcatcgtgcccttcatgaatgcggggccatggcagcgttgcaagagaacgcccgtcaggccctcagcgcgcgaaccagagaagtgcttatggggtacgagggtgaaagcgcccgttgctattttcaaggtttacgggcggcgggtctttttcctcccacttttgtcaagcgcgaaggccggggttcgcaggagattaccaacagtatgctcaattttgggtatgct

SEQ ID NO: 185 - DNA, 8823 bp, synthetic construct
  source 1..8823: mol_type = other DNA
  misc_feature 1..8823: note = Synthetic
  variation 7114..7224: note = n is a, c, g, or t
aaagtactagcagagaccatttctttcctttttgtttttgttgttttgttcttataacataagggattgaagttgtcttttcaatttctgtttttaaagaacttactaagatctgtaaaagatcttaagggtaaaaataatcatattgaggctctttgttttatccacacatatgcacgaagcctcttttaattgaacataaaggctgtgtttatgcgaaaactattaatcttatttgtgcttttaacattctcctttatatctaatgcatttgataggtttgaattcgttacttcttgtaaggaagcgtataaggatggaattaaggcttatcagattgccagagaagaatatggactgtctggtgaaaaggctgatattttggcaaatatgattcagtctcttttaaccaatgaagatttcctaaactattcatatacaaaaatgtctagcgaaggtgatttgaacagcgttacaaataaaaatgattttgtgcaaaagtttggtgcttcctttatgaattcatttaattctgttatggaaaaaggccttgttcgtttgtcagctgacgaaatcagatttaattttgaatatgctctggccagattaaaacagcaccgtgccaataaatattatgatgtatgcaaagcttttggtttgggtgatttcagattagcctcagccactgatattcaaaatgcagctaaaactgcatatatagatatgtctgtaagagagcttagaatcttttctgatttaatgcttaaagctgtaaatgctgaaatcagagaatttccaaaaagaaaaactcttagcactgctgagactgcacttgctgaaactaaatttgctcagtatgttcaggataggatgcttaagctgccgcaaggtgatcttataagaatttctgatgccttttctaatttatatacagcaaatccaaaagacagttgtgatgccgcaattttatctgtggaggctgcgttagaagataaaggtccaacaggcgataaaattctgctgtacctgctgttagctcagtagattagtggaagaaagctgtgctttaacgcaatatatagattaatgctttagtcagatcattaaatagaaaaagcctgatcgcaaatacgattaggctttatagtctaaattcagaatttacagatattatttggttccgaaaattctgtcaccggcatcgccaagaccagggcagatatatgctttatcattgagctctctgtcaagctggcctacataaatctgaacatcaggatgagccttgtgaagtctctcaaggccttctggtgctgcatgaatacatacaaacttgattgccttgccgcccttctgcttaatcatatcaacagcatcaactgctgaaccgccggttgcgataattggatctaagataatgcagtcacgctcttcaagcttgcttgggagcttgcagaaatatggtacaggcttgtgagtggtttcatctctgtaaatgaatttacacgaataaaattatgatactttcattgtgtgacgtatctataaacctaatacttcgaaaattgacgaaaaaaatttttttaaataaagtgttaatacgaataaataatattttaataaaaataatttgaaattatataaggtgtctgttgttagtaaagtgaggagctaaagctgcaatgaaaattattaattcaaatattgctattgatatggggggtaaatatacaggtgttgtttcctatacctctgataaagtacctgcttcagaagacataaatgcattagtaataaatatgcctgaaacaggaagtggcattaactatacagtaaaggaaagaacatcagcaaggcatcgtattagatctcttgacagatttaagaaagctaggaagctaatttttcaggtgataagttttgttgttaatagagatttatcatcagatgaaaaggaagctatttcatctttaatgaaaagacgtggttatacaagactggaatcagagatcgacctcgaaatattaaatcaatgttcaacagaattttttgcagacaatattgattgtataaataatgattctcctcttttggagcagttctcctctctgacatgttcattagataagacaaaagaatttttatcaaaaatacaggtatcggacctggatgagaagataaaagatatttcagataaaaatgaaaaagctttatgtaaagacgttcttaaaataatgaaagaagcttgtggctcaatgatttctcaagaacaatttggccataagcacagatcgcagtaccttgaggctattaaagctgatcttgagaaggattcacgtttgaagaatctaatagaatgtattggttcctctgaacgtttatatagatgtgttggaaatatatcaaatttacagttaagagctttaagatggtattttaacgatatatctatgaaaagtaatactatgtttaagcctgacaggtttaaaaaggtatggatacgtgcatatcagtttttccattatccagaaaaagaagaagtagttaaattattaaatgaaataatgcattctgataatattgtcgaaactctgggcaatattgatccagcacgtacaattcctccttacgaagatcagaataatagacgacctcctatagatcagaccttactgttaaatccatctgctctagatgaaaagtatccagataaatgggagaaatggactgatttgtttgtatcaaagaaatcagaaattacagataaacttgatgaaattgttatattaactgacagaaaatcaagaagatgcaatacaattcatccttcatacacttatgaaaagattaaacattcatatgcattgcagagactttttgatttaagtaaaggcgagtctttaattagcaatattagagcatgggctaataatcctgaaggaagaaagaaccttgaaataaatgaaatcataaataatcttttaggtaatgatgctgatgaatttttacagctggctcaagaatactatagagaatgtgattatgcaaaaagaggtttgtggtctctagttgaaaaacctattctggaagtatcttccattcatcctccaatgaagaaaaaggctggagtgatggctgatatggtttctgctgtattatgtatcaacaaagtccttgaccttgagaagttcaaaaaagaaatctggaatgtaaaggttaaaggtaacagtactgtcagatccatatgtaagagtatagaagatacaagaaaagcatatggaaatgcctttaaacaagaatatgaatttgcgttggaaaaacagcagagtgatcctaaatctttatcaaaagaagaaaaagatcttgttaagttatcagaaacagtggcatttgttgccgattatattttcaaaaatcttaatggaaatgatcttgattcaccaaagtatgcaaatccattttctttagcacaactgtatacaattcttgaaagtgatccgcatggtttttcaagtaactgtcctgctgtaataaaagaaaatgcctggagaatgcagtcatatgatggactaggcgctatttgttccagattagttgcagaaactgtaaggccatttgatggttcccttgggaagatccttgataaacaggcatacgaaattgcatcaagaaaggtaaaggaaatattatctattcctaatcttactgataccctcataaaattgggtattgttattgagtcaaatcaatttgagttttctgcatctattgcaaaaattaagaagtctggcaagtataaaaagattcaggcatctgcagacagaggtcttgccaagcaggaactcaggtgggaagaaaaatctgatcgtatcaagagactgtcaaataacatctgtgcttacacaggtgaggaacttgatggtgttatatgcgagattgaccatattattcctcgcagctttacaaaggaatttatgggcacagtctttaattcagaagctaatttaatttatgtatctcagaagggaaatcagacaaagaaagagaatctttaccaccttaaagatttgcatccaaaatatctgttatcaatttttggaacagcaaatgtacaggaaataaataataaaattgaagatacagtaaaaaaagttttaaagaaaaatcctaggttcatctttgagctgatgtctgtagaagaaatgcaatgtgtaaagcatgcattgtttatgtcatacgactctgaagcatataaaactgtgttaaatgcaatggcaaaaatatatagcaccagagtcaatggatctcaagcctggtttgtgagagcaattattttaaaaattaaatctctcctttctgattggttaaaatcaactcgcaatacattatcttttgaagcatggaaggtaagtggagaagaaactcaccgtattagagaatcattggccaatcttgatccaaatttaggaaaaaaagatattcagccaattacctctcatgctatagatgctctttgtattcttgcatcagcatgtgttgacgagaagaagtcttcattccttggtgagaacggatgccttaatttcttatataaaccagagaatctcataaaggtgattccagagcaattcgaaataagtgatgtctcaagaaagccttttactgaaaaagataaaccagaatcaagaaagctttataaggaaaccatatatggtgagcattttattcctgttatggttcttggagatatagtaaaagttggatttaactggaaagataactgttttgaagtatcaaaaggtgcagataaacttctggaattgctgtctcctttcttcaatgagcagtttaagatggataataaattccattcgtacagtatcaataaagaaaaagcttttgattacctgcataaagcatcagtatcttcatgtgataaaacaatgctggatactgtaaattgtattcagaatttgtattattcaacaaggaaagttgctgttgttgattctatatatgattcgactaagcacaaatttaaaacagaaagtgaagttttaaataataaaaagtttgatatcaaattaaaaacaactttcactaaagagataaaacttaaggcaaataattctggaaatttagagttgcctgctatttcatcttggaaacagattctttctcaatttaatgaatatattggcaagagtatagataagggggatgagcttgttagaaaagagcttggctcaactaaattttcatcatcttctaagctgaaacataagagagttaaacaggatttcagtcttcctatgcttgatggaccttcaggcggaataagggtgaagagattcaattatgacaataaagctgtttatcagcttgtggctgcaaataccccagaaacagtgaccagccagggattccctgttgaaaataacaaaattaactggaatggttctgttcctctgccaatttactctgaagataatttaacctcagtggatattgaaaataatcaaaatgatattcaatcttatgtaaaaatggccgaacagcgactggtatatcgtgatgataacttaaaagttatgatgtctccaggaaccagagatcgtagatacgtatttattgagcaggattttgaatcatttaagacatgtttaaatgacgtcaatgtaaaatcaccattagatttatcaaatgagataaagctaaaagattctgattgcaaatcttttgctcaaagttttaataaactaaccgattctaaggttgatgttggaattcctagaggtgtgctcaaaataacttcaattggaaagataatctcatattattattcggttcaatcaagcaattcgaatatgaattctgcttttgaaaaagcgtaacggttgtctgataatatgcggtacctttcaatttctgaatatggttcattcttaggattatctagcaattgtctggtagttaaacaaagtggcgaggtagtaaaagagattgctctatctcgccttaggtctattgctattcttaaacctggtataactttatcaagtgatctgatccaggcgtgtgctacaagaggaataaaagtattctttttagattggagaaatagagtatattctgctgttattggtcaaaatcagcatgccatagctaatttaaggaaatctcagtttaattgcatagataattctgaaaaaagctgtcttatatccaaaagtttgattctatcgaaagtaaaaaatcagagagctgttctaatgtattttggtaaatacttatcaaaatcagaagatctgcaaaactttaatctcatcagagaaacatcagaaaaactagagaaaattctacaaagaattaaggatctgaactttaagaatccagaatggaaaagttccctattaggatttgaaggttctgcagccagactttattgggatacattggtgaacgcaaaactttttccttcagacttcattggtagagaaggtagaaatgcaaatactatgactaataaagcccttaattacggttatgcaattttattaagctttgtatggtctgctttggacaacgcaggtcttgaagtatatgcaggctttttacatgttgacagaccaggaaaaccttctttagtccttgattgtatggaagaatatagagcttgggttgttgatcgcaatattataaagttaagagaaaagatcgcaaatgcaaagagttttgatgcaaaactgaaaaagcttattagtgattcaatttataaaactatgcaaagaaaatatctccataataaaaagaaagtaaagttagaaaatattttgcagcgtcaggtttataaactatctggatttatatcttgtggaggaagatacaaaggttacatttttaagtggtaggtgtctaatctatggggatttataagaaatatcttgtttgctatgatattgaaaatgataaaacaagaaaaaaggtttttgatttattaaaggatttaggtctgattcatctacaattatctattttttatggtgatttgaataaagcagagtttaacgcaatgaaatataagataaaaacattactagaaaattcctcagannnnnnnnnnnnnnnnnnnnnnnnnnnnnnnnnnnnnnnnnnnnnnnnnnnnnnnnnnnnnnnnnnnnnnnnnnnnnnnnnnnnnnnnnnnnnnnnnnnnnnnnnnnnnnnagacagtactgtttttgtccaaggattccttttttttacctggttagacaattacagcctatagagcaaccttgggtacaatcaggccttgaagaacataatagacaagaaattctacaaaaaaggcgaaatttgtctaggtatgggataaaaatggagaatgattgggaaatccatagcaatattgaactatttagtgataagttacatattcacggaatatgtgatgctgtagttaaatgctcaagtaaaacatttatactagaatttaaaaattccgaaagtgtttcagataatacaggggctcgtattcaacttgccgcatattctatggtttatgaagatatttacggggtagagctcacagaaggatttattatctatggggctaaagcaaagactttcaaagtttcgatagatcaagcgattagaaaaaaggtaattgatatacgtgacgaaatctttgcaagtatgaaaagcggaattttacctgtttcttctgcttcagaaaagaaatgttcacaatgtgaattttttaatttttgtgcagacagatactaatggttctccggatgcgtatgcagttgccggagttaatcttgactttgggtgatttcagctcgacacaaggtcgatttcactcaattctttaacatatgtttatattttatactatttatttcgaaaaaaatatgataaatctaacaattttctctatttcgaaaaaataatcttggtttccaacttaacttatttatttaaaacgaaataagttgagagtttcaattatatgttaaagaactgagtaactgaaactgccgtatctgccgttaaggtaaagtctaaagattgtgtttcaattatatgttaaagaactgagtaactgaaactgcagaagcatctaaaaaattcttttcttcttttctagtttcaattatatgttaaagaactgagtaactgaaacaagaagactgagcctaaactcgacaagcagttaaagtttcaattatatgttaaagaactgagtaactgaaacgtcttaatatttttgatttcactctcataattgtgagtttcaattatatgttaaagaactgagtaactgaaactgtaattgctttttttcattgacactggtttgaagtttcaattatatgttaaagaactgagtaactgaaacttacctgatcgagttggtgctgcgaccattacgaagtttcaattatatgttaaagaactgagtaactgaaacgtagttacaactactgaaacagtagcaccagcaccgtttcaattatatgttaaagaactgagtaactgaaacaactttctcgcatatgcctctaaaatgttctcagggtttcaattatatgttaaagaactgagtaactgaaactcgaataaatcttcagactgcacgctgccttttttatagtttcaattatatgttaaagaactgagtaactgaaacagtggatttaacgcaactggcgagagtgacttaaagaagtttcaattatatgttaaagaactgagtaactgaaacaatacacacatcaaagacattacagatatgtttaacgtttcaattatatgtta

SEQ ID NO: 186 - DNA, 16776 bp, synthetic construct
  misc_feature 1..16776: note = Synthetic
  source 1..16776: mol_type = other DNA
agcgcttttagaaacgcggattggccctccgcgggtcgatgtggagcgggtgcggctttacaaccggcacaaaattgagcgccgcttgctcactgccgacggcttgatcgatcgccaactgtacgaggagtttttggtcgacacttgcgcagaaacattcgagttgagttactggctcaacggccgcctagtcggcgttgcgattaccgaccgagccgaagattcactctcggcggtgtactgttactacgatccgtcgttgagccgcttgagcctcggaacgtactcgatcctgaagcagttggagctttgtcggtcctggggtctgacctacttgtaccttgggctctacgtggaaggctgtgagacgatggcttacaaggcgcggtttttcccacatgagcgtctcattcatggacggtggcggcgctttcacgccccggaagcaccgtcaccgagcccgcgctagcgcgcgatctcgcagaaccggtgcgcccgctccccgcaagccattttgcaccgcatgacttccatcggtaaaacttagagcaataccacggcctgctttaccgctcgaaagagcaaagcggtggaggcaaagggaaatgcccctgttcgaatatcgctgttcgagttgcggaaaaacgttcgaagatttggtgtctggcgaccaacgcgaccgcgcggtgtgccgccattgcggtagcgtgcgggtggagcgcctgttgtcgaccttttccgtagcgcgtgaggcaagcgctctggcggccgctgagcccggaccctgcggcgcatgtggtgcaccgcagcgaggtgcttgcgcgatggaaagtggcgagtggtagcatccgctcggagcacggtaccggtcgttgtcggcattgacacgggcggtacgtttaccgacctcgtcgccgtcatcgacggcaagctctacgtgcacaaagtgccgtcgacgccagcaaaccctgcgttcgctgtgctccgcggcttgcgggaactcctaggagaacaccgcggctacgcggtaatgtacagttccacggtcgccaccaatgcgctgctggaacgccggggtgcacgcgttgccctgctcacgacggctggcttcgaagacgtgatcgaaattggccggcagaatcggcctcacctgtacgatccggagccgcaacgcccggagcctctggtgccacgacggatgcgcattggcgtgcaggagcggatgctacacaccgggcagccacttgtacgcctgagcaaacaggctgtggccgtagcactcgcacagttgcaacgcacccatcccgaggcggtggctgtttgtttcctgcactcctacgccaactcggcacacgagcggaagatgggacaagccttacgacgaaaggggttttcgttcgtatcgctttcgcacgagctggcgaacgagcatcgcgaattcgagcgctttagcacgaccgtattgaacgcgtacgtacagccggtgatgcaacgccacctcgaggagctggagaaagggctgcgggagtatggcgcgcgagtgcgagtgcttcagtcgaccggcggagcgatttcgccgcgggtcgcaggcagggaagctgtccggacttgtctctccgggccagccgccggcgtaagtggcgcgtgggctgtggcccgatccctcggactgcagcaagtcatcagcttcgacatgggtgggacgtcgaccgatgtgagccttttactcggcggcatcgccacatccacggaatggtccattgccggctttccgttaaaggtgcctgctgttgacgttcacaccgtcggtgctggcggtggttcgattgcgtacgtggacgaaggtggccttttgaaggtggggccacaaagtgccggcgctgaccctgggcctgcttgttacgggcgcggcactgagccgaccgtgaccgatgccaatttgctgctcgggcgcctgatccctcagttttttcttgggggccgaatgcccctttttcccgaacgcgcccaccgagcggtcgaggctttggcccggaggctgaaaaaaagcgtcgaggccaccgctgccgggattattgccgtggtcaacgctggcatggagcgcgccattcgggctgtcactgtcgaacgtgggcatgacccgcggcgctgtgcattgattgccttcggcggcgcagccggccaacacgcctgcgcgttggctgaagctttgggtgtgccggtggtcgtgatcccgcgcttacctggcctgctctctgcgtggggtgccttgagcgcaccagtcgagcgaaacacagtgcgctgcttgcgttggcaagagccgagttttgcccggctggaacgggccgctcgacccctagtcgcgcacatccgtcgcgaactcgagcgagaaggtgtgcccccgccaaagcaacggattcacacccaactcgaggtgcgatatatcgggcaatcctacgaacttcctgtgcctcttacacccgattaccgcaaagagttcgagcgcgcgcaccgccgctggtatggccaccatcaccccgaccgcgccgtggaagtggtcaacatccgggttttcgggcacgagtatgtccctcccaggcaacttgccacgccggaagggcaccagaacgggactctcgagatggtgcaaaaggtctttcacagcaaccgttggtacaccgtgccggtgcgtgaccgggaacaaatgcgagcgggcgaaacctgccggggcccggcaattctcgtggaactcagcggtaccacgtggctcccaccgggatgggtcgctagttgccgagctaacggtcacctggtgctcaccctaagccgcccctcagcccgcaaacaacgctagctcggtcagctacagcaaagggagccaccagcccactgagtccttttcgtcgctgcagtggctctcagcgagagccgagattcacgccctggttcggccccaagccctggtggagaggcagcaaccacaagtacgcaaacaaaaggtgtgagggacgggcagctccggcattgcgagcgcgcttgagcggcgtctcaacaagccgactgagggagagggtgccgcccggccctcacctcgtcaaacacagttgcatgtaagcctaagttgtgctgcaaagtcatgggcagatgctgttgcaaaaacctcacaagaaattaggtcttgacccattgacaggctcctccactgcgttcaatggtgcgcactgtgctttttcgagcacacgaaggcggtacgtttgccagaggcattccttccgtggcggtagcagcgagttccgtccacgagcagaaatagccgtcttggtttttcgtcgagttgatccggtttgccaacccacgaaggggggacgatgtcacaagagcatcgtttgtcactgacgaaccacgagctcgtggaggttggccggcgcgttgcctggcttcgcagacggcgcggctggtcgcagcaggagctggccgagcgctgccgggagctgcgaccgtcactctttccccaaaagcaactcagtgaggtaccgcaaatccggcgtgaccgcattgcgaaaatcgaaatggcggcagtcaaaaacggcggaagcaccgcgcgctgcctgtaccctcacgagttacgcctgcttgccgcggccttcgaggtgacggaaagctggctgcggggaagtaacggtggcgagaccctccatctgtgggaactctcgaatctgggcaacaacgcccgacagttcgctgaactcattgcctttcacgaagaattcagcagcagccgctgggcatggacggtaccgttgccgtgcaccctgcaaccaccggcgttcaccgagcaatggttgaaggctcgcgtggaccagtggagcgcgtacctaccctgttccgtctctcgtccgagcattgtcgatgcgttgaacaccgtcgcctgcgctaaccgagagcgtaccctgcatcggctcgagcagggcaccctccagttcttcgtcatcatgcccacggagacctttgaagcgctgaccactggaagagacctctacgcgaacatatcccgagaactccgcgccgagtgcttagaatgggcgatcgagaagctcttgcgtttccctgagcacctaaagctgcacctggccactggcgacgatctggcaccctaccgctcgtggacctcttcgttcgagaacgtgtacgtcagtggcggcttgatggcgcgccaagatttcaccggcgccacttactttgccgagaacgaaaccctcgttcagcgggggcgtgagatcgtccaagccatctaccatcgggctaccttgtcgcaccgcggtaaggtgctgaattttttgcgcgagtgcctggcgacactccgccggcaagagaaaaggtttcggcctcgaggcccggccaggttcctggcaacggcacgccatcgtaggcgtggccgacggcgggccggaggggcgttgtgagctagcggaatcgaacctcattagaagggttctttcccgcagccgctcggttctcgctcgaacacattttcctacaagagccggcgcatcgccttgcgacgaaaggcgctgcgtccgcttgcaagtctgccctacgggcccgtttcgctccgcggaaacgacaaaggcaccgttcgggtcgttcaccgcgcaagtttgcatcgggcgcggagtggtccgggcttcgagtgagcccaagctgtcgaacggaagcccccagcgcggaaccctagcgagttcctacacccactagggcagtgccgtgtacccattcgctcgccctgcgattgataccgtaggcttggttgccaccagacccgcgttccaacagaggaacgcaaccccgtttgtcaagacctgaactggcccacaggcacagaggagcacgcgaacttccttcgagcccctaccaagacccgtgcacccgcggtaaacggagtgcaccacacgcaggccgttgcgggagggtacaatgagcgaatcgaggtcccatgctttcgacgcaacatcgccacaacaaggagccaacgtgatcgagcccctgctggtgctggtgtaccgtgtgctcgcgtggacttttggaatcgtcgggggtctcttcttcctcttccccgacggcaccatcgacgctctcaacgcggtcggaaggctgctgggatttgcccccgcaccgcatttggcccaccgtttttggctcagcttgggcgtggcctacatggcggtggtaacgtctctcgccgcactcatcgctcggggtcccgtggcgcaccgtatattgatgctgcctttggctattggcaaagcgacgagcagcctgacctgtctttggttctttctcctttacgaccgctacttcatctaccttgcgaactttctcgtcgatgcctcgctcgcgcttctcgcgtgggccacgtacgtggccacagccccaacgcttcctggtacgttaccgccccgcgcgcggcgcactctggaagccgtggccgaggcattgttcccgcaagaaggtgtaacctccccacgggttcgcatccaagaattggccgacgcggtagaacgacagttagccgagcgtggccctctggtaatccgagccttcagtggacttctgacgtttgtcgactggaatccgcgcctgtttcatttgcgctggcagcgactgagtgaattgccctgggttgaacgggtttccgtgctcgagagcatggaacaaagccgatggctcgtgcgccgccaggcggcccacacgatgaaacttttgctcggccttcacggatacagccagcccgcactccgggtcgacctccacgtagacgaccactggctcgcctcgcgtctggaacaagcgcgagcgcggcgagagcgaggggaaaagggtccttacccgatcccggctccggtcgagtgatacgtcatgccagtattcgatggcagcacgctccgacggcaccatcgaacgactgcggatgccgtcgtaatcggcaccggcgctggtggcgctgtggcagccgcagaacttgccgccgcgggttggaacgtcgtcatgctcgaagagggtggctacttcaccggccagcacttgagcggcagcgttggctttgcgttctcgcacctttatcgagacggcggcctggtcaccacgattggccggcccccgattatcgtacccctgggccgttgtgtgggaggaacgaccaccattaacagcggcacttgctaccggtcacccgacttcgtgctccaacaatgggagcgggatttcggcctggagggggccaccgacctggcagagcactacgccgcgatcgagcgcgacttgcacatcaagccggtaccggacacgttgtacggcccggccaatgggcggattcaagaagccgtggagcgcgttctggggtggcgcggctcgcgcatcccacggaatgaggatgggtgtctcgctacggggcggtgtgcttttggttgccctagtgacggcaagctcgccatgaacgtgagcaaggtgccagaggcaattgcctccggtgccacgttgtgggtccacactcgcgttcgccgcatcctgctcgaccgcaaacgagcggtgggggtcgtggccgatgcgctcaccccggaggggcgttccacaggggtgcagttagatgtcaccgcggcactcgttgtcgtcgcagccggcgcgttccacagccccgcattgctgttggcgtctggcgtgcggcacccgtggcttgggcgcaacttgcacttgcatccggccacgcgggtggtggccgtgttccctgagcccatccgcggctggcgggaagtgccgcaggcgtacaacatcgacgagttcattccgcagggcgtgttcattcagggccaatttgtaccccccgaggtgcaggccgcagccgttccgggcttcggccacacgtacgtggagcggatgcgcgccttcgaacgcatggccagttttggtgccctcattagcgacgagtcgagtgggcgcgtgtggagtctcggcacgtcggccaggcccgtggcctggtaccggttaggtcgccgcgacttgcgcaaacttgtctttgccatcgcccgcactgccgaagcatttttcgctgctggtgcggtggaggtttattcgggcgtgggtgccttgccggtgttgcggcatcggggggaaatcgcccaactggagtctgcccgcgtgcggccgagccaactcgacatcatggccttccatcccatgggaaccgcacgttccggcagcgctcacttctcggtatgcgatccgtggggacgcgtacacggttaccgagggcttgccgtggccgacgccagcttgttccccacctccaatcggatcaatccccaactcaccatcatggctttagtgcgccgcaatgcgcgtgagtggattgcccgtgggggctgagcctcgtgcgatcccgtgtttcttcggacctcggcacgtggtagccgaggttccaacgaggaaggtacgatggaccgagatcgaagcgtgcgcgtggagcaacggggcccggtgtggacggtgattttgtcacgccccgaacgtcgtaacgcggtggatcgcgcgactgcggcacaactggccgaagcgtttcgcgccttcgaggcagcggaagatgccagcgtggccgtgctgtggggcgaaggcggcacgttctgcgccggtgccgacctcaaggccctagcggagggacaaggaaacatcgtgcgcgaagagggtgatggcccaatgggccccacgaggatgctgctcagcaagcccgtgattgccgcagtcgcaggctatgctgtcgctggcgggctcgagctcgctttgtggtgtgatttgcgggtagccgaggagtcggccgtctttggtgtgttttgccgccgctggggtgtgccactggtggatggcggcacggtgcgcttgccgcgcttgattggtctcagtcgcgcactggacatgattctcacgggccgcgcggtctcggcccgcgaggcgctggaaatggggttggtcaatcgggtcgtcgccgacggaaccagccgggagcacgccgaagctctggctcgggagctggcgcggtttccccagacctgcttgcgtcacgaccggctctcggcatacgaacaagacggcctgacggtcgaagcagccttgcgcaacgagttccgccacggctggataagtctcgaaagcggagaggccgtggccggagcgcagcgattcgcctcgggggaagggcgtcacggaaaattcgattgacgtcacctcgagccggctgtcagatccaggcacgataacacggaggagaacaggatgaaaatttacgactcgcaggttgcaccgaacccacggcgcgtacgcattttcttggcggaaaaaggggtgcaggtaccgtacgagcaggtcgacatcgttagcggcgccaatcgctcgcccgaattccgcaaaaagaacccgctagcgacggtccccgtactggaactggacgacggtacatgcattgccgagagcgttgccatttgccgctactttgaagagctgtatccagagcctccactcttcggccgcaacccgcgcgagcgtgcgatcgtggagatgtggcagcgccggatggagtttcacgtgttccttccgatcgtgatggtctttcgcaattgccatcccttctttgccggacggatccggcaggtgccagaatggggcgaggtcaaccgcgaatgggcaatggaggggctgagctggctcgatcgagagctggctgagcgtcgtttcattgctggtgactccttcacgattgccgatatcacggcgctttgcggcatcgattttgggcgggtctccaacattcgtattcagcccgagcagaaaaacttgaaacgctggtacgacgaggtgtcgtcccgtcccagcgcgaaggcttagtgcgggtgggggaaaacgatgaagttcggcgtggctttcagcaatgctggtccgctcgcctatcctgagccgtttgcggcgctcgtgcaaacggccgaggaatgtggattcgagtcgatttggaccgtggaacacgtcgttgtgccggtgggctatcgatcacgctacccgtacagtcccgacggtaggatgcccgggccagacaacgtgcccctttccgacccgctcatccctttggcttacgcagctgccatcacgcgcaagttgcggctgggtactggtattctcatcttgccgcaaaggcacccggtgtacgtggccaaagaagttgccacgctcgatgtgctttccggagggcgcgccattctcggcattggctccgggtggcttgccgaggaatttgcgacggtaggggtaccatttgaggagcgtggcgcacgcaccgacgaagccatccgggcaattcgaacattgtggcaacccggaccgcaaagtttcgaagggaaatttttccgctgggggcctgtggaatcgaaccctaagccgatccagcagccaggagtcccgatcgtgattggcgggcactccgcgccagcggcccggcgtgctgcccgattgggcgacggcttctttcccgcttttagcgatccgtcgagcctcgcctcgctcctcgacgtgatgcgtgccgagtgccagcgtgtggggcgcaaccctgctgacattgaaattaccaccggggccttcaccgtcgatgccgaactcgtcaagcgctacgccgaactcggggtgcaccgcgtggttatcggccctcccggtttcgaccccgacagcatcaaagacggcctccgccgtttcgccgacacggtgatgcgcgcgacgtagcacgtaaggttcttctctcgctgcgccggctcgtggccgatgctgcgcagagtgcggaagtcggccttccgcacacgttcggccggtacgagcgcacaaagcctgcttccgcactccaagggtcgtcgcttccccgggtaaacccgcggagagtccggccattttttgggggaatccacggccagacaaaatggttgacttggaaccgcggtctcctgcagagagtagggctatgggctcgtttgacaggcagggcaggagtcaaaagtcagcagtgtctcctcgggaattgctttccggtgcatcgacgggagcgtctgggtcgccagccctgttcgcacccattgcgatcgacttgggggcgaaacacacgggctgtttttttcccggcatcatcgggccaccgaaccaaaccgacccagccgaaggcagccgcgggttggtcgtagaagttgatcaaaatgcctttaccttgatgatgaccgagcgccgggcaaggcgccaccaacggcgggcttacaagcgacgaaggctcgccaagcgcctcgtttgtttgtggctcgaaccgcagttcgtcaagctcgagtcagaggatcgaatccgctgtgaacgctttcttcggggcttaatgaatcgccgagggttcacctacctcagcctcgacgaacgaatccgcggtgacgagctggaacgagcgctcccaatgttggaggccgctcatttactcggcaaccatccgaccgtggcggcttggttaaccgaggccgcctcggatccaaaagtggccgagcaagtactgcagcatgaactgttccgcaccgttgaggtcaatcgacgctccaagaaacgactttccgctgcgctgcaaaaaatgctcgatgcatcgggtcaaacccaggatggcgatatcattaaggcagcgcgcgagtccctcctcaaagtgctcgactacctcacggccgtagcgcaagccccgcaaactgggcataagcatcggtcggaatattttcgcgatatcgagtccgatgttactcacacggccgaagggcgttacgtctccaacctgctcgggctgacaccaaaaagcttgagtaacctggtggggcatatctcgaattgggatctgcgcgcgctacggagctacttccatgatccctcgcgcaagtgcctcgagaagctggacccggtgcggttccaccgtgcatggctccaattttttcgccgctggagtttagccggagaacgtccagaaagacgccaggattttgccgaaaaacgaagacgttgggttcagcgcctgcaggaaatccctaagggagaacggggagagctttggaaactcctaaccgaaacagaccctaacgaaacgatcccgccgttcgagtcgcaagggaaccgccgtcctccccgctgccagagtttactcctctgccctgattccctcgacaagcactatcccccgcaagcagaggggcagccgcctcaatggcgtgtctgggcgcagcgactcgcacaacacaacccatccttgttggaggacttagaatcgatcgctcgggccgacgcgaggtgcctcggcagagttcccatgccagcccgcggggccaagtggcacgaactttcagccagcgaccagcaagtgctgttggaggagacgcaaaagcgctggtatgacgctcggctacttcagcgcgtgcttgagcgccaccaagagctcgacccgtaccggctccgttccatcgtgtcccgcacggcggcatccaatcaagcagacgctctagctactctaacccggcatattggggatcaccaagtcgacgctttccttgagtttgcgtgctgcttctacgacgaaacccgcaaggcgcgtcgcgggatttggctccccggaaacgcaaaacttcttcgggtctgcaacgcgcacccaccacacaagcgcaagatcgaagaccttctcgtcgctcagatcataaccagaagctcagccccacctcctcgactgggccagacggtccgtgatgccgtcggaaacacgtcggtgcagccaccccccgagctccagggtgcaagaacccgctcgcttcgaactcttctcaaccgcatggctgatggggtcaaacagtacagcggggacttgaagtattggtaccgagctgcgctagccaaaaagcaggcggagcagcccaagccgctcgacccaccagaacaagaggccttcgagctttacgcttgggcccaagccgctgcccgtcaactggcaggacgcctcggcctttccgagtcagccattgagcacttcgataatccctactcccttgcccagttacatcagattcttttcgccggcgtctcagggttcgcgtctacgtgcaaagcttgcacgcacgagaacttttggcggagcgtcgtagactcccagggccgcgccaatgccgccaggctgccggcacatagtatccgaccaatcgacggcgctgtggccaaagcactggaggcgaaagccaggcaagttgcgcgcgaattcgccaacgccttgtccaatgaagagattcctccaggtgtcctattacacgtccctatccttttagaggagaaccgcttcaagttccgccaggaacttgcggagataaaaggcataggtcagggaaaaaagggcaagcaacccgcgcagcaggcggcgcaaaacgtcgcgacgcacgaaccgtggaaaggcaaatatgagcggatcagggaagatggtggcggactttgcccctactgcggcggtgtcgtaggcgaggacggcgagttcgaccacatcgtcgcgcaagcggtaacgaccgattacgaaggctacgggttcgacagcgaagcaaaccttatttatgcacactcctcctgcaaccagagcaaaggcaaaaacctttactccctggaaaacttggccgatgcctggctgcgcgagcagttccaaacaaccgatcgaaacgagatcgaggaggaggtgcgtaaactcgttgagccatggctggaagagcggctaaaccgccgggctttcgaccagctcgaaaagcccctccagcgggccatccgccacgccctttttgtcgaccacctgcggggacatgtgctccagcgtttagccatgcagaacgtagcgcgagtcaatggtacgcaacgatggttcggccaaatcttgattgaccggatctcagcgcttctaaagaaaaacgggcgagttgaccttaatggagtgaatttctccttgcaccgggttcctgcgtacgaggttaaggcgctgcgtgacaatcttgccaaggtcgagccacgattgaaaaagccgggcgaacaaggcccgtattctcatgtcatcgacgcggcactctgctacgcggtcgccaccactcagccacaggttcgccagctcctgggactttcatcaatagaacatctcgcggaatttattagccccgcccgcgccctggctttattgcccgatcaagtcaggatcgctcgcgttcaacggcggcccatttatgagaaaaagcacccatggcatcggccattattcaaagcaaaccccctcggagaacggttcgtgccgttgaacgtcacgcgcgacggggggctcttccccggcttctctgcccaggcagacaagccagagcacagcaccgtgaaccacccgaaacagcagaaagccgcctcgaacttgctgcgactcctctggccggtgctggccaatccgcccggcgaagttgatccctcaagcccgaatctgctcgagcaaatcgccgaactcgcccgcagaaaccccgagggagttatacggttgcacgtcgataagacaaaggcgttccggcactggcaagaatgccggcacaagcccgacgaccaactcgctcggatactggatgcactcgcgtatcgagttcaacgccagaacctagaggaaatttttttcggtgagcagggcagtgtaagccccgacaagatcttggcaaaggagtatttttccttcgaggtcaaattacctggcctgcccaagacaacggtaacgttaccctgcagaagagcctgggaggcattactccgtgaccccgaccttgaaccgcacttacgttccggaaagaagctcgtcaagaagtccaacgcaggtgagctgcctgagaatgccgtcgcgatcgactgggacgccgttgtcgctcgccatttccagcgcccagcggccacccggcgccaccggcgggtccgccaggtgttcgctctcccacgcctggcagacgcttcgggcggctttcgcgtggaacgccgtggcttcgaggggtcggttttccagctcctgcaagtcgaagagggggcctatgccgggttcaccgcggatgccaagaaaccccacggtttcaaccctagccgtcccgtacttttacccgtactggctcggagcaagtcgctgacgccgatcgaacgcacccaaggcgcgagcgcggttgtgcgttttaacgagccaaagctcttcgaaagtgatctcctccgagagaatgggatcgagcgcctagaagttctccctggcacacgcccgcgccgacaagtccggatgcgcatccggcgcgaaaagctgcaggtactcatggggaaggaggtggacgccttttccctggaacactcgaccttgctcattggcaaggatcacaaaaggcaactggccaaactcctgcaggaagccacgaaaataagtgcattggctccacgcaaagaccaagttgaggtggatggttgggacagagattgcatcgaactgtcgtggaccgcgggaactggcgcgcagaagaaaggggatgccaacagccaacagtgacacaccatttagtcatccaacagcaaggaagtttcgtcggcattaagggatcgcttttagtggtgcgggagaacgaccacgttacagcggaactcccgctgtcccgtctcggcacagtcaccatcgcaaaaagcggcgtagcgttttcgagtgactttgttcgcgaggcagcggtacgcggcattcgtttgttctttttagacttccgcggcgcggttatcgcctgcctttgcggcacagcccaacacgccaccgtttcggtcaggcgtgcgcagctcacgctcgcagaacctgcccgtcacgtactatcgattgcattcgtcagcggcaaactgggcaaccagcgtgcactcctacgttactttgccaaacaccacgaaaaaaacgggggtggtcccctgaccacggccgctacgcggttacaaaccttgcgcgcaatcgttcgccagctcccgtttggtgcccaatgggcgtcacagttgctcgggctagagggccaagggtcggcgctgtattttggcgcactcaaggaagcgggcctctttcccgagagctttgtgcggcgagaaggtcgaggatcgcgggaggtcacgaatgcagcattgaacctaggatactcgatccttctggcacgagtttggagctgtcttctcaatgcgggtctcgagtgccacgcgggcatttatcactccgaccgcccaggaaaaccctctctggtgctggatgcgatggaagagcaccgaccgtttgtcgtcgatcgggtcgtggtcgccatgcgcgcccagcttgatgccgatccatcattcggctcagaattgcggcggaaggttatcgcgcgggtgcacgaggcgttggaccggcgtgtgccgcatcgagggcgaagacttcgcgtggaaaccatcattcaacgccaagcgtaccgccttgccggagcagtttgcggaggttcggcataccggccggtccagtatccatggtgaacaaatgcctacgctcgagcgtgaagtgctggtttgttacgacattagctgctctaagagccgaacccgattgctcgaagcgctcaagggtctgggactgacgccggtgcaggaatctgtcttgtggggtttcctccgcgaggcagaaatccgcgaggtgcagcgcatgctcgatcactacgtggacccacggaccgaccgtggattcattgttcccgcgaacatgcagtcggcgcgaaccttcggctacccaaacgacgcgtttaccccaccacctcggagccgggtgctgtgaacgtcgatctgctgcccgcgagtttgctacgccagtgggcatactgcccacgcattccatttttccgaggtgtgctcggtttcaccccggcaatgccaccctgggttgagcgcggaacgaacttcgatgccttgcaacaagtactcacgtcggatcgtcgctttcgtattctgaatgcggagcggtggcaacgagtgcgccgcgtctacctggcttcccctgcgctgggaatccatggcattgccgacctgattttgcgggggcccgagtgcttcatcgtctgcgattacaagctagacgcgcggcgcatggaacgtgggacgaggctccagctcggcgcctacgcccttatggcgcaagaaacttgggacttaccatgccggtcccttgccgtgttaactgcgcgacccttgcgggcactcatcgtagactggaacgacaccattgccgcagaggttcgcgcggcgatcgaggcactacgacagatcatggaaagaggagttttgccgccttccgatgccggcgtcggcaaatgcggaatttgtgagcacctcaaccattgtaatgaccgggactagtacctggtacgaaaacgacggaggccgctggaaaagcggcctccgtacccggacgtggcatgccagtagtccggtccatccgtcttttggatgatttcagcgcgaagctgtttgggatagcgtgtgctgtactacaagtctcgcgagaaacgcaagtacaagccgccggaagccgttttcgaaactttccaacacctccttccgcgattgtgccggttgttcaacatgttacgccggggtcgcacttcttatcccaaacaacccgcgactgaaact

SEQ ID NO: 187 - DNA, 7222 bp, synthetic construct
  misc_feature 1..7222: note = Synthetic
  source 1..7222: mol_type = other DNA
catttcatctaccgtggttgtttgtgtggattcaaacatccattttaagtgacattgtcctattggaacaaacacattatcaattgctgcatcaaaggtttatgtgacagcaacagtgatgccccattgtcctgttggaacaaccacactatctattaatgcagcatcgggaaacaaagtggaacagtatagtcttattcgaacagcatcatcgccaactaatattatcgaaaataggatgtttaagcgttggattgatattgaagcgtgttgtgccttgcatcataaataattcatctgctatgttttattcatggtcaaaaaatccaactcatctcaaatcatgatgcctattgccattgatcttggttcaaaaaacacgggtgtttatactgcaaattatcctcaagggactcacatctcagaattcaaggatacatcgaaggtcaagaagcaggcacttgtacttgaattccttgccaaggaaaataaagggtatcaaattctccaaagcgatagaactgcagttcgacatactataagaaacagaacaagaaacaagttagccaaacgtttgctcaagttaatattaaaagaatactatcgatttcccattgaagacaaagatcatgaaaaagcactcaattatcttcttaaccgtcgaggttatagttatgtggaatcagattattgtgatttgtcacttaaagagataacggatgaccaactcgaacagatcgctaatgatgcgagcaacggtgccaagcatcgcacgaagtattttgaaaatatcaatcatgatttaaagacactcggtgaccgaaaagaaaaatatttgtctcgttttaatggtgctcttgaagaacatcaattaaaccatagaaatacgggcaattttaaagagatttttgaaaagacactgtgccatataaataattttgatttacgctcactgcgtgcttttttcaataatagtaatggagagaatcaagagtggtggcggagaggtaatacgcctgattccgcagacgccattgaatacaagctttcaacgatttttcatcgttggatctgtgatcaatggattgtcaataaagaaaaaaatggtcaaaaaaaagtcgacgattatcaatcattaaagaaagaatggcttgaatttacaaaaaacaatacaggaaaattatttagtttctggcaaaaaaccgatccaaagttaaccattccaccctatgaaagtcagaccaatcgacgtccaccagcatgtcaaaccttgttattaaatgttcaatgtttgactcaatattatccaacatgggaaatatggctaaaggatttgcaatctggatctaatttagatgttgagcgttacaacaaagaattattggaatgtacaagcagggataggcaggggacgccaattattcataccaaaccaggcaaacaacgaactgacaaacccaacgaaagtttttctcaagaagacaaaacacgaacatttcaattattactagatacctccaagaaaaatgatgtgtttcaacttaataagatttggagccgttaccacaaactacaacaacaaatacgggacaatgaagacaagctaaaaatcaataaacaaatcaaatcgttaaatgaagttgtcaaaaactctcaattaccagagtctctcaagacacaattaacatttgatgagagtcaaaaaaaatacaaagaagagacctttggacatcttctgaataaatactatcaaaccagaaaacgcgccaaagatggtcgttattttatacattatgataatactcaatcgagcaaattgaatcgttggaaaacgaatgagaaagacttgcttagactttgtcaccatcgtccacggcagaaaaaggatcaagggtttattgaccttcaggcaatatttggtgttgacaatgaattatggaaaaagcccttagagcaagctgctaaaaatgaaactaccaaagataaaactagtaacattgaaaaagcaacggaatggttgcgcagcaaagattttaaaggactcaaaacccattgccatgctgcggctgctgcacaaaaagaacacaaaggagcactcaagcaattattggatagagctgaatctgttcaaaactcgaaccatgaggttgctccagcgaagacaaccgacaagcaattattggatagagctgaatctgttcaaaacccagataagatcgataaaaagctgataaagctaaacaaaaaaagtaaagaactggctaaaagattggctctttgcttctatcccaacgataacagtcaaaaagaacgcttatccaaacgactaaacaatatttatacatttgctcaaatgcataatattgtatttttagatcgttcaggatttagcaaaacctgtcccatttgttcagtcgataacggatttcgttcgcaaatggatggtgatggtgcctatgcccatgcgtctcgattgtctgctttgtccttgactattattgatggtgcagccaaacgtctactgaaccataaagcacatcacttgaccaatcgactttgggagacaatcgaaccttatttgaacgaaggacagaacgtgtcgataccgattattctggaaaagaatgcgttttcgtttgaatatgatcttgcagatctcaaaaaaacacaaacaaaatccaaagaaacacaaaaaaaagccaaagaaacacaaacaaaatccaaacaaacaaaagaaaggatagaagaatcatacaaggataaaaaaacacgtatcaaagatgcaagtaaagatagcgctggacaataccattgtccttatggtgggcaattatctggcactgatggtcaattggatcatattttacctcgtgtttcgaagtttggaacattaaatgatgaagctaattttatttatacttcatcaacaggaaaccaaaacaaatcaaataagatatacagattgaaggatttaaacaaagattatttgaacgtacatttcaaaaataaaaacatagaacaaatcacaaaacatatatacacaacgttatttggtactgaagatatacatgccattgaatccaagaattttgtatttggttcatatcgaaatttctcaaacttagagaaaaaataccaaccttgttttcgccatgcattatttctccaagacaatgatcctgcacgtcggcgtgttattgatgcgatacagcataacaacaaaacaatggttaatgggacacaacgactttttgcgcaacttgtcgcgaattgcttctggaaaaaagcgaatgctatcaataaaaaacatttgttaacgtttgattattttcaatatgctccgatttccggagatcgtatgtcaccttttggtctgcgcaaccgtatcacatctcttgtttctggcacggactgttgtattgatgaatattccaaaaatgacgacaagcaacatccttattctcatgtgatagatgccacgatggcttttttgttggcaaccgaacaacattgcaatgaaggtacgatgcgcatcaatattgatgagaacatgtctgtctggggaagtacaaacgaacaatcagaggacttatccgctgattgttatcaagccgtatctgtatcaagcaatgatgttgaaacaatcactgtccaacctcaatcagtagcaacaaaaatcaaacgggcagacagtgcttcttctgctccatctcttcatcgattattctcacgaagattctttaaagagaatgctttgggtttgcgttataaacaactatttaaacgtgaacatgacaacgatggtacagatgtatggtctcatggttatattgattacagtgaatctgataagcctcaattcattaaagttgagcccatgagcaccaagtccaacaatgaatctatagagtatctggttaagcaagggttctattctgaacgtgaaagagatgcttttgataagaatgatgaaaaggttacttatcgaatgcttagtccaaaaaaaaagatgattgatgctgcattatttaattttctttccaaggctaatgaagacaaagtcaatctcaaagatccaaagattaaagaagagattaaagaagagattaaagcaaagattaaagcattggaatttgtgttgagtgatttaaaacaatgggttcaatccaagccaatcgaagaaacaaccaaggttattaataagaaagataaactgaatccttggttgatacaatggaagaagtttgacgaaggatggaaagaaagatcaggcgataactgtaaagttgataagaatcagaaatatattattgatgaaaccaatcaaaagctgtggaatgagtattgtaaagaattctttccttctggatcgaatgattgtccaataaagcacaaaaaaagtcgaaaatattcccttattgcgacgacaaaaccaagtggagcgttggttatgatcaaaaaaccagaacgaagaaactgttcagagggttattattgtatggcgattgataagaatataatatctaaagacaaagcggcattcatagctttgaagtcaaaaaacattgttttgtttgacaaatcaattttttcaaaagggtatgtttacgatacgactgaatacgataggctattcggaaaatctattgagactaaatatttcatcaacacagatacagccaaagactttgtcaaagatctacaacaaattgtgattacaatcagtacacacaaagagacagaggttacgcttagtggaataaaaaggacttacttcgaaaaatatttgttcaacaaaggaagtgagccaataaagcaaggagctttttatttttctgatagcgaacagaacactattaacgaaactaatatcaaagaattgatcattccatcgattcgacaagagaaatcaaaaccacctgcaaaaatcatagctataactaaagatttccttagtatgaccttaacattcagatcggagaacctgagaaaagttttagacaaacaagcggaaagtaaaaaatccgaggtgtgtgaacagagctcggatcatgattgatcttaaaatgattccagtttaagattagtttgttgttttacaaagataatggatctgaatatttttagcaattaaaaatacattaatttgtttttgattataaaatcacgtacagatctatcatgaaacatgtgattatctctgattatggcaagacattgggtgtgacgagtgaacgtttgctcatccgtgatagagaatcgactgaccaaagcattaaggagattccattacgcaaaatcaatacgatcagtgttcacaaacaaggcgtcagtttatcttcaaatctactcactgcatgtgccaactatggcattaaagtgtttatcggaaatcacgcaaaaaatttgtgctgtttatatggtaatgcacaacatggtgtcgtccaaaacagaattaatcagtttatgtttttacaagaagatgatcagcgtcatcgtttagcttgtacatttgtttatgggaaattacgcaatcaaagagcaacggctttatatttttcaaaacaacactgttcaatcgaaaagaaaaccgccattgctaatttagcccatgaacttgatcgtctttcaaagcaggtcattaatctacctcatacgccagattggctacccaaattaatgggatttgaaggcattggagccaaatattactggcaagcattgagaaaagatcattggcttggtgatgcattctcaggaagaaagggtcgaggtgcctcagattcagcaaatcaggcactaaactatgggtatggaattttatccagtgtgatatggaatactttagccaatgctggtcttgaagtctatcttggagcgcttcatgtgattagggcgggacgtcccgcgttggtattggacttaatggaagaatttcgtccgtgggttgttgatcgagccgtgatcaaactacgcaaacaattaaatgatcaatcgttaatccccaaaacccgaaaacaattgaccgcgactattttatcatctcttgaaaagcccattccttatcaaggtaaaaaagtaagacttgaaagcgtgatacagagacagtgttatcgattatgtggtttatttgcgggtcagaaaaaatacaaacctgtactgtttaggtggtaatcatgcaacgacgtcaagaacgtgaagtgttaatttcatacgacattgaaaacaacaaaaaaagaacgcagattttgaatcagcttaaaaatattggaatgatctcggtacaaaaatcagtgatgtggggaagattactgcccgttgatattgtattggcgcgtcgtgttctcaaagaagaactcgacaaggactgtgataaagcttttattcttgtcgtgaagctgtctgaacatgcggatttttttggacaacttccagcattgagcgaatacgatgaccacgctatcttctgatattgaaagtatccctatcaatcttattagacagcatcaattttgtcccagaattccatggtacaagttggtcttgaaatttgatcctcctgaacaggcatggatgatacaaggaaaacagtggcatgataaacaacatgatttgcaaaaacgacgtgtatctttatattcaagtgacaatgctatccatcatcatgaagcttgggttcattgtcctgaacttggtattcatggacaagttgatcatctgatcgaggaacaagaatatagtatcgttattgaatataaaatagattccaaaacaccaactctgggacagaaattgcaagttataggatatatttttgcagctcgtaccacatttgataagccagtgaaattcggcgtcatccttaaaggtcacaagcttaaacagcatcgcattcaaatgacgccgcttttagaagatcaatttcataataatttgtttgcgataaagaaaaatgttcaaatcggctatcttcctgacagcagcgcagaacatgcaaaatgcgctcaatgtgaatatttaaggtattgcaacgatcgatgaaatgttcgcaaaatatggtgattttgatgcaggttgtgagttttcgaacaagtaagtgtgtagatctaacaataaaatcttataaaacaagactttaccgttaggcctacacaacatacatcaacaaactaactactgaaacagatgcaatacttctgggtatagccgccatccaagaacc

SEQ ID NO: 188 - DNA, 24194 bp, synthetic construct
  source 1..24194: mol_type = other DNA
  misc_feature 1..24194: note = Synthetic
gagtccgctggagcatttgcagcacctcgatagcaaagccaccgagcaggcgctgcgcaactttctcggcggttttggttttcacggcgatcgcgcgctcgaagccgtcgctcccttttctgggggagagcgggcgcgtttggttttggcgatgttggtgtggcagcgccccacggtgctattgctcgacgagcccaccaaccacctcgatctagaaatgcgccacgcgctcagtcgcgccttgcaaggttttgagggtggcgtggtattgatttctcacgatcgccacttgattcgcagcctgtgtgacgagttgagagtcgtggccgatggctgctgccgagagtttgagggggatgtcgacgattacccgcagtggctacagcaacgccgagagctggaaagtcgcgagcaagagggcgcgactccgccaaaaaacccaaaggaaaaccgcaaggctcagcgccagcggcaggcagagcaacgcaagcgcttagccccactcagaaaacaagtgaaaagcgctgaacagcaaatggagcggttaaatagggataaacagcgactggaaacggcattggcggaagaggcgctttacacagatgccagtcgtaaagaagagctactggcgctcaacaaggagcagggcgaggtgttcaagacgcttgaagaaacggagctgagttggctggaagcctgtgagcagttggagcaggccgaggaagccgtttgatagcgttcggtcgatcccgagccgatagcgccaagcgacttttgtgtaggagcaaaaaaagagcccgcgggaggcgggcccaagtcctagatgatacgggtcgttattggccttggcagatggcgttgggggtgttttctaccacatcgccaaagtggaaagcatagtcgctgtagaccgcttgagtcccactctcgccggcgtgatcgccgataatgtaagtctctgcggtatcgaggccggcgtcagcataggctgcgatatcagagctggcattgccgtaggcgcgaataatgtcgatgccttgatcttgcaaatgctggatgtactcgcgcttgtagcgctcgtgctcctcgctcgtagccgtcgagggaatttcgccattgatattggtacgcaaatgccattcggcttgattcatggtctcgcgcagccaagcgcgggtgccactgctcatccagtaggggcgggccgtcatgaaaatgagctgatagcccttgtcgcgataggcctgcaccatctcttcggcgtagtaaaaagcatcggcgtttttaatacccagataatcgccaatttgttcggcgtcgttgatggtcagcgtgccatcgatatcgaagagcaccgcttgatgccccgctgcgcgcaccgacacataaccttgaacagcgctcaaatcgccttcgacaaccatgcgaacaatatagtcacctgcctcttggccagagatgggaacatagaccttgccgtcgctgttggttctaaactcgccaaggtattcccagtcgctcatgccgctgccgtatagataggcgtgtacatcttcgtcttcgaggtctttgtgcaatacccagtcgtaatcgaatttcccaatgactgtgacggcctcttgctcagcgacgatttcgtcgtgaaccatgtggtagggcgagtaccagtcgctcagccagcgattgccaaagtggcgaaagtccctttgctgtgggccatctaggctgggctgagactgtcccacactgtaatcggtacaggcggtgctgccaccgtccccaggtgggttggactcgggaggctcagcggggctaccccccgctgcctgtgccagcatggggagatgtaaactggcaaaaagtagagtctgaactaaaattttcatagtgattcccttttaaagtgatttagccaaaatgtgcgcggttcatgctaagtgagcgacctttcaagcgtttgttgagcagcgccgaatttgtcacctttttggcgcgcgtgatgaacagtgaggcgcacagttcgcaagcatgatcaaaaagcgacgaagcggccgatttggcgcatagaacaagcggggtagcgtcgatgaaacacagtgttttgagtggtttttttcagcggttttggttgggcacggtgagtgtcttgctggggctggcggtcgtttctgggacacaggccgagctggagagcttgtctgaggaggagtggcagcaggtggtggagacgcagggcgctaagcccgttggcaccgccgtgctgcccaatgttcaggattccggggcggaggtcgcgattgaggccattgagcgcgagcgtcactaccgtcgcgatattcaagccttcaaactagagcaggcggcccccgtcaatgatgcgggcgagcagtttgagcgcgtgcaaagtattatcgaacacaccatcggcgttcgcgttccgcccgcccagccgtagggtctctgctgcaatgaccgacaatgactctctatgccctgtcatttcaaactggatttggaatttccttaaccactgcccgccattctagacactcccccgtcactccaggcacacccctccgtcattccaggcacacccctccgtcattccaggcacacccacgtcattccagacttgatctggaatctccaaaccggagccctgatagggagatcctgaatcaagttcaggatgacgtcctcggggctcggttgggaggtcctgaggcttccgctcctgctcccgctccttatcgacagccggcgaagctgaaaactcgtcattgcgagcgcagccgaacttcgcatgcagccccacaccgtcgctcccgcgcaggcgggagcccagtggctttactaccctcacttaaagacgctggattcccgcctacgcgggaatgactcattctttaagtaggcaaggcttaaaactcgtcattgctaggaggcgcagccgacgcggcaatctgcggatgtatccgatggacagattgcttcactgcgttcgcaatgacgagagtttttgtaggagggcacttttacgcccgctatttgaggattcacccaacaaaatctccttttggggcgcgcaaaaaccgattgtttcctgtataatccgccctgcctattctggggctgtgccaaataaagcggctggccgcgactgtggagacaaggcatatctgtcttcaaacagagaggcttcgtacgaaaagtgagagctgcgcaaggcggctcgctcgatcaaccgtaaaatgaagacctagcatgcgaatcaagacgaaaaaaggtttagacctgcccatcgctggcgcgcctgaacaaatcgtccatgatggtcctgaaattaagacggtcgcagtactcggccccgattatattgggatgaagccgacgatgttcgtcaaagaaggcgatacggtgaagaagggtcaaaccctttttgaggacaaaaagacgccaggcgtcctctacaccgctcccgccgcaggtaccgttagtgcgattaaccgtggcgcccgccgtgctttgctgtccgttgtgattgaagtcgacggcagtgagcaagaatctttcaaaagctggaaacgcgaagatcttgaagtgctcggcaatgagcaagttcgcgagcagttggtgaagtcgggcctgtggccagcactgcgcacgcgcccctttagcaaggtgcccgccttagatgccaaacccagctccatttttgtcactgccattgatacgcgcccactcgccgctgaccccgccgtggtcgccgaggggcagatggacagctttgaagatggcctgaatgtattggctcgcatcacaccgaacccaatttacgtgtgccaaaagcctggtgcaggctttcccggtggcgatctcgaaacggttcaaatcgccgagtttgaaggcccccaccccgcgggtttgccgggtacacacattcaccacatcgaccctgtaggccccaccaagtctgtgtggcaaatcgattaccaagatgtgatcgccattggtaaattgttcaccacaggcgaactcgacagcagtcgcgtcgtatcggtggcaggccccatggttaaaaaaccacgcttggtgcgcacagtgctcggcgcttcggtgaccgatttaaccgatcacgatgtcgtcgaaggtgacactcgcctagtgtctggctcggtgctgcaaggtcacgccgctcagggcgagttggcctttctggggcgctatcacagccaagtgtgcgccttggaagaggatcgcgagcgtttgatgttgcactatgttcgcccgggcctcgacaagaagtctgtgctcaatgtgctgttttcttccctgaacaaatcgcgcctattcaacatgaccaccacgaccaatggcagcgcgcgcgccatggtgcccgtgggctattacgagcgcttgatgccactagatgtgttgcctacacagctgttgcgtgcggtcatcactatcgacacagatttggctcagcaactgggcgcgctggagttggatgaagaagatctttctctgtgtacctttgtcacttcgtccaaagccgactacggtccggcgctgcgcgagtgtctcaccaaaattgagatcgagggctaagcgatgcgtaagtttttagacaatatcgcgcctcatttcgaaaagggcggaaaatacgaaaagttcttctccgtctacgaaatgattgacactttcttctggtcgcctcctagtgttacccatggccagactcatgttcgcgacgcgatcgatttgaagcgcgtgatgacctatgtggtcattgccaccttgccctgtattttgatggcttggttcaataccggcatgcaggctaatacgggcatggcgggtgttggcatggatcaggtcaacaactggcgtggcgatctgatggccatgttcggcattgctcagggcgctgctgccgagggcaatttactggcgaatgtgttccacggctttctctactttgtacctatttacctgacgacgctgattgtcggcggtatctgggaagtgctgtttgcctcggtgcgcggccacgaagtgaacgagggcttcctcgttacctctatgctctacacgctgacgatgccacccgatgcgcccctttgggtcgttgcactgggtatttcttttggcgtggtcctgggtaaagaagtctttggcggcacgggcaaaaacttcctcaaccccgcattgacggggcgcgcctttctgtattttgcataccccgcgcatttgtcgggcaacagcgtttggacggccgtcgatggcgtgacgggagcgacgccgctgggcctcgccgcgacgggcggtatccaagcggtggaagaggcgggctttacgctacagcaaagcttcctcggtatgatcccaggttcactgggcgagacctcgacactggcctgtctcattggcgcggcgtttttgatctttacgaagattgcctcgcatcgagtcattttcggtgtgtttgtcggcatggtggcaacgacgtggctctttaacgccattggtagcgataccaaccccatgttcgccatgccttggtactggcatttgagcgtaggcggctttgccttcggcatggtctacatggccactgatcccgtctccgccgctatgaccaacaaaggccgctgggcttacggcatactcatcggcttcatgtgtgtggtcattcgcgtggcaaaccccgccttccccgagggcatgatgttggccattttgtttgccaatctgtgggcgcctattttcgacaactttgtcgtgcaggctaatattaaacggaggatgcagcgcaatggctagtggaaaagacagcgtatttaaaacgcttttcgttgcggtcgccgtgtgtttggtgtgttcgattgtggtgtctttcgccgctgtgcagttgcgtcctcagcaggagcgcaacaagctgatcgatcgccaaagtaatattttggccgtcgcgggctttgaagtggcgggtctgaacggtgcagacatcgcggatctctacaacaagcgcatcgaaacgcggattgtcgacttagacagcggcgagtacaccgatgcagtagagcccgcaagctacgatcagcgcgcggcctcgaaaaatcccgaaatgagcgaagcgttgagtggtgatgaagatatcgccagtattaaacgccaagcggattacgcgccagtctacgcagtaaaagccgatgatggcagcatccgctgctacattttacccattcacggctacggcctgtggtcgacgctttacggctttatcgccattgagcccgatgctcaaaccgtctacggccttggcttttacgaccacgcggaaacgccaggcctcggtggtgaagtcgacaaccccaaatggaaggctcagtggccgggtaaaaagctctataacgagcagggcgaactggcaattgaagtcgtcaaaagcggccaagtgaaagaccccgaacaccaagttgacggtttggcgggggcttctttgaccacaataggtgtcagccatttagtccgtttttggatgagcgaagccggtttcggcccgttcctcgacaagctaaaagattcttgaggaggcagccatgagtaaagcaaaagacgtcctactcgatccgttgtttaacaacaatcccattgccttgcaggtattgggtatttgttccgctttggcggtgacaacgaatttgaacacggcgcttatcatgtcaattgcactgacatcggtggttgcctgttccaacttttttatctcgctgattcgcaatcaaatcccggacagcattcgcatcatcgtgcagatggtgatcattgcctcgctggtgattgtggtggatcaggtgttgaaggcctatgcctataacatcagcaaacagctctcggtatttgtgggtttgattattacgaactgcatcgtaatgggccgcgccgaagcctttgccatgaaaaatccaccgatacccagttttctcgatggtgtgggtaacggtttgggttacagcctcatcctgattgccgtcggtacggtgcgcgagctgtttggctcgggttcactgtttggtgttcaactgctcgagttggcatcagagggcggctggtatcaacccgttggcttgatgctattaccgccgagtgccttcttcttaatcggtttgtttatctgggcgcttcgcgcgtggaaaaaagaccaagttgaagacgccgaatttgtgattaaagacggtcacgaggagcacgcctgatggaacatttgatgtctatggcagtcaaggccatcttcgttgaaaacttggcgatttcgttcttcctcggcatgtgtacttttcttgccgtatcgaaaaaaattaatacggcgatggggctcggtgttgcggttatttttgtacaagttgtgacggtacccgccaacaatctcatctatcaatatttgctaaaagacggtgcgctggcgtggatgggcttgcccaatgtcgatctcagctttttggggctgatttcctacatcggtgtgattgccgccatggtgcaaatcttggagatgtttctcgataaatacgtgcccgtactctacaacgccctcggcatttacctgccattgatcacggtgaactgtgccatcttgggtggctctttgttcatggtagagcgcgattacaactttaccgagtcggtgacctacggcgtctcctccggtatcggttgggcgatggcgattgtggtactcgccggcgtacgcgaaaaacttaaatactcagatgtgcccgatggtctgcaggggcttggcatcacctttattacggtggggctaatgtctttgggctttatggccttctcaggcgtgcaactgtaagcggggataatcatgcaagaaattcttctcggcgtatcattctttatcggcatcgtactgttgctggtagcactgattttggtagcgcgccgccaactcgttccacaaggcaaagtcaccatcgatatcaatggtgaaaaaaccattgaaactgagcccggtggcaaactgttgggctcgctcgccagtaatggtttgttcgtcgcctctgcctgcggtggcggtggtacctgtgctcagtgccgtgtaaaaatctttgaagggggcggctctattctgcccacagaagagacgcacatcacgaagcgcgaagcagccgcaggcgaccgcttgtcttgccaagttgccgtcaagcaagacatgaaaattgaagtgcccgaagatgtcttcggcgtgaaacagtgggagtgtacggtccgctctaacaacaacgcggcgactttcatcaaagagttgatactcgaactgcccgagggcgaagacgtcgattttcgcgccggtggttacattcaaatcgaatgtcctcctcaccatttaaagtattctgagtttgatatcgacgaggaataccacggcgattgggatcgatttaacctttgggattttgagtcaaaagtagatgagcccgtactgcgcgcttactcaatggccaactaccccgaagaaaaaggcattatcatgctcaatgttcgcgtggcctcaccgccaccgggcagcaaaggcattcccgctggcaagatgtcctcttacatctttaatctaaagcccggcgacaaggtgtcgatttctggtccctatggtgaattttttgccaaagagacagatgcagaaatggtcttcgttggcggtggcgcgggcatggctcccatgcgctcacatattttcgatcaaatgcgccgcattaaaaccgaccgcaaggtctccttctggtacggtgcgcgctcgaagaaagaaatgttctatgtcgaagacttcgacatgctcgctaaagagaacgacaacttcgagtggcatgtggctctctccgatccacaacccgaagacgattgggacggtctcaccggtttcattcataacgtactctatgaagagtacttaaaagaccacccagcgccagaggactgcgagttctatatgtgcggcccgcccatgatgaacgccgccgttattaagttgctagaggatttaggcgtcgaagaagacaatattttactcgacgacttcggcggttagcgcaccccaaaccccggcccagccggggttttttctatctaaaaaaacaaaccaatgtcccacctcctcaggcgcaccaacacccatcacgcccgcaggagccgaccccacaggcgaacccaacacccaccacaccgtaggagcctgccctgcaggcgaaccaaccaaacggccaccaaaaacacacacaaccccatcaacaaaacgcaacaacattgccaagcaacaaaggcaatgccactatcaacctaaacaaaccatgctcaaaaaaatgaagccaatacatctacaacgtatcgcgggaagctgccttgtcatccttgggctcgcctttatttactggggctacgaagcccaacaaagtgtgggaaatgaactcttccaatggttcgcacaacgctcaaataataatgtctacatccgatacatggctggaacaatcgccaccagcgttggttgcttttttctactcagaaccccaacaaaatagaacataaacaacaaccaatccatgctcagacgtgggtcggacttcagtccgacaatcccaaaaaaataagaaaatagaaacggatgagaataacgattaattgtctaagattgagctggcatgctttcacggtggcgtatccctacagaaaccgctcgatgacgatagggagaaatgccgaatagcgcgtgagggaatcgcaagatagacagttgggaaggccccatttaaccacaacttttattcattgcgcctggctaacttaagcagtgaatccacagtctgtagagactcttggaaaggtggtaaagaaagagtaagttgtgcagtgaataattaaacttacacgacataacctgtcgtatagctgcgcttgaatagggaaagctaaataatagagggtaaccatgacaaaaaactatatctcaccaattgcaattgacctcggtgccaagtttactggggtggctctttaccaatatcttgagggagcagactgcacgcaagaggtagcaaaggggcttttggttgatgacagaggtaatgttacttggtcacaagaaggacgacggggtaaacggcaccaggttagaggctataaaagacggaaaatggccaagaggctactttggttaatacttgatagtgaatacggcatcaaacgagaagaagtcacagagccactattaaaattcatcaatggactattgaatcgtcgcggttacacatatatcagcgaagaagtagatgaagagtcaatgaatgtgagtccactacctttcagcgagatgatgcccgattattttaattcaagtgctccgcttttagagcaattggctaagttattatcggacaaaaacaaattagtgagatttagagccgagggtaaaataccctctaataaaaatgagtttaaaaaactacttgataccgcgcttgacggaaaatataaagatgaaaaaaaggagctgtcagaagcctggggtaatatccttatagcatcagaaaatgttttaaaaagcacagtcgatgggcacaagtctagaagcgagtatcttgcgaacattaaggaggatattaagagcaacgaagagttagagaagcaaattagctcaaaggaaattgatggcttttataatttggttgggcatttaagtaactttcaactacgactattaagaaagtacttcaatgacccaaatatgtctggagttagttactgggatgagaagcgactagagaaatatttctaccagtgggttcaaggctggcacacaaagggagggacagatgaggctgaaaagaaaaatataatattaaaaacaaaaggtgcccctctgctaaaaacgcttaaaagtctaagtgcggacctgacaattccaccatacgaagatcaaaataatagaagaccccctaagtgccagtctgttttgttgtcagatgaaaaactaactatgcattacccaaagtggaaagagtgggtagggcagctagtaaaacagaacgataatgcctatttaaatgaaaatgtaactttggctaatgcgcttcaccgtattgtcgaaagaagccgatcgatcgacccttaccagcttaggcttttaatatccatcactgacgcagagaaacgaaacgatctagcgggttataagcgattaaagctttcccttgggtcagaagttgatgaatttctactgctcgtaaaaaacatagtggatgaaaccaaggaagctagggaggggctatggtttgaaacggaaaataaactgttttttaagtgtggcaaaacaccccccagaaaagaaaaattaaaatcaacattactgagtgcagttttaggaaaaaatctatcagatgatgagcaatctagctttatagaagagttttggaagagtggcacacctaagatagaacgaaggaatgttaggggttggtgtaggctcgcctcacaagtgcaaaagacatacggcgtctatttaaaggaatatggccttcaacagttacataagcttgaggctggaaaaaaacttgatgataagcctttggctctgctttataagaattctgggctgattgcttcgaaaataggggaagcgctaaatattgagcctgatgaagtgagccgcttcgcctcgccgcatagtttagcgcaaattttcaatatcatagaaggtgatgtcgcagggtttaacaaaacgtgtagagcctgcacatacgaaaatatctggagaatgcaggaagaaaaagttgaatcactacttactaatcaactcttatctgaaatacatggcgaaagaaaagtaccgttaaaatcagcgatgtgcactcgactttctgccgactctacccggccatttgatgggcagatggcgtcaattattgaacacattgctcggaaaatagcccagcataagatcgcgcaaattaatgatgtgccaaaagagttttctattgatatccccatcattattgaaagcaatcaatttagctttaccgctgaattagaagagattaaaaggggaagggggtccgcaaaagccaaaaaagcaaaagaattgggtgaaaaaagtaaagcaggatgggtaagtaaaactgagcgaataaaaacatcctcagaaggcatatgtccttatacgggagcacctctaggtggcagcggtgaaattgaccatatcattccaagaagcctgacaggaagaacaaaaaaaacagtttttaattccgaggccaacctaatttactgttcatcaaaagggaatcacgataaaggaaacagggtttacgttatagagcagttgaacgataagtatttgaaaaaacaattttctacatcggatgtcaacctgattaagaagaaaattaaaaccactattcaacggtttaccgaggggggagaaaaactacggtcatttagtgagctctccagagaagaccagaaagcattccgccatgctctttttgttcccgaactgaaaagtgaagtgactagccttctcgcagtaaaaaatattacaagagtcaatggaacgcaggcttggcttgcaaaaaaaattgcctctttacttgcggaacatctagataaacaaggtcgtgattacaccctgagcgcccaccaaattgacccatggtcagtgagtaaacagcggaaaatgctagccagcgctgaacccatttgggctaagaaagacccgcagcctgccgctagccatgttgtagacgccgtgtgtacatttctcgaggcactagagcagccgcacacggccagtaggttgaaaacaatttcttccaccagttttgaaaagactggttggcgaagcgctcttattccagacttgattaaggttgatgcgctcgatcggcgacccaaatatcgccgatataatattgggagcacatctttgtttaaagatggtatttacgctgagagatttttgcccattcttatagatgaaaatgggctgatggctggctatgacatagataattcgctaaaggcaaagggcgctgacgttgtgtttgaaagcctctctccatttcttttgtttaaaggtgaagaggtgggagcccagtccctttctgactggcaggagcgaattgatggacggtacttgtatatgtctatcgataaggtcaaagctttcgactacttgcaagaaaaggtgggcgaaaaggacattgctgctgagctgctaaactctattcatttcacgcagagaaaaacagaactgcgtgctaagttttctgatgactcaggcaaaaagatgaaaacgctcgacgctatccgtaagagcttaaagctaacggtgacagttaatgagataggaaaaagaaaggagaagtgtgggttttccggaaccattgggattcccgcaaaatctgcttgggaaaacctgcttgacgagccactgcttgagacctactggggaacaaagatgccaccacaggaaatttgggagaaggtttaccgcaaacatttcccaagaaatatccccaaccaagcgcaccggaaagtaaggaaagatttctctcttccagttgtagatagtgtctctggtggatttcgtgtgaagagaaaaacaccaaatggctataactatcagttattagccattgatggctacagtgccgttggatttaaaaaagaaggggataacgtagactttaaatctccagcgctggttccacaaattgcagaaagtaaatcggttactcccattagtagtgagttagttcatcttgataagaatgaaattgtttacttcgatgagtggagaaaaattgatatatccgactccgatttaaaacaatttgtttcatctcttgagctagctccaggctctcagaataggttctatattcgctttacggttgatgaggaccaatttgaaagacacttcaaatcggctttacgtgtaaatggaatccaagacttagataccgtcaataaaacctttgactggaatcgagagatacccagtttgctcattccgccccgttcaaacttgttcttactggaaacagggcaaaaaataacttttgaatatattgccaacggcgctaacgcagaggtcaagaaagcatatagcttgcggagagcttaactatgctaaggcacataaccatcagtggatacggccagtttcttggaattaaaagcgaaagattaactgttcaagaatcgggcactcttatagcggagtaccccttgagcaggattaagacactgacggtggcaaaagagggtgtttccctttcctctaatttaattcttgcctgctctgctcggggagtgaaaatattttttttggattttcgcggacggcccctcgcttgcataagtcacgctaaccagcatgcagtctgctctgtaagggagtcacaatttcgtttcattcgctcgagcgaagcgagagctgtgtctgcaaaaatagtgcacgggaagctaagaaatcaacgtgcggttcttaagtatttttcaaagtcactacgcaatagtaatttgcctatactccatgccaacgctgaactactagagcagtatgcagtacgcgctaaaacttacagcccgttagctttggatggctggcgtaatcccttaatgggaattgagggccaagctgccagatgttattgggaggctctcaaggaggctgaattgttacctagctcttttcagggaagggtaggtaggggggggcgccgatcttggcaatattagccttaatctggggtactcgattctccagtcctatgtttggcactgcttaattaatgcgggcttggaagtatatgctggtgtttatcatgcagaccgggatggcaggccctcgttggtctttgacctcatggaggaataccgtgcctgggttgttgatagagtcgtgattaaaaacagatctgctcttagtaatgccaaaaaattcaacccgtctttgaaacggaggattatttctggcgtccataaaaccatggcgacaaaataccattatcgtggtcgtaagctcacattagaaacgatcatgcagaggcaaatttatcgcttagcgggtaatttttctggtgatacatcctacaggccttacttttttaggtggtgatatgaagctctatcaagacgttttagtggcttatgacattgaggataataaagcgaggagcagggtgtttgaaaagcttaaagatattggcctaaagccagttcagaagtccgtcttttggggttgtgtgctggcgactgaaaagaaatcaatacacaggctactcaatggagagctagaacctacagaccgtgcctttttgattccaatgagccaaaagcaagcacaggctgcttttatttttggctatgctacctcccctttcaagtcgcctaatagattcgatgtactctgaaagcattcctattagctggatacgacagtatcttttttgcccacgtgtcccttggcatatgatggcgggtacgccgacagcaacacctatttgggtcaagcagggtgcgaactaccatttaaggcaaaaagcactcactagggagagaaaattagagcgccttggcgtggccgattatgcgaagacttttgagaaacctgtgcagctacctagcttaggtttacatggttttgttgatctagtactgacgggtaaaggagaggtctgcccagtagagtttaaactcaatgataagccccctgtaagaggcgcccggcaacagctcatagcctacggttttgccttagaggagatgggcattggaagctttgatagggggtttattttgtgtgggagccaagggaagacatacaagcaggagagaaaagaaaatagttttaaagagttacaggacttagtaggcgatgttagaaaggcgctttcatctccatttttaccgtacagcgacgcccaaaaaaataaatgtacccaatgtgaatacttagcccactgtaatgacagggtttagaaatgaaaaaacccgacatgccgaagcagttggtcgggccacaaacgtgattttctatgatttcagtgtatagaatgttgggatgcattctgaatacgaagctatcacccagttcgaagaattgcaagaaagtgccgtcacctaaccaattcgaatattgcgccctgaaagccgatgctaacccactgaaatttaaacagttaacaacggcgtttcagagcttatcccaacaaaccaacagctgaaacagacagcacacgacgccaccctgagccgtatggcgtttcagagcttatcccaacaaaccaacagctgaaacaaacatcccttgggcctaattcatcatcgaactgtttcagagcttatcccaacaaaccaacagctgaaacccgtgatgttgccgaactcagacgcgaaggccgtttcagagcttatcccaacaaaccaacagctgaaacgaagtatcgacaccccagaacacccggattttttccgtttcagagcttatcccaacaaaccaacagctgaaacattgcaattttcaccgagagatcggtgaagcggctggtttcagagcttatcccaacaaaccaacagctgaaaccttcatcgtcgttttcaatttcaaccggtgctgcgtcgtttcagagcttatcccaacaaaccaacagctgaaacgcgcttttgcacatcgacgcccatggtgatgaggtttcagagcttatcccaacaaaccaacagctgaaacaggtctatgtactttttccaaatctcttttctcgtgtttcagagcttatcccaacaaaccaacagctgaaaccaaacgcttcgtcgtggtgaacgtaaacgtctcggtttcagagcttatcccaacaaaccaacagctgaaacgtagcagaaacgagcaaagaatcactgagagagcgtttcagagcttatcccaacaaaccaacagctgaaacagaccgagatcggcgtttacgctgtcgccgttaagtttcagagcttatcccaacaaaccaacagctgaaaccggatgttgaggccgtgggcgttttcgtcttggtcgtttcagagcttatcccaacaaaccaacagctgaaacgatgaagccgtggccgagagcaccgtggcccacttgtttcagagcttatcccaacaaaccaacagctgaaacgtgcgtatgaacggggtttgaacattcctgtgtacgtttcagagcttatcccaacaaaccaacagctgaaactaccaaattggacgggacggcccagtcacgactggtttcagagcttatcccaacaaaccaacagctgaaacagaggcaagcgcggtgttactcattgggggagttgtttcagagcttatcccaacaaaccaacagctgaaacttgtctttgtttcgtctacgggggtaaagttatcgtttcagagcttatcccaacaaaccaacagctgaaactatcgctcccgccaatgttgccgccttcattcgcggtttcagagcttatcccaacaaaccaacagctgaaaccacccaactcttcttcatcgatttcaatttcatgacgtttcagagcttatcccaacaaaccaacagctgaaactataatggttgaatttactaaagaagacattaagtttcagagcttatcccaacaaaccaacagctgaaacgatctacccgctacaactctggcgtcttattgtgtttcagagcttatcccaacaaaccaacagctgaaacggtgggccgatggctgccttctttgagagcctgtcgtttcagagcttatcccaacaaaccaacagctgaaacaggaggagcgggtatgaaaaccattccctacaagtttcagagcttatcccaacaaaccaacagctgaaactatgtttcaggttcgcttttgtgcatggccgctgtttcagagcttatcccaacaaaccaacagctgaaactttcggctttgcgccagtttttatcgttttcaacgtttcagagcttatcccaacaaaccaacagctgaaacttgtagcgttactggatgcgtttgactttctacggcgcaggatgctgtctcggctgtttcagagcttattccagcaaatactcccttgttattgcgaggagtcggactaagcctgttgtcactgcgaagagcacacttctttcactctcgtttctaattttcctacttcgtgaatacagcgacctgctttggcgtacacactgtcgccaccctcgtggaagcggtacatggcgttccagcagctttgagagagggctttaagttcgtggtggagtgaagggtcagttaggctaagttttttagtgtgttttagcagggcgtagagtgccgatttagagtcgctaaaattgcccgtgctcatgctgtcactgagttcattttttgcattgtcgatggcttttaaaaggggcttaaatgtattggcatctggatggctcatggagagtttctcggtttatttgtttttatcagtgtagtgttgtttgcgtcattttgtgtcgcaaattgggcggtcttttttgtggcgctgtggagaatgtggtgagggcgtttgggctgttccgccccctctccccggccctctcccgctaggggagagggggatggattttgtaggagggcacctttatgccattgggtgctcgggccgacggtggtggcactgttttggtaatgtcggcctgaaggccgacccacggtggctttttttggtggtgtgaagcttgcgctccggtttacgccccttgcttacatcccttcggtaaataaagttcaaaatgtcgatgtcctcgcacccgagtcgaaagcgggataaagcttagattcgctagtgtcgggctgaagtctgacccacggggggctttgtcggcaaatgaagggccgatagtgagttggcgcgccctgaggggaggggttgtcgcatttcatggggttttggcgctggggaatagcgtttggtggttttggtcggtgtttgtggcagtttctgtcattgttggattttgctgcacagcacaaagtagtgctttgtgcggcgcacaagcattgtgcttttgtgtgttgtgcgaatcattttgatgaattgaatatcgaggttgttatgccgaagaatacattgtctacctcccgcacgggacgcgttgccatcgtcgatgcgctgcgtacgccgtttgcacgcattgcgacacactatgacgatttaaacgcgattgatctgggggccatggtggtgtctgaattgatggcgcgcaacgatattgcgccaaaggatttagatcagttggtgtacggtatgacggtgatgattcccgaagcgccgtttatcgcccgcgaggtggcgctggcctgtggcatggacgacgtcgatgcctattcaattactcgcgcctgtgcgacgagctttcaaacggcctccagcgcagcggaaaccattttggcgggcaatgccgatatcgtgattgcgggcggtaccgattccacatcgtcagcgcgtctgcctatgtcggccaagttctcaaaaatcatgcgcgatgtcagctttgccaaaacggccaaggatcgcttgaagttgatcagccagttgcgcggcaaagacattttgcctcaggcaccctccattaccgagtactcggtgggtgaaaccatgggccagagctgcgagaaaatggttaagaagtggggcgttagtcgcgccgagcaggacgacttggcccacgcctcgcacagcaatgcggcgaatgcttggcagcaaggttatctcgacagccaagtcatgacggctttcttgccgcccaagggcgagcccctaaaagacgataacctcgtgcgcaaaaactcgcagcgcgccagctacgacaaactcaagccctcgttcgatcgcgtgacgggctcagtcacggcgggtaacgccagcccgttgaccgatggcgcctcggcgctgttgttgatgagcgaggaaaaagccaaggccttgggttacgagccgctgggctacattcgctcctatgcttttgcggcaaaaacgccgaaagaagatttgttgatggggcccgtgttggccgcgcccactgcgttggagcgtgcgggtatgaaactgagcgatatgaccttaatcgatatgcacgaggcctttgccggacaagtgctgtgcaacatccgtggcctagagtccgatcgttacgcacaagagatgatgggcttaaagcgcgcggtgggcgaagtgaatcgcgacattctcaatgtaaacggtgggtcgattgccttcggccatccctttggtgccacgggcgctcgcgtcattgggcagtccatcaatgaactcaagcgccgtggtggcggcattggtttaaccaccgcgtgtgcagcgggtggtgtcggcgccgcaatggtgctcgaagcagagtaattgggagtagagtcatgagcgaagaaacaaaactgaatcgtgcgaatgcatcgaaagcggcttcaaagaaagcctctaaaaaagtgactaaaaaaaaggtgagcagcaaaaagagcgcggctaaaaaagccacgaagaaagtagcgagcaaggcgactcagcccgcgcgccaacaaagcgcttttcaattgcgcgtgcgcgacgacaaagtaggcgtgattgaaatcaatgtgcccggcgaagcgcaaaataccctaaaggctgagttcgccgagcaaatggacgatgtcatggatcaagtccgtcgccaggcgggtttaaaaggcttggtgctgatctcgacaaagcccggttcttttgtggccggcgcagacattaacttgttcgatagtattggcagcaagcaggaagtcgtcgagctgtctaaaacctgtcatcgcggctttaaagccattgaagacctcaatatccccgtcgttgcagccatcgaaggcgcttgtctcggtggcggtttagagctggcgatggcctgtcactaccgcgtggcttcgagccgatccaacacggcgctgggtgtgcccgaagtcatgttggggctgttgcccgcgggtggcggtacacagcgtctgccgcgtttggtcggcattcccgcggccttggatttaatgttgacgagccgacagctcaaacccaagcaagcgctaaaaatgggcttgattgatcaaatcgtgggcagcgaagcgttggaagagcgcgccgttgcgctggcccttaaatcgacggctccgcgccccgctaaatcgatggagctatctcaggaagcgctgcaagagttggcgctagagaaaaatcccgtgggccgcaaagtggtcttcgaccaagcgcgcaagcaggcggccaagaaaacctacggcaactatcccgcgcctgagcgcattattggtgcggttgaaaaaggctttagtcacggcattgaggcgggctacgaagaagaggcacaggcctttggcgatttggccatgagcgatgtgtcgaagcagctacgcggtatcttccacgccaccaacgcactgaaaaaagaaaccttcgttgccgatgagagcgtagagacgcgcaccattgagcgtgtgggcgtactcggtgcgggcttaatgggtgcgggtattgcactgaatacagtggcaaaagccaaactgcccgtgcgtttaaaagaccgcgatgccaagggcctgtcccacggcgttggctatgtggccaagtactatgacaagcgcgccaagctgggtgcgatgtctcagttcgatgccgaagcggccaagcgccaagtgacttacaccgatcaatacacgggctttaagcgtttagacttggtggtcgaggcggtgtttgaagacttaggccttaagcatcaaatgctgaaagacaccgaagccaacggcaacgagaatacgatctttgcctcgaacacatcgtcgattcccatcagcgatatcgccaaggccgccaagcgccccgagaatgtgatcggtctgcactacttttctcccgttgaaaagatgcccctgttggaaattattaccaccgacaagaccgcacctgaggtgacgaagggctgtgtggcgtttggtaaagctcagggcaaaacggtgattgtggtgaaagacggccccggcttttacaccacgcgcatcctcgcgccttacttaaacgaagccagccgcttgttgttagagggcgttggccccaaagagctcgacaaagcactgcagcagtttggctatcccgtcggccccattaccctgttggatgaagtgggtatcgacgtgggaacgaaagtgggccccgtgttggaggcggcctttggcgagcgtatgcaatcgcccgacgccgcggatcgcatgatcgaaaaaggtttcctcggccgcaaggccggcaagggtttttacctatacggcgatggcgttaaaggtaagcccgtcaaccaggaagtatttgacgcgatgaacgtcacaccctggaagaaccccgatctcgttgcagcggctgagcgctgtacttggatgatgattaacgaagccgctttctgcttgcaggagggcatcattcaacagccgatgcacggcgacatcggcgctatcttcggcttgggcttcccgcccttcctcggcggcccattccgctatatggatagccttggtctacaggcctctgtgcaaaagctggagactttggcggagcgccatggcgagcacttccagcctgctcaaattctggtcgatatggccaaaaacaacgacaccttctacaaaaactgaaggggagattaacgatgtttcaattaatgatgaactggatgcgcgacaacaaagtgttgccgcaaatttctgatacggagcgccaagcactggaggcgggcgatgtttggatcgacggtcaattctttggcggcaaggtcgacttcgatgcgattctcagcgagaactacgatcagttgtcccccgaggagcaagcctatctcgacggccctgtagaagagctgttgaatagggtagatgcctaccaaattaaccgcacgcgcaagctgcccgatgaagtcatccagtttatggccgacaacggtttctttggctttcaaatcgccaaagaatacggtggcacgccactatccacgctgggcaaatcctgcgttatggccaaggttacgcccgcttcgggtttggtgtcggctttgattgtgattcccaattcactcggcgccgccgagctcttgggccactacggcacggcggaacaaaaacagcactatttacccaagctggccaacggcgagtacattccctgttttggcttgactgagcccaccgcgggctctgatgccgcttcgatcaaagccgaaggggtggtgtttaaggacagcgatggcgagatcaaattccgtctcaacttccgcaagcgctatatcacgctggcccctatcgccaatttgatttctctagcggtgcgcattcaagaccctgaaaacctattgggcaagggcgaagatgtgggcattagcgtggtactgcttgagaagggtaccgagggcctgcatattggcgatcaccacgagccgattggcgatgccttccccaacggccccattgtgggtcgcgacgtgattgtacccgcggagaatgtactcggtggtttagagtatgtgggccagggttggaagatgctgatggagtcactggctggcggtcgcatggtgtctctgcccgctaccggtatttgtggcatgcgccactcggctatggttgccggtgcttactctatggtgcgtcgccaatttggtattcccattgggcaaatggaaggtgtggagcaaaaggtcgggcacattgcggcgctgacttatatgtttgatgccgcccgcgtatttggttgctctgccgtggacaatggcattcaacctcccgtgatctctgccattatgaaagcctactccactgagtatggccgcgtgctgggtacggatgcgatggacgtggccgcgggctttggtgtgatgcagggacccaataatgtcatggggcgtttgtattgttctgcgcctgttggcgttacggtggagggcgcgaacattatgactcgcacgctcatgatttttggtcagggcgcgacgcgttgccacccctacgcctttaatgttgtcgaagcggtagagc

SEQ ID NO: 189 - protein, 1280 aa, synthetic construct
  REGION 1..1280: note = Synthetic
MNELSINIDMGAANNGVFIAITNEDSIVYKNAFNIYFDKNLTFSKNDRTARRHARRSYDRDRFILRLLNEILPINSLSQSQKEMIYGLFKNRGFNYHNIEFNESLDDDVVKFLNSLDGYIFGLSKNKDEFEQVLNEIVVGHSNDEIKEILETQSQILSNIDKKNKEAIKASKNIQSLLQSIRNEIDKNNKHRISYLKDIKELIYKDCEFIIQKSDKFDNLDEFYNFVGNIANFQTRILRRYFNNKYLDNINFDDAKLKKNIIRNINYMEYITDIQKSNKLNMLNSLKTKSALEYLKSIDPVITIPPYENRKNKNPQKCNTLILNIDKITPSLVNSTYKILNSDDFTHIRRDENGQLISINDIDENNIAKYLQRVLDISKESLMDTALYPRTLDNNSKIFADTFRLNSDEIREFKEFARRYYNEVDSAKKGIITNDLLIPCGKNTPHKNRNKNELISALFGKNITKDDVISLEEFMLKNKIKGNRGYKGFFENLNELKKSYQNSFYHNLNNDEINDKDIQAILELYPKVAQNISNHNSIFEFKLPFDKSNLNTNINYLSQLGDIIYDEKNRGFLKTCKCHTLENLIRSGSQNAICTRLPSNSARLINGKIEMYLNRLAYEISTALKPEILQDISYISINVEMNKFSFENSASNLNLISKRQKAKEIICPYSGQKIDESNCEYDHILPRSKGLYNSRANLIPASSTANLQKSNQSYTLENLDQKYLDSIYEKIKVENLDEFKNFIDTQMAKININKFTNFDNLSNLEQIALRHALFYKDSNSFAKALEILKLDRIKTHSNGTQKRFVNLLIQKIKDRLNSSNQNLEFSVNFINAELVSAIRNELSKEDKELQKAKIQDSHSHCIDASIVFYYTNSKLINNSKGQREFKYDYSYIKPEYSNKITMQSKKYLELNSNKIARKKLFDDSVYSLVYENANILKDKEVNTLLDLGLLHTKENGKKVAITSDFKSSKFYISTHKVFDLLFKAFNDGDIKLLNKLKFLDNHLSFYIRKDIFAIIKDKDKSSMFFTNKNELKTLDEIDEKIKTKNIDKFYHILKANESKIIEIKDGKNILKHQEIKELFKECFYTKQAKRSRNRSRVIYSLPIKASSKYIIRKNSGYAGLSNSDIATKTYIDLDSKNIIKIPFFSKNILPCKIADIINIIKLKSKNIKQIYKLLVTKNLPSAITKLEFIISQANRHDIEVEFDKSKIGDYNLLDQTSRDEFIDKYLSGEFKELLGEPRDKKITIIKDTKDSLIIAYCVKQTSAMNKKIMIDNLIDETSSS

SEQ ID NO: 190 - protein, 1273 aa, synthetic construct
  REGION 1..1273: note = Synthetic
MRELSINVDMGAANNGVFIVNTDEDSILYKKAFNLYFDKQLQFSKSDRTARRHTRRSYDRDRFILRLIGEILPIKMLNKEQIEMIYGLFKNRGFNYHNIEFDENLDDEVAEFLSKLDGYIFGASKSKDEFEKILNEVVVDHSNSEILEILDTQSCILNSIDKSNKNVLKASKSIFSLIQSIRNEISKNNKHRTSYLKDIKDIINNKCEFITQKSDKFDNLNEFYNFVGNISNLQTRVLRRYFNSKFNAEFDDEKLKINLIRNINYMEYIDKKSDKEKMLNTLNQKSALEYLKSIDPIITIPPYENRKNKNPQKCNTLQINSDKITANLLSATYKILKSDDFVHILRDENGQIASVIKDCDIAKYLQRILDVSKDSLMDTSLYPRTLDNNPKIFADTFRLNSDELREFKDFAKRYYDEVDNAKKGIISANLLIPCGKNTPHKNGNKSELVSALFGRHITNDDLVNLEKFMLENKIKGNKSYKGFFEDLNQLKKSYQNGFYHKLNSDEIGDKDIKSILELYPKVIQNISNHNQIFEFKTPLDQNNLNTNINYLSQLGEIIYDEKNRGFLKTCKCHTLENLIRSGSKTAICTRLPSNSARLINGKIEMYLNRLAYEISTAIETESLKDIKRININVEMNKFSFENNAYDLKLISKRQKPKDLICPYSGQKIDLTNCEYDHILPRSKALYNSKANLICSSSTANLQKGNQNYTLENLHQDYLESIYKIIKIKNLDEFKHFIDDKIKNIDINKFTNYDNLNSFEQIALRHALFYKGSNSFNKALEILKLDRIKTHSNGTQKRFVNILIQKIKDRLAKLNLSSDIEFSVNFINAELVSAIRNELSKEDKELQKAKIQDSHSHCIDASIVFYYANSKLINNSKGQREFKYDYNHIRPEYSNKITMQSKKYLELNSNKIARKKLFDDGVYSLVYENTNILKDKEFNILLDLGLLHTKENGKKVAITSDFKSGKFYISTHKVFDLLFKAFNDGDIKLLNKLKFLDNHLSFYIRKDIFAIIKDKDKSSMFFTNENKLKTPDEKIKTKNIDKFYHILQANESKIIEIKDGKNILKHQEIKELFKECFYTKQAKRSRNRSRIIYSLPIKTSSKYIIRKNGGYAGLSNSDIATKTYIDLDNKNIIKIPFFSKNILPCKIADIINIIKLKSKNIKQIYKLPITKNLPSAITKLEFIISQANRHDIEVEFDKSQIGDYNLLDQTSRDEFIDKYLNGEFKELLGEPRDKKITIIKDTKDSLIIAYCVKQTSAINKKIMIDNLIDETSSS

SEQ ID NO: 191 - protein, 1248 aa, synthetic construct
  REGION 1..1248: note = Synthetic
MKSLSINIDMGAINNGIFIATCQDDKIIDKNAFDIKFDKGKLNFSKIDRTLRRHTRRSFDRDRFVLRLLGEILPLEHLSNNQKEKLFGLFKNRGFNYLNVNFNTEIDSDSLEILNALDGYYFKDCSVLNDFENSISKIFNELENNEILAFLDDQVQILNQAKEHKNKILNKNINAILEFLESIKNESFKNNKHRKSYLKDIKNEIENSFKDIILKLKIFKNSQEFYYFIGNIANFQTRILRRYFNAKFDLVFDDAKLKKNILRNINYLDFISTDEKANKSKILENLNAFSALEFLKNTEPIITIPPYENAKNKKPQSCQALVINDEKITPSLKDIARKILSNSNFERLKTDENGVLADNIKDNEIAKYLQRILDISKGILDDKELYPRLLGKDENAKIFAQEIRLNSTELKEFKDFAKKYYDEVNLAKKGIIKNELLKPCCLHTPHKNKNKNALISALFLKSITQKEIENLEDFFANNKISGNQTFKGFFERLSELKKRYQNRFFHILEHEPTKELEGILKNYKKVMEKIVEHNSNFSFKAPFDTSTISTNFNYLTQLGDIIFDEKSRGFAKTCKFHTLENLIRSSAKSAIASRLASNSARLINGKIEMYLDRLAHEIIKKIDFTDIYNIQINVEMNKFNFESNLSKLGLAKERQKDEESFICPYSGAKISQTNCEYDHILPRSKGLYNSLANLIPTSSTSNQIKSNTKYLLSNLDENYLKYIFAKTQTTDLNSFKTFIDENISKIDENDFTNFKNLSFFEQIAFRHALFLDTDDNSFKKALRLLKLDTIKTHSNGTQKRFINIFIEKISKLTQSGIDLNFIDSKLVSSTRKDLAQNDTSIAKQEIQDSHSHCVDASIVFYLANSKIIKGQIEPDYDYFKDIYPKDSDIILPQSKQYLELNQKSQKSKKLFDDSVYSLVYEGKFDEKQKKILTQYELLKENGFVDTHKVFELIFKSFKDKDTIVLKDLKFLDNHLKSYIRKDIFSIFFNEKGELKEAKELKSATKNIDKFYTILSQNQDKIYTIKLDEKAKEKKTLQRNKVIELYKEIFYTKNAKPRARGKNRVTFSLPVYAKDAKYAIKRNSGFAGLKNKDIATKTYIDIDSREILKIPYYSTNVLPIRISDILVILSLQSKNAKQIYKIKIQDNLPKQIVSLDFILSQANRHEVLVSFDKSKLEIQNINDDNDENAFIQKYLCDDFKEFLGKPENNKIEIIKNSDDILAIKYRVDRTSKANKEIIVKALSDEAPSA

SEQ ID NO: 192 - protein, 957 aa, synthetic construct
  REGION 1..957: note = Synthetic
LEFLKNTEPIITIPPYENAKNKKPQSCQALVINDEKITPSLKDITRKILSNSNFERLKTDENGVLADNIKDNEIAKYLQRILDISKGILDDKELYPRLLEKDENAKIFAQEIRLNSVELKEFKDFAKKYYDEVNLAKKGIIKNELLKPCCLHTPHKNKNKNALISALFLKSITQKEIENLEDFFANNKISGNQTFKGFFERLSELKKRYQNRFYHILEHEPTKELEGILKNYKKVMEKIVEHNSNFNFKAPFDTSTISTNFNYLTQLGDIIFDEKSRGFAKTCKFHTLENLIRSSAKSAIASRLASNSARLINGKIEMYLDRLAHEIIKKIDFTDIYNIQINVEMNKFNFESNLSKLGLAKERQKDEESFICPYSGAKISQTNCEYDHILPRSKGLYNSLANLIPTSSTSNQIKSNTKYLLSNLDENYLKYIFAKTQTTDLNSFKAFIDENISKIDENDFTNFKNLSFFEQIAFRHALFLDTDDNSFKKALRLLKLDTIKTHSNGTQKRFINILIEKISKLTKSGIDLNFIDSKLVSSTRKDLAQNDINIAKQEIQDSHSHCVDASIVFYLANSKIIKGQIEPDYDYFKDIYPKNSDIILPQSKQYLELNQKSQKSKKLFDDSVYSLVYEGKFDEKQKKILTQYELLKENGFVDTHKVFELIFKSFKDKDRSTLKDLKFLDNHLKSYIRKDIFSIFFNEKGELKEAKELKSATKNIDKFYTILSQNQDKIYTIKLDEKAKEKKTLQRNKVIELYKEIFYTKNAKPRARGKNRVTFSLPVYAKDAKYAIRRNSGFAGLKNKDIATKTYIDIDSREILKIPYYSTNVLPIRISDILEILSLQSKNAKQIYKIKIQDNLPKQIISLDFILSQANRHEVLVSFDKSKLEIQNPSDDNDKNAFIQKYLCDDFKEFLGKPENNKIEIIKNSDDILAIKYRVDRTSKANKEIIVKALSDEAPSA

SEQ ID NO: 193 - protein, 732 aa, synthetic construct
  REGION 1..732: note = Synthetic
LKNYKKVMEKIVEHNSNFNFKAPFDTSTISTNFNYLTQLGDIIFDEKSCGFAKTCKFHTLENLIRSSAKSAIASRLASNSARLINGKIEMYLDRLAHEIIKKIDFTDIYNIQINVEMNKFNFESNLSKLGLAKERQKDEESFICPYSGAKISQTNCEYDHILPRSKGLYNSLANLIPTSSTSNQIKSNTKYLLSNLDENYLKYIFAKTQTTDLNSFKAFIDENISKIDENDFTNFKNLSFFEQIAFRHALFLDTDDNSFKKALRLLKLDTIKTHSNGTQKRFINILIEKISKLTKSEIDINFIDSKLVSSTRKDLAQNDISIAKQEIQDSHSHCVDASIVFYLANSKIIKGQIEPDYDYFKDIYPKNSDIILPQSKQYLELNQKSQKSKKLFDDSVYSLVYEGKFDEKQKKILTQYELLKENGFVDTHKVFELIFKSFKDKDTSVLKDIKFLDNYLKSYIRKDIFSIFFNEKGELKEAKELKSATKNIDKFYTILSQNQDKIYTIKLDEKAKEKKTLQRNKVIELYKEIFYTKNAKPRARGKNRVTFSLPVYAKDAKYAIKRNSGFAGLKNKDIATKTYIDIDSREILKIPYYSTNVLPIRISDILEILDFPNKNAKQIYKVKIKDDLPDEIILLEFVISEKERHNVCVGFDKSNLEFCDISSKESKDKFIKIYLEEKFKSILGTPRKDKGVIGITILKDTSKILLIKYTAGTTESVKEIIVKSLKDETPSA

SEQ ID NO: 194 - protein, 1438 aa, synthetic construct
  REGION 1..1438: note = Synthetic
LTFLKKLRHSFSSDLYQFWEHEMQNLHRTAVGIDLGAKYTGVMIADTVPGTSLRQEDLTAFTVVMPDAEKMMLAQTQRTATRHRLRGKKRFNLARRLTLLVINEKLTAAGVVLPEKVRLRMIEAVNGLLRRRGYSRIESEVNLQVLEDLDPQCFAECDLLKSFFSEATRSLMDQWEELTNDMGRIRDLDRVLQDQTKQDVKEAFKEQGLEKEMLKSATEAVASVKEAAHDLVTQQFMGHKPRATYLQHLLSDLKRGDSRLTKVIEVFGGVERFHHVIGNISNLQLRAERWYFNAPHMIKGDCWEPCRLKQSVIRAFKYFHPSQEGNEKARLAELIRELESTDDVLEALCTIDPQRTIPPYEDQNNRRPPVDQTLYLSPEKLNDRLGERWMSWAKSFSKADPRLEEELDEILRLTDRRSRIARDGTLVLSVLQYRFSYVLQRVLDRSKLLDPFAIRALAHGAVLSASRHQLAMVIGGQHVDEFLAFAAEYYREIEGAKSGLWMPQTGSYLERSDLHPLMKKKILPILVGNVLQKTDKEGERFMADIWNAKVGGRSTVRSVCAVIEKTRKDNGGDFNRLYQRALLRRKLGQKLSKEDKVFAALSDKVDAVTEVIANTLGLSEDEAAKFANPYSLSQLYNLIETERDGFTSVSVAAHRENNWRMRLTECTDKDGSKTWSANCSRLPADAARPFDGVVRRVIDRKAWEIAKRVAESVRRHVTFQNGTVEIPLFVEENRFEFSASLAELKHNAAARKKMLDRSEGQTKRWQSKIERIKAASRGVCPYSGKAIKANGEIDHIIPRSLTKKNAGTIFNAEPNLIYVSQEGNQRKGNQGYRLSDLNATYLTAVFRTNSVSEAQATIEKTVTNLQKQGRLVFFDLLSESEQDCVRHALFLEDFNPAKLAVLEMLGNQRKARVNGTQMWLVRCLVEKLGEELASWCERTGNQIQFNATAVLPEVSMQLREALGEVDATMKKTDVQPVASHTIDAFCALAVGCDGLFVDEPDLAVPENMVALYPENCSIVQIQRKPLEEKSQFGGVPLFKDGIYAEHYVPLFTLDGRIYAGYISKPSEDGVMPGAVEVCGKDPVQLLQTLSPYLTRPFEGEVSKNESYRVDRLKAAALLAEVAHQCSSEQKVAAAGVLEGLSYCTKRCPVIGAFWDSVKKKLVAEDVALKDDKFEVKLNLSCGRQWSLKGKLVLPVRREWATLYAEVSRQLPEDAQEPQVREVLNRYWKRPEKRRLQHVPVHRDLSLPVIDKPSGGFRFMRRTLDGNPVIQIQVPNSKLQGFASKNGVADWGKAVLFERFRSQKITMFDARYFPVTETTSMNEWRQVLNGEIKVWLAPGSAVRFNARIEAPFAAVSSWLKAGNPDISCRSFLDLPGILKVKDAKAFFAALPPEVRAVLNQPRAYLYFENVGTRVCFWFTVASNNADIKKTYNQAAICGM

SEQ ID NO: 195 - protein, 1439 aa, synthetic construct
  REGION 1..1439: note = Synthetic
LTVRTKKNTQRTRKYRNYWRHRMQAKKHRTAIGIDLGAKYTGVVIANYTPGEELTQEDLTAFTVVMPDSEKMTLSQAQRTAVRHRIRGKKRFNLARRLANLLINEKLAASNISLSLEEQKKMTEAVSGLLRRRGYSRIESEINLDILEETNSEWFSHHEVMKHYFPDSNRPLADQWEDLTNKTDSIRNLDRDISKFSVADFKAAFKKMGLEKDEVGVAKDAACAVRDAAHNIVTQQVMGHKHRVKYLADLMKDLTRGDSRLKKVIEAFGGVERFHHLIGNISNLQLRAERWYFNAPNMIKGDEWEPGKLKKSIIRAFKYFHPSQERDEKERLATLVSELERSQDIIETLCSINPERTIPPYEDQNNRRPPLDQTLFLDPRKLTNHFQDKWTIWAKAFAKTEPELEEALEHNLEQTDRKSRIRRDGNEPLPKLQYQFAYILQRVLDRSRPLDPYAIRAQADGIVLKNARNQLESVLGQQHIDTFLSFASDYYAEVRSAKVGLWLPQTSLFLERADIHPPVKKKILCLLVGSVLQNQKLGKQFLDEVWKKKVGRSSVRSICSSVEVIRKKYGGDFNRLYRGALLQWERKEKLSAEEKGFVALSQKVEDASTVIADTLGLSDSQKKRFSNPYSLAQLFTIIETERDGFTTVSVAAHNENNWRMQMHEFLDENGNKRECANCARLPADATRPFDGVVRRMIDRKAWEIAQRVAESIRSSVSDNQCQVEIPLFVEENRFEFSASVAELKCNTNARKKLQSNSEVQYKRWQDKTERIKKASHSICPYTGKVIGLKGEIDHIIPRSASKKRAGTIFNAEANLIYTSQEGNQRKGNQLYGLRDLADNYLKEVFHSDSLEVIEQRIEKTILDLQQTKRLRFFDLLSDDEQACVRHALFLPSSSQARQIVVESLANQSRARVNGTQMWLVRQLIEKLDKELASWCATTGNHISFCAFPVSPEVSMRLRGNLGEYNPPMKKMDVQPVASHSIDALCALAVGSDEEYVVDPSLSGISDVRKLAEIYPKECEIVQIQRKPLENKTTFGGVPLFKDGIYSERYLPIFTHGGKVYVGFASKPDDAGAMPGALKVGGKKTELLLQLLSPYFQRPYDGDIERNTTYTLNRSKVLGLFFDVAHKKTTDENLQTASLIEALSFCTKRAAVSSVLWDAKEKKIISEERFSKGKEWQLKVKISGLRQVQLEGKLTLPVKKEWSKIYSALTATTSEEDLQTVINRFWKRPHKQKLSHIPTHRELSLPILDSPSGAFRIRRRTRAQQDIVQVHAANAKLAGFAQSNGITLWKKEVLFERFQSLKMAAFSARYFPETETTSLHEWRQVLDGAIKVWLEPGSAIRFNVRIEAPFEDVRRWIMAGEPSMDISSFLEIPALLKLKSKKDVKTKAFFSAFPPELKDILAYPRDTIVFENVGERVRFRYTVISNKPSILKAYDNSTNP

SEQ ID NO: 196 - protein, 1413 aa, synthetic construct
  REGION 1..1413: note = Synthetic
MSKKTVYSNIAIDLGGKYTGCVSYTSSILPSADDINAFIIEMPDDGKGIKYTVKDRTQKRHMIRALDRFKKARKLIYLVISSVIHRELTADEKEAISSLMKRRGYTRLEAEIDLDILKECPVDLFASYIKDLFDESQSLYDQFNQRCCDLDSAKVMMKELSQDEFNKAVESSELDKTEIELYKSAFDVMVKAAENIINTCEFGNKHRKQYLSDIKADINKDSRLADIVKSFDGNEKLFKCVGNISNLQLRALRWYFNDINMKGNPKWIPERFKKVWARAYKYFHYPKEDQQKARELIKNLEISNDVTSLLCSIDPLDTIPPYEDQNNRNPPTDLTLLLSPKALDKKYTNLWEKWAEKFAKLYPNLKYQLEDIVKISDRKSRIDVKSSSSYTQSKVFNSYVMQRLFDLAADKNEPITLLRSWVRDPSNSKLADTVKIIQSVVEDREDDFYKLAQSYYNEVEMAKSGLWSVIDDPLLEISGIHPPMKNKVISTLVGNVLGINNDFDYEKFLEVWRAPIKGRKTLKSVCKDIEGLRKEYGNTFKIEYDYANYSAKEKKERLTADQKKLVEINKIIEEISPLVRNSISQDPLSEIKFNNPFSFSQLYTLIETDTLGFSSNCVAVNMENNARMQFLLGNHALCSQLPTESVRPFDGALGKILERQAYEIAKVKSAEIKELDSLNETVINVGILIEQNKFEFTESIAKIKKSKLREEIKKRSQSGVSRQLKKWENKEKRIKSASRGVCPYTGEPISETNGEIDHIIPRSFTKSSMGTIFNSEANLIFCRLTGNRNKDENMYTLRELSPKYLNAVFGTADIVQIQQNIEGTVAKISSKNPRFLFDMMDQKEQDCCRHALFMPHSKAYQIVVSAMARSYSTRVNGTQSYFVNAIISKLKNELSSWLKTHNSTLNFFAYKVDPSIVHSTRDDLSKLNTLLKKQENQPITSHAIDALCVLASASTNERISENISKESCLAKISNTGNLLKLEPHEFKILRIEKKDFSDKNDDFSRKLFNDTIYAEHFLPVMVMKDQVKIGFSWNSSKKGNSIEIVKDQHKFLELLAPFFNKAIESSCKFITYKINKKKAFDFIHRYIHQEVDVNDCALIVKILESLRYTTVNTDVCDIYNDREKRFKSKSEILTNKNFELNFSLPKPFKILACKKIYLPSKNEWSKITEKFSDYLGKDNIKNGKEIIYNSLNLNRKTTKKLNHAGTKRVYSLPILKNASGGIRIKRYTDEMEEFYQLLEVNTPQTVKRKGFALSEKGEVMWNKPITVDSYIGKNLTLLEKNYKNVCFGDNFVPMKENRMVYKNEKTEVYISPSSDSRRLVIIKQPFDEFNKCLKNKYKNYLELPSTLVLSGDEIKNYVKNMKNDFIGNPRVETKNNKKTGKIVMLSIGKLVRYCYMSTTCDSLMKTAYDCALS

SEQ ID NO: 197 - protein, 1404 aa, synthetic construct
  REGION 1..1404: note = Synthetic
MTTKTVYSNIAIDLGGKYTGCVSYTSSIQPLADDINAFIIKMPDEGSSIKYTVKDRTQKRHMVRSLDRFKKARKLIYLIVASIVRRELTSDEKEAISSLMKRRGYTRLEAEIELDILKECPVDLFTLYLNDLFDENQSLYDQFNQKCCDLDTAKAMKKALASEELSIALKSSDLGKTEKTLYKSAFNTMVEAADNIINTCEFGNKHRKQYLSDIKFDLNKDSRLNDIVKVLGDSEKLYRCIGNISNLQLRSLRWYFNDISMKGEPKWVPEKFKKVWVRAYKYFHYPKEDQLKARALIKDLESAEDATSLLCTIDPFETIPPYEDQNNRNPPTDLTLLLSPKELDAKYSTLWEDWAEKFANLYPNLTYQLDDIVKTTDRKSRIELKNSSSYTKSKVLHSYILQRLFDLSANKDDPVTLLRAWVRDPSNANLASTVKIIHSVVGEREDEFYRLAQSYYNEVEMAKSGLWTVVESPLLEISGIHPPMKNKVISTLVGNVLGINNDFDYEKFLEVWKSPIKGRKTLKSICRDIEELRKDYGNTFKVEYDYAIYSAKNKKKSLTADQKKLVEIYKIIEDISPLVWNNISQDPLSEIKFNNPFSLAQLYTLIENNTMGFSSNCVAVNKENNARMQFLSGNHALCSRLPTESVRPFDGALGKILERQAFEIAKAKSSEIKELDSLNDAVINVGILIEQNKFEFTESVAKIKKSKLLKKIQKRTQSGICRQLEQWKSKEQRIKDSSRGMCPYTGEPISELSNGEIDHIIPRSFTKASMGTIFNSEANLIFCSKKGNQTKKENVYTLRDLSPKYLNAIFGTADIAKIQQEIDSTVAILGDKNPRFLFDMMNPKEQDCCRHALFMPHSKAYQIVVSALARSYSTRVNGTQSYFVKAIISKLRNELSSWLKSHNSALNVFAYKVDPSDVHSTRENLSKSNPFLKKQENQPITSHAIDAMCVLLAASTVESISEKISENGSIAFLSDLDNLEKVLPNQYRVLRIEKKSFSNKDVPESRKLFKDTIYAEHFLTVMSLKEQLKVGFNWNSNENGNSVEIVKGQKEFLELLSPFFTNKVVIDGSFHAYKIDKIRAFNFIHKYLSHEIDDNQMSKRQYELLNSLHYTTLNTDVSSIYAQNKFKDRKEIMKKENFEIKIKFPSWLKSDGRKSLELPSKLEWEAVVSKFEDLLGKKDENGLDIFYERLNLKKKNTSVLKHKGTRRVFSLPVISTPSGGIRIRRQSFDNKDVYQMVAANTPETVLSKGFSIQNGKVSWSDTVMVDSYIGKNLTAVDKAVTVSDCFVPMEEERLVFKDDSLSIFMSPSSEGRRMIRIVQSFDDFNSCLGDKFKSPLDMPSDMTLASNDSCHDLDNLLSKINKDFTGKPRDGKIKLLTIGNKVCYWYQVASSNKKMQEVFDNPLN

SEQ ID NO: 198 - protein, 1403 aa, synthetic construct
  REGION 1..1403: note = Synthetic
MSKKTVYSNIAIDLGGKYTGCVSYTSSILPSADDFNAFIIEMPDDGNGIKYTVKDRTQKRHMVRSLDRFKKARKLIYLVTASIIRRELSSDEKEAISSLMKRRGYTRLEAEIDLDILKECPVDLFTLYLNDLFDENQSLYDQFNQKCCDLDTAKAMKKALASEELSIALKSSDLGKTEKTLYKSAFNTMVEAADNIINTCEFGNKHRKQYLSDIRFDINKDSRLTDIVNGLGNSEKLYRCIGNISNLQLRALRWYFNDISMKGNPKWIPEKFKKVWVRAYKYFHYPKEDQLKARALIDNLESREDATSLLFSIDPLDTIPPYEDQNNRNPPTDLTLLLSPKALDARYSKVWENWAEKFASLYPNLTYQLEDIVKNTDRKSRIELKNSNSYTKSKVLHSYILQRLFDLSANKDEPVTLLRSWVKDPSNSKLLSTAKIIHSVVGEREDDFYKLAQSYYNEVEMAKSGLWTVVESPLLEISEIHPPMKNKVISTLVGNVLGINNDFDYEKFLEVWKSPIKGRKTLKSICRDIEELRKNYGNTFKVEYDYAIYSAKDKKKTLTSDQKKLVEIYKTIEEISPLLWSNISQDSLSEIKFNNPFSLSQLYTLIETDTLGFSSNCVAVNKENNARMQFLSGNCALCSRLPTESVRPFDGAVGKILERQAYEIAKAKSSEIKELDGLNDAVINVGILIEQNKFEYSASLATIKNSKYKKKIQKRAKSGVSRQLEQWKSKEQRIKDASRDLCPYTGEPISELSNGEIDHIIPRSFTKASMGTIFNSEANLIFCSKDGNQTKKENVYTLRDLSPKYLNAVFGTADSVKIKQEIDSTVAILSDKNPRLLFDMMNQREQDCCRHALFMPHSKAYQIVVSALARSYSTRVNGTQSYFVKAIISKLRNELSSWLKTHNSTLNFFAYKVDPSDVHSTRENLSKSNPFLKKQENQPITSHAIDAMCVLSAASNVESISENISENGSIAYLSNLESLEKVLPNQYRIVRIEKKSFFNKDVPESRKLFKDTIYADHFLTVMSLKDQLKVGFNWNSNDEGNSVEIVKGQKEFLEILAPFFTDKVVIDGSFHAYKIDKIRAFNFIHKYLSHEIDDNQMTKRQYELLNSLHYTTLNTDVSTIYSKNKFKERKEIMKKDNFEIKVKFPSWLKIAGRKSLELPSKHEWESVVSKFEDLLGKKVENGLDIFYERLNLKKKKNSALKHKGTRRVFSLPVISTPSGGIRIRRQSVDNKDVYQIVEANTPESVLFKGFFVHNEKVSWSDYVMLDSYIGKNLTYVGEPVANSDCYVTMDEERLVFKDDSLSIFMSPSSKDRSMIRIVQSFDDFNSCLGGKFKSPLDVPSEITLVTNDSCHDLDNFLSEINKDFIGKPRDGKIKLLSIGNKVCYWYQTSRNKKVKAVFENPLN

SEQ ID NO: 199 - protein, 1021 aa, synthetic construct
  REGION 1..1021: note = Synthetic
MNKKTVYSNIAIDLGGKYTGCVSYTSSILPSADDINAFIIEMPDDGNGIKYTVKDRTQKRHVVRSLDRFKKARKLIYLVISSIIRRELTADENEAISSLMKRRGYTRLEAEIDLDILKDCPIDLFASYMKDLFDESQSLYEQFNQKCCDLDSAKAMKKALSSEELKQAMDSSELDKIEKKIYKSAFNTMVEAADNIINTCEFGNKHRKQYLSDIKVDINKDSRLTDIVKAFASSEKLYRCIGNISNLQLRALRWYFNDIDMKGEPKWISERFKKVWARAYKYFHYPKEDQTKARELIKKIESSEDAISLLSSIDPLKTIPPYEDQNNRNPPTDLTLLLSPKALDDKYADLWDAWAEKFANLYPNLTYQLKDIVKATDRKSRIEQKNSSSYTQSKIFNSYVIQRLLDLSTNEDEPITLLRKWVRDPSNPNLARTVKIIQSVVEDHEDDFYKLAQSYYNEVEKAKSGLWSVVEDPLLEISGIHPPMKNKVISTLVGNVLGINNDFDYEKFLEVWKSPIKGRKTLKSICRDIEELRKDYGNTFKVEYDYAIYSAKDKKKTLTSDQKKLVEIYKTIEEISPLLWSNISQDPLSEIKFNNPFSLSQLYTLIETDTLGFSSNCVAVNKENNARMQFLSGNCALCSRLPTESVRPFDGAVGKILERQAYEIAKAKSSEIKELDGLNDAVINVGILIEQNKFEYSASLATIKNSKYKKKIQKRAKSGVSRQLEQWKSKEQRIKDASRDLCPYTGEPISELSNGEIDHIIPRSFTKASMGTIFNSEANLIFCSKDGNQTKKENVYTLRDLSPNYLNEIFGLSDILKIQQEIECTVANVNEKNPRFLFDMMTPKEQVCCRHALFMPQSKAYRLVVSSLARSYSTRVNGTQSYFVKVIISRLRNELSSWLKSNRNTLNFFAYKVDPSDVHSTRDDLSKLNALLKKQKNQPITSHAIDALCVLSAASTVEYISENISENGKISFLSNIENLKKVVPNQYRVMRIEKNHCLIKMFLNQVNSLKIRYMQSISLLL

SEQ ID NO: 200 - protein, 856 aa, synthetic construct
  REGION 1..856: note = Synthetic
MNKKTVYSNIAIDLGGKYTGCVSYTSSILPSADDINAFIIEMPDDGKGIKYTVKDRTQKRHMVRSLDRFKKARKLIYLVISSIIRRELTADENEAISSLMKRRGYTRLEAEIDLDILKDCPIDLFASYMKNFFDESQSLYEQFNQKCCDLDSAKAMKKALSSEELKQAMDSSELDKIEKKIYKSAFNTMVEAADNIINTCEFGNKHRKQYLSDIKVDINKDSRLTDIVKAFASSEKLYRCIGNISNLQLRALRWYFNDIDMKGEPKWISERFKKVWARAYKYFHYPKEDQTKARELIKKIESSEDAISLLSSIDPLKTIPPYEDQNNRNPPTDLTLLLSPKALDDKYADLWDAWAEKFANLYPNLTYQLKDIVKATDRKSRIEQKNSSSYTQSKIFNSYVIQRLLDLSTNEDEPITLLRKWVRDPSNPNLARTVKIIQSVVEDHEDDFYKLAQSYYNEVEKAKSGLWSVVEDPLLEISGIHPPMKNKVISTLVGNVLGINNDFDYEKFLEVWKSPIKGRKTLKSICRDIEELRKDYGNTFKVEYDYAIYSAKDKKKTLTSDQKKLVEIYKTIEEISPLLWSNISQDPLSEIKFNNPFSLSQLYTLIETDTLGFSSNCVAVNKENNARMQFLSGNCALCSRLPTESVRPFDGAVGKILERQAYEIAKAKSSEIKELDGLNDAVINVGILIEQNKFEYSASLATIKNSKYKKKIQKRAKSGVSRQLEQWKSKEQRIKDASRDLCPYTGEPISELSNGEIDHIIPRSFTKASMGTIFNSEANLIFCSKDGNQTKKENVYTLRDLSPNYLNEIFGLSDILKIQQEIECTVANVNEKNPRFLFDMMTPKEQVCCRHALFMP

SEQ ID NO: 201 - protein, 971 aa, synthetic construct
  REGION 1..971: note = Synthetic
MSKKTVYSNIAIDLGGKYTGCVSYTSSILPSADDFNAFIIEMPDDGNGIKYTVKDRTQKRHMVRSLDRFKKARKLIYLVTASIIRRELSSDEKEAISSLMKRRGYTRLEAEIDLDILKECPVDLFTLYLNDLFDENQSLYDQFNQKCCDLDTAKAMKKALASEELSIALKSSDLGKTEKTLYKSAFNTMVEAADNIINTCEFGNKHRKQYLSDIRFDINKDSRLTDIVNGLGNSEKLYRCIGNISNLQLRALRWYFNDISMKGNPKWIPEKFKKVWVRAYKYFHYPKEDQLKARALIDNLESREDATSLLFSIDPLDTIPPYEDQNNRNPPTDLTLLLSPKALDARYSKVWENWAEKFASLYPNLTYQLEDIVKNTDRKSRIELKNSNSYTKSKVLHSYILQRLFDLSANKDEPVTLLRSWVKDPSNSKLLSTAKIIHSVVGEREDDFYKLAQSYYNEVEMAKSGLWTVVESPLLEISEIHPPMKNKVISTLVGNVLGINNDFDYEKFLEVWKSPIKGRKTLKSICRDIEELRKNYGNTFKVEYDYAIYSAKDKKKTLTSDQKKLVEIYKTIEEISPLLWSNISQDSLSEIKFNNPFSLSQLYTLIETDTLGFSSNCVAVNKENNARMQFLSGNCALCSRLPTESVRPFDGAVGKILERQAYEIAKAKSSEIKELDGLNDAVINVGILIEQNKFEYSASLATIKNSKYKKKIQKRAKSGVSRQLEQWKSKEQRIKDASRDLCPYTGEPISELSNGEIDHIIPRSFTKASMGTIFNSEANLIFCSKDGNQTKKENVYTLRDLSPKYLNAVFGTADSVKIKQEIDSTVAILSDKNPRLLFDMMNQREQDCCRHALFMPHSKAYQIVVSALARSYSTRVNGTQSYFVKAIISKLRNELSSWLKTHNSTLNFFAYKVDPSDVHSTRENLSKSNPFLKKQENQPITSHAIDAMCVLSAASNVESISENISENGSIA

SEQ ID NO: 202 - protein, 1406 aa, synthetic construct
  REGION 1..1406: note = Synthetic
MNKKTVYSNIAIDLGGKYTGCVSYTSSILPSADDINAFIIEMPDDGNGIKYTVKDRTQKRHMVRSLDRFKKARKLIYLVISSIIRRELTADENEAISSLMKRRGYTRLEAEIDLDILKDCPIDLFASYMKNLFDESQSLYEQFNQKCCDLDSAKAMKKALSSEELKQAMDSSELDKIEKKIYKSAFNTMVEAADNIINTCEFGNKHRKQYLSDIKVDINKDFRLTDIVKAFASSEKLYRCIGNISNLQLRALRWYFNDIDMKGEPKWISERFKKVWARAYKYFHYPKEDQTKARELIKKIESSEDAISLLSSIDPLKTIPPYEDQNNRNPPTDLTLLLSPKALDDKYADLWDAWAEKFANLYPNLTYQLKDIVKATDRKSRIEQKNSSSYTQSKIFNSYVIQRLLDLSTNEDEPITLLRKWVRDPSNPNLARTVKIIQSVVEDHEDDFYKLAQSYYNEVEKAKSGLWSVVEDPLLEISGIHPPMKNKVISTLVGNVLGINNDFDYEKFLEVWKSPIKGRKTLKSICRDIEELRKDYGNTFKVEYDYAIYSAKDKKKTLTSDQKKLVEIYKTIEEISPLLWSNISQDPLSEIKFNNPFSLSQLYTLIETDTLGFSSNCVAVNKENNARMQFLSGNCALCSRLPTESVRPFDGAVGKILERQAYEIAKAKSSEIKELDGLNDAVINVGILIEQNKFEYSASLATIKNSKYKKKIQKRAKSGVSRQLEQWKSKEQRIKDASRDLCPYTGEPISELSNGEIDHIIPRSFTKASMGTIFNSEANLIFCSKDGNQTKKENVYTLRDLSPNYLNEIFGLSDILKIQQEIECTVANVNEKNPRFLFDMMTPKEQVCCRHALFMPQSKAYRLVVSSLARSYSTRVNGTQSYFVKVIISRLRNELSSWLKSNRNTLNFFAYKVDPSDVHSTRDDLSKLNALLKKQKNQPITSHAIDALCVLSAASTVEYISENISENGKISFLSNIENLKKVVPNQYRVMRIEKKSLFNKDVHESSKLFKDKIYAEHFLTVMTLNDKLKVGFDWNSSGEGNAVEIIKCQKDVLELLSPFFTEKVSYDDLFHAYRIDKIKAFSFMHKFLAHEIEDNQLSKRQYELLNSLHYTTLKTDVSSIIYSETDKEFKTADEIMNEKNFAIKIKFPSWLKSDGRKSLVLPSKNEWEGIVSTFKDLLGKQVKDGNEKNIINERLNLRRKNTSALKHKGTKRGFSLPIIDGPSGGIRIRRKSFNNQDIYQMVTAGSAKSKGFSVKNGKVSWDDFVMIDTYISNNLTPADLSGSYSNSFIPMDEERLVFKDDSLSIFMSPSTEDRRMIRIIQSFDDFNFCLGNKFKSPFDIPSVITLKSNKDCHDLDNFLSKINKDFIGKPRYGNLKLLSIGNKVCYWYQVVSSNKKMQEIFNNALK

SEQ ID NO: 203 - protein, 1428 aa, synthetic construct
  REGION 1..1428: note = Synthetic
MGKTHIIGVGLDLGGTYTGTFITSHPSDEAEHRDHSSAFTVVNSEKLSFSSKSRTAVRHRVRSYKGFDLRRRLLLLVAEYQLLQKKQTLAPEERENLRIALSGYLKRRGYARTEAETDTSVLESLDPSVFSSAPSFTNFFNDSEPLNIQWEAIANSPETTKALNKELSGQKEADFKKYIKTSFPEYSAKEILANYVEGRRAILDASKYIANLQSLGHKHRSKYLSDILQDMKRDSRITRLSEAFGSTDNLWRIIGNISNLQERAVRWYFNDAKFEQGQEQLDAVKLKNVLVRALKYLRSDDKEWSASQKQIIQSLEQSGDVLDVLAGLDPDRTIPPYEDQNNRRPPEDQTLYLNPKALSSEYGEKWKSWANKFAGAYPLLTEDLTEILKNTDRKSRIKIRSDVLPDSDYRLAYILQRAFDRSIALDECSIRRTAEDFENGVVIKNEKLEDVLSGHQLEEFLEFANRYYQETAKAKNGLWFPENALLERADLHPPMKNKILNVIVGQALGVSPAEGTDFIEEIWNSKVKGRSTVRSICNAIENERKTYGPYFSEDYKFVKTALKEGKTEKELSKKFAAVIKVLKMVSEVVPFIGKELRLSDEAQSKFDNPYSLAQLYNLIETERNGFSKVSLAAHLENAWRMTMTDGSAQCCRLPADCVRPFDGFIRKAIDRNSWEVAKRIAEEVKKSVDFTNGTVKIPVAIEANSFNFTASLTDLKYIQLKEQKLKKKLEDIQRNEENQEKRWLSKEERIRADSHGICAYTGRPLDDVGEIDHIIPRSLTLKKSESIYNSEVNLIFVSAQGNQEKKNNIYLLSNLAKNYLAAVFGTSDLSQITNEIESTVLQLKAAGRLGYFDLLSEKERACARHALFLNSDSEARRAVIDVLGSRRKASVNGTQAWFVRSIFSKVRQALAAWTQETGNELIFDAISVPAADSSEMRKRFAEYRPEFRKPKVQPVASHSIDAMCIYLAACSDPFKTKRMGSQLAIYEPINFDNLFTGSCQVIQNTPRNFSDKTNIANSPIFKETIYAERFLDIIVSRGEIFIGYPSNMPFEEKPNRISIGGKDPFSILSVLGAYLDKAPSSEKEKLTIYRVVKNKAFELFSKVAGSKFTAEEDKAAKILEALHFVTVKQDVAATVSDLIKSKKELSKDSIENLAKQKGCLKKVEYSSKEFKFKGSLIIPAAVEWGKVLWNVFKENTAEELKDENALRKALEAAWPSSFGTRNLHSKAKRVFSLPVVATQSGAVRIRRKTAFGDFVYQSQDTNNLYSSFPVKNGKLDWSSPIIHPALQNRNLTAYGYRFVDHDRSISMSEFREVYNKDDLMRIELAQGTSSRRYLRVEMPGEKFLAWFGENSISLGSSFKFSVSEVFDNKIYTENAEFTKFLPKPREDNKHNGTIFFELVGPRVIFNYIVGGAASSLKEIFSEAGKERS

SEQ ID NO: 204 - protein, 1014 aa, synthetic construct
  REGION 1..1014: note = Synthetic
LQRAFDRSIALDECSIRRTAEDFENGVVIKNEKLEDVLSGHQLEEFLEFANRYYQETAKAKNGLWFPENALLERADLHPPMKNKILNVIVGQALGVSPAEGTDFIEEIWNSKVKGRSTVRSICNAIENERKTYGPYFSEDYKFVKTALKEGKTEKELSKKFAAVIKVLKMVSEVVPFIGKELRLSDEAQSKFDNPYSLAQLYNLIETERNGFSKVSLAAHLENAWRMTMTDGSAQCCRLPADCVRPFDGFIRKAIDRNSWEVAKRIAEEVKKSVDFTNGTVKIPVAIEANSFNFTASLTDLKYIQLKEQKLKKKLEDIQRNEENQEKRWLSKEERIRADSHGICAYTGRPLDDVGEIDHIIPRSLTLKKSESIYNSEVNLIFVSAQGNQEKKNNIYLLSNLAKNYLAAVFGTSDLSQITNEIESTVLQLKAAGRLGYFDLLSEKERACARHALFLNSDSEARRAVIDVLGSRRKASVNGTQAWFVRSIFSKVRQALAAWTQETGNELIFDAISVPAADSSEMRKRFAEYRPEFRKPKVQPVASHSIDAMCIYLAACSDPFKTKRMGSQLAIYEPINFDNLFTGSCQVIQNTPRSFSDKTNIANSPIFKETIYAERFLDIIVSRGEIFIGYPSNMPFEEKPNRISIGGKDPFSILSVLGAYLDKAPSSEKEKLTIYRVVKNKAFELFSKVAGSKFTAEEDKAAKILEALHFVTVKQDVAATVSDLIKSKKELSKDSIENLAKQKGCLKKVEYSSKEFKFKGSLIIPAAVEWGKVLWNVFKENTAEELKDENALRKALEAAWPSSFGTRNLHSKAKRVFSLPVVATQSGAVRIRRKTAFGDFVYQSQDTNNLYSSFPVKNGKLDWSSPIIHPALQNRNLTAYGYRFVDHDRSISMSEFREVYNKDDLMRIELAQGTSSRRYLRVEMPGEKFLAWFGENSISLGSSFKFSVSEVFDNKIYTENAEFTKFLPKPREDNKHNGTIFFELVGPRVIFNYIVGGAASSLKEIFSEAGKERS

SEQ ID NO: 205 - protein, 1213 aa, synthetic construct
  REGION 1..1213: note = Synthetic
MGKTHIIGVGLDLGGTYTGTFITSHPSDETEHGDHSSAFTVVNSEKLSFSSKSRTAVRHRVRSYKGFDLRRRLLLLVAEYQLFQKKQALTPEERENLRIALSSYLKRRGYARTEAETDVSVLESLDPSVFSSAPGFTNFFNDSEPLNIQWKVISNSPETARALNKAVSGQKEADFKKYVKTSFPEYSAKEILANYVEGRRAILDASKYIANLQSLGHKHRSKYLSDILQDMKRDSRISRLSEAFGSIDNLWRIIGNISNLQERAVRWYFNDAKFEQGQEQLDADKLKNVLIRALKYLRSDDKKWSASQKQIIQSLEQSGDVLDVLAVLDPDRTIPPYEDQNNRRPPEDQTLYLNPRALSSEYGDKWKSWANKFAAAYPLLTDDLAEILKNTDRKSRIKIRSDALPDSDYRLTYILQRALDRSIALDECSIRRTAEDFENGVVIKNEKLEEVLSGHQLEEFLEFANRYYQETAKAKNGLWFPENALLERADLHPPMKNKILNVIVGQALGVSPAKGTEFIEEIWNRKVKGRSTVRSICNAIENERKTYGPYFSDDYKFVKTALKEGKTEKELSKKFASVIKVLKMVNEVVPFIGKELRLSDEAQSKFDNPYSLAQLYNLIETERNGFSKVSLAAHLENAWRMTMTDGSAQCCRLPADCVRPFDGFIRKAIDRNSWEVAKRIAEEVKKSVDFTNGTVKIPVAVEANSFNFTASLTDLKYIQLKEQKLKKKLEDIQRNEENQEKRWLSKEERIRADSHGICAYTGRPLDDVGEIDHIIPRSLTLKKSESIYNSEVNLIFVSAQGNQEKKNNIYLLSNLAKNYLAAVFGTSDLNQITNEIESTVLQLKAAGRLGYFDLLSEKERACARHALFLNSDSEARRAVIDVLGSRRKASVNGTQAWFVRSIFSKVRQALAAWIQETGNELVFDAISVPAADSSEMRKRFAEYRPEFRKAKVQPVASHSIDAMCIYLAACSDPFKTKRMGSQLAIYEPINFDNLFTGSCQVVQNTPRSFTDKTNIANSPIFKETIYAERFLDIIVSRGEIFIGYPSNMPFEKKPNRISIGGKDPFSILSVLGAYLNKAPSSEKEKLTIYRVEKNKAFELLSKVAGSKFTAEEDKAAKILEALHFVTVKQDVAATVSDLVKSKKELSKDSIEDLAKQKGCLKKVEYSSKEFKFKGSLIIPTAVEWGKVLWNVFKENTAEELKDENVLRKALEAA

SEQ ID NO: 206 - protein, 1427 aa, synthetic construct
  REGION 1..1427: note = Synthetic
MGKTHIIGVGLDLGGTYTGTFITSHPSDETEHGDHSSAFTVVNSEKLSFSSKSRTAVRHRVRSYKGFDLRRRLLLLVAEYQLFQKKQALTPEERENLRIALSSYLKRRGYARTEAETDVSVLESLDPSVFSSAPGFTNFFNDSEPLNIQWKVISNSPETARALNKAVSGQKEADFKKYVKTSFPEYSAKEILANYVEGRRAILDASKYIANLQSLGHKHRSKYLSDILQDMKRDSRISRLSEAFGSIDNLWRIIGNISNLQERAVRWYFNDAKFEQGQEQLDADKLKNVLIRALKYLRSDDKKWSASQKQIIQSLEQSGDVLDVLAVLDPDRTIPPYEDQNNRRPPEDQTLYLNPRALSSEYGDKWKSWANKFAAAYPLLTDDLAEILKNTDRKSRIKIRSDALPDSDYRLTYILQRALDRSIALDECSIRRTAEDFENGVVIKNEKLEEVLSGHQLEEFLEFANRYYQETAKAKNGLWFPENALLERADLHPPMKNKILNVIVGQALGVSPAKGTEFIEEIWNRKVKGRSTVRSICNAIENERKTYGPYFSDDYKFVKTALKEGKTEKELSKKFASVIKGLKMVNEVVPFIGKELRLSDEAQSKFDNPYSLAQLYNLIETERNGFSKVSLAAHLENAWRMTMTDASAQCCRLPADCVRPFDGFIRKAIDRNSWEVAKRIAEEVKKSVDFTNGTVKIPVAVEANSFNFTASLTDLKYIQLKEQKLKKKLEDIQRNEENQEKRWLSKEERIRADSHGICAYTGRPLDDVGEIDHIIPRSLTLKKSESIYNSEVNLIFVSAQGNQEKKNNIYLLSNLAKNYLAAVFGTSDLNQITNEIESTVLQLKAAGRLGYFDLLSEKERACARHALFLNSDSEARRAVIDVLGSRRKASVNGTQAWFVRSIFSKVRQALAAWIQETGNELVFDAISVPAADSSEMRKRFAEYRPEFRKAKVQPVASHSIDAMCIYLAACSDPFKTKRMGSQLAIYEPINFDNLFTGSCQVVQNTPRSFTDKTNIANSPIFKETIYAERFLDIIVSRGEIFIGYPSNMPFEKKPNRISIGGKDPFSILSVLGAYLNKAPSSEKEKLTIYRVEKNKAFELLSKVAGSKFTAEEDKAAKILEALHFVTVKQDVAATVSDLVKSKKELSKDSIEDLAKQKGCLKKVEYSSKEFKFKGSLIIPTAVEWGKVLWNVFKENTAEELKDENVLRKALEAAWPSSFGTRNLHSKAKRVFSLPVVATQSGAVRIRRKTAFGNFVYQSQDTNNLYSSFPVKNGKLDWSSPIIHPALQNRNLTAYGYRFVDHDRSISMSEFREIYNKDDLRIELAQGTSSRRYLRVEMPGEKFLAWFGENSISLGSSFKFSVSEVFDNKIYTENAEFTKFLPKPREDNKHNGTIFFELVGPRVIFNYIVGGAASSLKEIFSEAGKERS

SEQ ID NO: 207 - protein, 994 aa, synthetic construct
  REGION 1..994: note = Synthetic
LQRALDRSIALDECSIRRTAEDFENGVVIKNEKLEEVLSGHQLEEFLEFANRYYQETAKAKNGLWFPENALLERADLHPPMKNKILNVIVGQALGVSPAKGTEFIEEIWNRKVKGRSTVRSICNAIENERKTYGPYFSDDYKFVKTALKEGKTEKELSKKFASVIKVLKMVNEVVPFIGKELRLSDEAQSKFDNPYSLAQLYNLIETERNGFSKVSLAAHLENAWRMTMTDGSAQCCRLPADCVRPFDGFIRKAIDRNSWEVAKRIAEEVKKSVDFTNGTVKIPVAVEANSFNFTASLTDLKYIQLKEQKLKKKLEDIQRNEENQEKRWLSKEERIRADSHGICAYTGRPLDDVGEIDHIIPRSLTLKKSESIYNSEVNLIFVSAQGNQEKKNNIYLLSNLAKNYLAAVFGTSDLNQITNEIESTVLQLKAAGRLGYFDLLSEKERACARHALFLNSDSEARRAVIDVLGSRRKASVNGTQAWFVRSIFSKVRQALAAWIQETGNELVFDAISVPAADSSEMRKRFAEYRPEFRKAKVQPVASHSIDAMCIYLAACSDPFKTKRMGSQLAIYEPINFDNLFTGSCQVVQNTPRSFTDKTNIANSPIFKETIYAERFLDIIVSRGEIFIGYPSNMPFEKKPNRISIGGKDPFSILSVLGAYLNKAPSSEKEKLTIYRVEKNKAFELLSKVAGSKFTAEEDKAAKILEALHFVTVKQDVAATVSDLVKSKKELSKDSIEDLAKQKGCLKKVEYSSKEFKFKGSLIIPTAVEWGKVLWNVFKENTAEELKDENVLRKALEAAWPSSFGTRNLHSKAKRVFSLPVVATQSGAVRIRRKTAFGNFVYQSQDTNNLYSSFPVKNGKLDWSSPIIHPALQNRNLTAYGYRFVDHDRSISMSEFREIYNKDDLRIELAQGTSSRRYLRVEMPGEKFLAWFGENSISLGSSFKFSVSEVFDNKIYTENAEFTKFLPKPREDNKHNGTIFFELVGPRVIFNYIV

SEQ ID NO: 208 - protein, 1557 aa, synthetic construct
  REGION 1..1557: note = Synthetic
MKIISPIAIDMGAKNTGVYLNHFEQGEDPTTSGNIAGKTIVIDSSKITWSQAGRTQKRHQVRGNKRRKLAKRLIKVILKSHYELDIEEKQLEFLMGLLNRRGYNRIELTPEQEEVLSTKAVTEFFFPRLFTEPSTGVSLLDGLSDRVIIKNKDNQDYWKSVLKDDVFSLSGKQNKEFKDYLALHDKGKDKDEIADLSKAFTAIKQVIGKQIENYDSGHLHRRDYLENIKKDVQNELLKSLLSGDLTAEKLSFLIGNVSNLQLRVLRKYFNDYGMQSGDKWAPDKLHEFFFKWVRSWHCKQDDERTNQRTLLARKGKDILEVFTTSNPELSIPPYEDQNNRRPPKDMTLRLKPKGLDNKLSNWESITRSLVKSYCMPQTEKNIIEPVCIQKNLKDNVRPQKIKGEVQDTEQRQILADTLHRILDRTIKLDPYKLRWLSEGSKTDEAQKAKEVLNRHSENKADAIIDFAKEYYDEVDIAKQGLWSDSEQSLFFRCNTNPPHKNKIQHNLISHILGENLNEQRLSYFVDDCWNEKIGRLTIKGIAKKTEEERKKYGNRFKHLVQRQVWLNKQGDRELDNERKHGVNGKVILEVHEKCLKATDKIAEYFTHNDRKKKIYANVFSMAQLYNILETNIRGFSKTDNWNTIENAWRSRKDDADEQGEYIANAVRLTADSIRPFDGMLDRIISRQAYEIAGMKIQQIGNLKIDTNDTLFVPIFMEQNRFSFEQSLHEIKGLKNVKKKAKERVEKGLKKQKTQWQNKDDRIKKNKYCPYTGGIIGKGEIDHIIPQSESKKRGDVVFNSEANLIYCSGTGNHTKGNVRWTFEQLHPNYLNEVFAGETNIKQTIIDFVNGLDENDPISFHNLEGKEQNYLRHALFISDLDSKTFPILNTRYKTFVNGTQGYLGKKIRKLLQDKYPNVEIKTYQIPAQEVSQLRKVLGSLDKTSKKQDIQSAFSHVVDASLVLATALQNPKIAEELQSTNVTELSEQGQWLKALLPTHADVQHIERKPKYRKNLSSTQIFKEGLYGERFMPILLDNEKLYYGFSLDNCHEIEPLKQPKNHSKDFDKKVLTVKEKQLVAHNKYFDLLKEFLYTGSSRRKNKKPVTDSMQDNQDKYSYLSIDTIKALNHLQKCAKEVCDTRATEQAKKLEKLRYSVEKKNIKNVLLQGRGRRTFIKQLDDKKFKVSKLTLPAKKDWERLINHPIIDYQGNKVTLKECFDKPEQVEIDNPKMVNFWQDLSQESGFKIEYLKDNLLKKNDKGEFYKQLGIIPKGVFDQKIKTMKLLKPLANSALLEQSFGVEFKTMTDLIPQESWDKLFEEFFHTNKIKNNNFHKQVRKDYSLPEVSAPSGGFRIQRKNSLTNETIYQVSAIADGGYACGFAKKKDGSIDMSKNGVTFNPALKASRRTAYIGKSGKPYIHKESDSTEVESFGSSREVALSSESVLKCRLTLAEASRIDVAITISNDIFKKIIEFSSEDIDVSQPPPDFSIKFTKSNGGREEHDKFKEFLNAMNIPTPREAGNPQRWAYKFEVQASQDTVVLSYRTSMTAELKTAYLNGTLVND

SEQ ID NO: 209 - protein, 1559 aa, synthetic construct
  REGION 1..1559: note = Synthetic
MNKIISPIAIDMGAKNTGVYLNHFEQGEYPTSSGNSQGKTIVIDSTNITWSQADRTGKRHQIRANKRRKLSKRLLKLVLNEYDLQPNQAQSEYLSGLLNRRGYNRIEITEEHEGILQSKLVSDFFSLIIFNNSNNNNILDGLLKELTIKNDEDKIKWENVLKNKIFSMSENKNSEFKEYIKNKYEKDEVTELSKAFTAIKNTIEKQIDNYATGHLHRKNYLENIQKDIEVELLKPLLNNSLTVEKLAYLIGNISNLQLRVLRKYFNEKSMQTDDVWLPEKLHLVFFKWIRSWHTKQQNEKDNRIEILALKDNKDILDIFTSLDPKKTIPPYEDQNNRRPPKDLTLRLNPKALDGQFSGWESITTSLANNYILPPINNHITERIDIQKGLEDNVSPQKNKGEIQDTKERQILADTLHRILDRTIILDPYKLRWLAQGDTSRGATTAKALLNQHSNNNQAGIIVRLAKKYYAEVEVAKQGLWAEAGSLFFRCNTNPPHKGKLTHKLVGHILREEFNDERIKEFRQECWEVKTGRSTIKSMAGKIEATRKKYGNGFNYIVQTIKRRNYVLANNSPAQAQKDRWVKYAEDHKDVIEAINNTKLVAEKINDFLDSNNQEKYNNPYSIAQLYNHLESEITGFSKTDKFNTEENAWRDKTQSIEILNKEGGVIKVTRSNAVRLTADSIRPFDGLLDRIISRQAIEIARAKIAQFESLNIDKNDILFVPIFMEQNRFKFEQDMHEIKGAKNVKKKAKDNAQKGLEEQEKEWQDKNTRVKKNRHCPYTGEIITSGEIDHIVPQSESKRNQDVVFNCEANLIYCSSVGNHSKSNNRYTFEQLNHNYLSEIFAGETDVKQTIINFVNGLDKNDPISFHNLDDKEQNYLRHALFIPELDSQTFPILNTRYKTFVNGTQGYLGKKIRKLLQKEYPNIKVKTYQIPAQEVSQLRTVLGEQDKAFEKQERQGAFSHVVDAALVLAAALQKPKIAEELTTIHLTDELINKTEHGQWLKDLLPKNASVQHIKRKPKYRKKLESTQIFKEGLYGERFMPILLDDEKLYYGFSLDNCHQIEPLKHPKKTVKDFDKKLQTAKQNQQVKHSEYFELLKPFLYTGKKNAKEPVTGDLFDHWQYQYLSIDKTKALTHLQKCAKEVCGEIEIKQAQQLEKLRYSVEKKEIKSVLLEGQGKRTFIKQLDPKKFTVAKLTLPAKNEWTALIKHPIKDCTGKQTTLEACFGELEQVEIDNPALCGFWETLAAESSLEIDYLKDNLLKKNDKGELSKKSGVIPKTVFNIKIKTDEQLKGLEYSPLLRKSFGVDFKVMTDLIPQSSWGGLFKAFFRTDKIKNSSHHKQVRKDYSLPIVSAPSGGFRIKRKNPLTGETVYQVSSIADGGYACGFEKDEKGNINMTKTGVTFHAGLKESPNVAYIGKGGKPNIKKQSNGNTTEPFGSTREVNLNVSAIKSSYLTLAEARRIDIRILIEKQLFETLCEFSDIDANNPPSNINITFDKKTEIEKHKEFKKLMSDQQIPMPRDSGKNRWAYKLSVQVLNQDIELFYRIGLTDPMRDAYQNGTA

SEQ ID NO: 210 - protein, 1541 aa, synthetic construct
  REGION 1..1541: note = Synthetic
MSKIISPIAIDMGAKNTGVYLNHFEQGEDPTTSGNIQGKTIVTDGTNITWSQAGRTKKRHQIRASKRSKLSKRLLKLVLNEYQIKTNQAQSEYLNGLLNRRGYTYLVEGLDEGLIKQAFVAKYFIKEHPEFFKNQDSFYIEFLAISNDIDKARGLQKILTLSKNEAKQAVEENKQEFADAYNNIKTVLKTQIKEGDEGHKYRTIYLENIKKDIQDSDLLQPMFNDLTADKLTHLIGNICNLQLRILRKYFNDEKMKSGDIWLPDKLHNLFFKWVRSWHAKQENEKQNRQAILKLKSTPNILDILTSLDPKKTIPPYEDQNNRRPPKDLTLRLNPKALDKQLKDWEKITKSLADNYILPSIKIHITENIDISEGLEDNARPQKGETKSRQILADTLHRILDRTLVLDPYKLRWNVQDSNTETAKNARALLNQHSNHQADNVIALAKKYYAEVEKAKQGLWAFEGSLFFKCETNPPHKGKIRHKLVGHILREAFTEEQVEDFIQQCWGENVKRTTMKSLAGKIEETRKEYGNSFNYIVSTISKRQHVLQKNTVSEKQEARWNNYKDEHKDVIKAIENTNLIAQKIAKFLKHNTPDKYNNPYSIAQLYNHLEGEISGFSKTDRFNTEENAWRDKTQVLDILTKSGEVEKIERSNAVRLTADSIRPFDGLLDRIISRQAIEIARMKIKQIEALNIDNNDPLFVPIFMEQNRFKFEQDMHDIKGVENVKKKTKDKTKEGLIKQKKQWQDKDTRIKKNTLCPYTGDVITIGEIDHIIPQSQSKRYNDVVFNSEANLIYCSGTGNHNKGDSRYSFEQLNPRYLREVFTDESNIKQSIVDFVRSLDENDSVSFHNLELKEQNYLRHALFISELDSKTFPLLNTRYKTFVNGTQGYLGKKIRILLQEEYPNIEVKTYQIPAQEVSQLRTVLGEYDVAFKKQEKQGAFSHVIDASLVLATALQNAKISEELTTTNTVELSEKGQWLKDLLPKNTEVMHIKRKPKYRKKLESTQIFKDGLYGERFMPILLDDEKLYYGFALDNCHEIEPLKTPTKIVKDFNKKLHRAKEKQQAKHNEYFELLKPFLYTGKKNAKKPVIGKLSDNWQYQYLSIDKTKALTHLQKCTKEVCNEVEIEQAQQLEKLRYSVEKKKIKDVLLVGQYKKNFIAELDNKKFKVSKLTLPAKAQWEALIKHPIKDCDDNLITLEDCFDKSKPKPEQVEIDNPGMFNFWQSLSQESGLEIDYLQTHLFKRNDKGELYKKLSIIPTGVFNKKIKTEAKLKILENNARLKKSFGMDFKKTIDLIPQSSWEKLFKDFFHTDKIKNDSSHKQVRKDYSLPVVSAPSGGFRIKRKNPLTGETVYQVSCIANGGYACGFIRGENGAIDLSEKGVTFHPKLNDSSNVAYIGKEKKPKIKKKEEGALVEKFGNTRKVILSTDSVQDVYLTLAESKRVDISLSIERNIFEKMCQLGNIDHNNIQPNISIAFKKEENKKCSADFKEFFENNKIPIPRDSGETHRCVYKFVVENQVDNVKIFYRTRFSKELQDAYQKGTPIK

SEQ ID NO: 211 - protein, 1439 aa, synthetic construct
  REGION 1..1439: note = Synthetic
MCNLYLKAHSENDYLGESTMTKLVSPIAVDQGARYTGIYSLSYEPGVDPFLESKNAEVVVVDNDKLTLSMAPRRAGRHLRRGNQRFKLARRLLTLVLREAFGVDPDQLDQREREFLFGLLKRRGFTFLGEEIDEEAISGLDPDLVKRLLRNCPPFESLESLWQSLSSDPGMCREFLQLSTGSDDSLDLETLDKRWLKKWLKDNVEEASDKETIERLTSGVLALRDGCRAVIRAKWDGHHPRHIYLENIAQDLKHQPEGNALADRIGLSTGELSHLIGNISNLPLRPLRRYFNDKRFSRNADRWYPERMARQLTREWKGWQPDGVSKDIVQRSRELLKGLSNAAQDPVRFWKYTDPLQTIPPYERHSNRRPPKCQSLLIDVTALGERWPEWERWIAPLHKANPELSEGIDGFSPSISGPNEPRLAFLQRVLDRSTLFDPYGLRQLAVESRSHRAAQGKETLFRDLGDQHARGFLSFVTAYHREREQARSGFWDNQREGRLLKRCHTNPPHKGKILHLLLNRLLDGDIEDVEGFRDEITKTKIGRSTLKGIAQRASDVQKRYGNALNATLKEADLDKATYKRLNDLQALIEKAGPEIGRIAGCPENRRNRLGNVFILAQLFNLLFGDPSGFSSTCRSCSEENAWRSRSVPVPGEDREGWRMIPLTADSVRPFDGVVRRAVDAQARAMARLKKQELKKRDLPAGSFVSIPVLLEQNRFSFSEDLAAIKQRIAPSARHRNRQKAAREAQEQQISRWRGKLDRIRDASHGICPYSGRDLNQVNGQIDHILPRAQSRKLDGTTWNHEANLIYCSTSANVDKGETLKNLEDLDPGYLEAVFPGQSLTSIRQWIADRVKPLLARSGRMPSFVELERDQSIALRHALFDEDLRPQVMELLRGQARATRVNGTQAWLARRFVEELRRSVPELTLSFSVNRIQPEDVGLMRESLSEIRPEFLKAPDQPLSSHAIDAAMVYAAASSLPRMESELHVPAEPLAELHDRLARLLPERIDFTDVSRKPVYSLPRADSQTLFKDTYYAERFLPLLVSSDGALRAGFTPENSVEVKPARKRSESTPAEIAISRLDGFLRLRGARWSGDLSSLFASDASSDQWVALSVDRPLALARLQQVGRGEDELTDTDALLGALKYLTNKKELRTAVVGTGSALMSWEKLNEEIEKKTTLSVSIKGAGLKSDGAKLSLPARSHWLRFAARLNEEGVLGSNPGWSDAEWRRFFQTVFPSAKRDRQHQKVRKVWSLPVVPGSPSGLVRHQRRTRSGQTVFQVASLHEFKHMGVVLRERKAEGVFPGYLRWSTNLAPLAGVLQSPSQRMIRFDQWYPLDRPSVCQSADILSVSAAWGSGLRRSVEVTVSQELACRVFDVNSAWNLPANLKLHNNASELWPIEAIGWPRNNKVELRAITPSGVVLRYQKDKGGKPIQQELERAIREEE

SEQ ID NO: 212 - protein, 1445 aa, synthetic construct
  REGION 1..1445: note = Synthetic
VCTVKAQGLFLFASQTEVLFVKLTNNRFNIHVREHKMTVKSTLAVDMGGRYTGIFSYTTDSGFPKAKEVRAYVLNMPDNDALTYSMAARTQTRHRIRSQQRFVLARRLTYILIEEKLKRKLSLREKEAISSLLRRRGYSRLESELDLSVLQGVESGFFKYFLPNFDEDENLLTQWTSLTDGYLQNNSDSRRQIQIFLESSKDSKEFLTVVKSQHQDTKEYKNALKVMRDDAESMIEQSMFGHKHRRLYLEAIAQDIPRDSRLKPIIEAFSGVEKFHHFIGNISNLQLRALRWYFNDPSMKNNVFDKERLQSVLVRAYQFFHYPKDLTQQRDEVLNAYEGSTDILETLQTLNPELTIPPYEDQNNRRPPLDQTLWLSPRLLDQRYGETWEIWVQNLLRSPLSKGIDENLDTILITTDRKARLLERQSGRLIHYTSQKLYHSYVLQRLLDRTVENDAYLLKTLVSSNRGNSNEIHQAQERLTRDLGSQHIKKFLDFVRQYYDEVDKAKRGLWFIVEKPLMERADIHPPMKNDSVILRLVGNILCVSDLVDLSFWTRKVKGQSTVRSLCTAIEKTRKEYGNSFNYLYQRALYLQSKGKKLSAEDKDFIKLQSNVLLVSDVIAEALDIKEEQKQKFANPFSLAQLYNIIETEKSGFISTTLAAVDENAWRNNLQGKARCVQLCADTVRPFDGALRNILDRQAYEIAKLKAEELLSTELKNQTIDLVVLLESNQFAFSASLAEVKKSANAAAIRQKVAKAQKRQQDRWLSKDERIKSASRGLCPYTGKNLGDKGEVDHIIPRSLSMNYMGSILNSEANLIYCSQEGNQLKLNGRKKLSDLADNYLKVVFGTADRGTICEYIEKSVSELTDAKIVQFELLDRSQQDAVRHALFLEDFSEARRRIIRLLGKINTARVNGTQAWFAKSFITKLRELTKEWCANNQITLAFDLYRLDAQTVSQDYRKKFALINKDWAKPDDKKQPIASHAIDAFCVFAAAKDKRSIANVLGVFDEAAEEQNLKKIARLMPSEVNLISPKRKSILDKNEVGSRALMKEGIFAEHFLPILVRGDDCRIGFDWSESGSVKVKDSDKLFGVLDGLLKQSQKRSVNGFETYTVDRIKAFELLHDVFIRPCSQKMLEQAEVLEKLHYITQNISVASVYDAVNRQFKCREEILKDKDFDIKVDLGNRFGSAKGKITLPAKREWEKLVNRPELKNLIGDKLSDKGSEKTPDGETLIYDIFRSIPVQKLSHKATRRVWSLPKIPSISSGVRIKRKDSNGNDIYQLYMLNDTKCKGFVVNGKGVIDWSSDLVADLYKQPTLTILNGRYLKADQYVRMDQWYEVDCGRDDIIVKMCPGTSRRRYIEITQSKKQFEDWTGYISGSFWNYPVTIKLSSQQITNFVKNSQMPLLGKPRSGQITVITLGNTLKYRYCVKSKNSMMNEAYQKAYLAHFKQ

SEQ ID NO: 213 - protein, 1423 aa, synthetic construct
  REGION 1..1423: note = Synthetic
MLFVIKGWDISFTMDNGHYPLEQIEDLMKSTLAIDLGGRYTGVVSYTSEFGLPSADSLKAYVINTPNNDELTVSVKSRTQVRHRLRSQKRFKLARQLMTLIVQHKVARNLSNSEKEALFGLLKRRGYSRYDSELDLSCLQSIETEPFQSFIPEISEDESLLTQWESFKAGYSTGNVDCINIVRSFASLLDAKQFKEHLKQYSLSKEEVKDYLTALSVLREDALLVEQQSLFGHKHRTQFFDDIYGDIPKDSRLKTIVNDFGGLEPFYRTIGNICNLQLRALRWYFNDPSMKNPYYDDKRLKSVLSRAYHFFHYPKEELEKCRDILSAIESADSALAFLASFDPKKTIPPYEDQNNRKPPLDQTLLLNPRALDLRYGSRWELWVNNLLRAPQSKGIDDQLDVILASTDRKSRLQERQSGQIVHYTSKKLYNAYVLHRLLDRTLDNDPYSLRLISKERIGQSNDIHEAMSRLTKDLGSQHLKEFLEFARNYYNEVELAKRGLWSIVQTPLLERADIHPPMKKGTIISRLINNVLCTENVSISQFWHLRVKGTSTVKSICASIERTRKEYGNFFNAEYKKALAKHRVKEKLDAQDKEFIKIADNVQLTSQRIAQALNLSEEQREKFANPFSLAQLYTIIETEPNGFIKTSVAVNDENAWRTNLAGHARCVRLCSDTVRPFDGAVKKTLERQAYELAKLKFSELQNSVKNDCTVDVTLLIESNEFAFTSSMAEIKKSDKAKAIRNKADRAMKRQDQRWQNKNNRIKTASRGLCPYTGQPLGDNGEIDHIVSRSASLMLYGDILNSEPNLIYCSQKGNQLKSNRIKTIQDLASNYLEKVFGTSNFSAVEELICSTVSRLSDNDIVQFDSLTQQEQDAVRHSLFLNSANPVNRRVRQALAKQFKSRVNGTQAWFARQFIKTLQELSANWCKTNNISLTFDVYRLPSQSVQGDYRAKIATSAPELAKPDSAQPIGSHAIDALCVFGAALDNQKIAKRMGLDNLTLSDSLEHLTALLPQSVDIINIKRKSLFDKDDLQSISWFKETIYAEEFLPIMVKKDETRIGFSWNDQYSLKVKHGDILIKTLSSFLNEAKPVREYEIQTFTINREKAFELLHKVFTAPCTSEECQIADLLEGMSYVTQKTPISDFFDEKSRSFKLNKADKLFSIKIKLDRRFGASGTIFLPCQKDWENEIKKINQFTGQLSNSQNGQDVVLSMKKNLKRSALKHRRTRRVWSMPIVPSGLSAAIRLNRKSHDGRNIYQLQMIKNAKYKGLCVDNEGQIDWNQLLVADIYKQNSLTLRAERYLDSQKFISMDHWLDIDIGIPEVKVRMSPGEANRRHICITQSRQQFENWIGCTLGSMWTMPATKKLNEEELANFIKNANSPILGSPRDGVIKFARLGETITYYYCSQSANAQMKNAYQKAYLASLAK

SEQ ID NO: 214 - protein, 1456 aa, synthetic construct
  REGION 1..1456: note = Synthetic
MERECPVNRVISPVAIDLGAKNTGLLLTQYAEGGALTREHSKAVTLVMPEEGGKMTWSQQARTATRHRLRSNKRRKMAKRLLKLSVQQLLTRHDVTLTDEQWTQCWEALCGLLNRRGYNRLETELDEDSLTACEPDWFADALPEFFVANTNLLDQWFSLSQDPSKLRLLSEHKLMELGSKELKRQHLSDFDSSEKNKIATAFIIIRDGAHSLLQELDYGHKHRREYLAAIESDIERDSRLTAIRQHIGSTALWCLIGNISNLQLRCSRWYFNDINMKERDIWQPEKLKIVLNRWLQYWRPATEEEKQRQQESLSTLEKHSDVLEALCHLDPTFTIPPYEDQDNRRPPKDQTLWLNPLALEQRYGNSWQIWAQKLLRSNPNWDDGLDLILDLYDRKSRLPKEVSGKRIEPKVTSDQLRYSYLLQRLLDRSRKLDPYALRKLARNIKTRSSEASFDVLAKDLGTQHTGEFIDFCHRYFSEVDMAKQGLWRANLSNLLERSDLNPPHKKKILYRLVGAILGEEFTKEQLAGFRSKVWAAKVLPRGATLKGACTAIEECRKEYGNLFKERLRRLRYRIERLEEPVKSLKGDDKVIWNVWEKTQHAVDAIANHLGHSDDKKKTYANPFSMSQLYNLMERDRNGFSNTTLAAHLENAWRMTEEVSQGEKSARCSRLSADSVRPFDGLLGRLLERQAWEIAKLKADQLVNSGIKNSAIDLPILIEENRFAFSEGLIDVKKAGSAKRKKFTEKLNQQRSRWEDKETRIRKASKGLCPYTGKPLSDHGELDHILPRAASMARNGTVYNSEANLIWCTRTGNQTKGVRRYHLEDLHPNYLKVQFGTGNVLEVSQFIETTVLALPDDFIFDALESDEKKLAVRHALFLPSESAAYKKAEWRLASQMGARVNGTQAWLVRAILEQLDSLLQPWAKAQGNEISYSAARINAEEVSSIRARLGEFDSKFSKLEFQPAASHAIDALCVLAAAASTPKTMPVLAQGEGLTEHMDWLVQAMPINVAIQRVERKPRYHKADVSGQTLFKDGIYGENFLPVWVGKHGIRIGFDPIRSLVCKGAKSEDNLYSSSILVKGSKPELFIEYIAPFLKHQNILTKALESEKPQRFVIDGNLAFLHFQKVAKQPCIDHELLQADALEALYFNTSKKNVWKRIYNEPGKKFKAKEDILRAKDFTLKPSFSIGKGKDALVSLDGQLYLPAMLDWQRFISQPEIASQLGCKSSMPENTREICESFFKVRRGKVQHKRVRREYSLPVVEAPSGGFRIRRKGPNGQNVWQMQPLEGTPSCGFTVDVETVNWNRLAQIPHLRKSENIVGKGERYLPPPKEVVLFDKWLTIQNDQIPAGVEMSMAPGTKGRRYIRISQPYNQFSEWLNEAYENIPETALLLPGELKLNPGKYFNNHLCDLLGKPRSNLFIEHVGEKVTYWYIVESSNQAMKAAYQKAYSLSINSKIGA

SEQ ID NO: 215 - protein, 1465 aa, synthetic construct
  REGION 1..1465: note = Synthetic
MKNYISPISLDLGALNTGAVFTHFIEGEEPDSHNGVTFVLAPNDFQVSQSNRLVNRHRMRGEQRRKLAKRLFFLILEEEYGLTQKENKLWEFIRGLLNRRGFTYIQEEGENDTVETIEIPIEFAKFIFPEQFKKIKSNQNDTIVQYIHDKANGEEKDAISFWKTLRDEKVESRLKEFQEDFSESYTTNECKKFLSRIREISDRLIKEFELGNKHRKKYFEEIYLDLKEFQLDEDDPDFSPKKKPIEELLSSAKKKISLEEFYKLIGHISNLQLRVLRKYFNDKKMSEKDYWDKDRLKKYFILWLKSWHIKKDSTEKENQYRLIYQAEKENKDIFLLFFENSPETTIPPYEDQNNRRPPKCQNLLLSEKILNQNYSGWKEVTNIILREKKDDYGLINIPELIERYKSGNSNLSICTESISLQRILEKSISLDNFKIRQNVRMKSLTNEELNNKYSKNELKLAEDGLNRLKSILSESQIELLFNIANSFYREIQEARAGYWNENSSMLQKCESKPRHKSKSKKELVSQILGIKLNEEEMQKFIEKVWMTSVKGKSTVKSLCKGIEDYRKKYGNLFSEYYSGFEKRLYAISKSNNVELNESFKILKSDIEEKIRSEKSERYIENLHRNLDDYKEFVSIHEKVTLISEIIGKHFSFNQTQVSRFENPFSLAQLSNIIDGEQHGFSNICFACQKENSWRGEIIMDSANATQLTSDTGRPFDGQLDRILKRLSIEITKEKFSQLESHFQNGDNLEIPILMENNQFSFTEELNNLKGASKKAKEKVKRGIEKFHDRLISKEERIKKDSGGLCPYTGEKIGKNGEIDHIYPRSKTIGTVFNSELNLIYTSQMGNQKKGNKLYSLKNIHENFLNKHFKTSEVPKVKEKIKNCIDKVVEKNKIISQKFIIPDRLENFERLCFKLAMFDDDLRNRVSGNLQTHSRALVNGTQVWLFKLLKRELQKQIQKKYPKSEVKILPYYFGTREDDFALSGYRKKLSTLNPNYEKQENQPEPSHIVDATMVFAHALTLSSLGRLSLKSPLIKDNTIEDGKWLESLLPEEIKIKNIKRKLKYRKENPESSSLFKAGMFSERFLSILVNEKGIRFGFTGKKSGKFIDKKFNQIVFEKLKPFLLYKSNPVTENLEHYLKLEKNPKYSILKIHRDKAKEYLQRCPKEDEIGNYLESLRYMTQNKNIFDDKGNFTPPEVNSKEKFIVKIGKEKISEFEIQMPYLDEWKKLSLLLKTEKDPEKKIEIAKKYFHEEKIKNPNRHGKTSRKLSLPIKKEPSGGFRIRRKDPFNNFVYQIHEGETQNLGFSKESENINFKNSVLHPIYNSKNVTPYKLEEKGSYQEIVYFDEWRKLQISDDQQKAGIVSIDMAPGTKSRCYLQVIIQRKNFDEIVFASNSSKLEFYKLKTSGKKDSDDFQNLSDFLKKEIADQRDFIKILHINQTEVKLEYTVNGFPSSLKNLYDKGEKINL

SEQ ID NO: 216 - protein, 1402 aa, synthetic construct
  REGION 1..1402: note = Synthetic
MSHTCLSSVAIDLGAINTGIYLFQMVDGELSSADKKGVLIRLDPDKIKLSQVTRRARRHQRRCYARRKLAKRLLKIILEHKFNAPYDKLPNNTVEFINGLMNRRGYTFLGFDELDVDEINILDNNMLGEWLPDFFAGSTVAATEQLQMITSDLQQCEKLGKSLEQLLKTAKDKTGILGSLDKEIKKPVLSALNKMHEAISSTLKSERDGHYHRREYFENIHNDIHDFSDVLKPFYQLSKLNSEALFRLVGHISNLQLRVLRKYFNDEKMKNCSDYWCDTRFKKYFQRYVRAWHARKDAKIAENRRNIIASLAENDVIDFWLGHHPELTIPPFEDQNNRRPPVCHSLIFDQGKLDQYYRHWRQVTAELIKLVDKDYAVTDANAHIALQRILDQSSALDYYSIRGLVENRNESRLKSEVYDARRQELQQKVGNNAAEEFLGLAKQYFYESSLAASGDWHEEIDTGLLKKCGKHPPRKEKQLDKILSSILRIDMDSAMLDSFRSFFSNHKYKGNSTCRSVAEKAAKAQKEYGASLKAILEQGNNSELNKLMEQITLAASALESFLENNMSANGKKHEYQGKLADLFIFAQMYNLLYQDIQGFSSNCRNCTLENAWRSLRSEADNSIANGRRLPADSVRPFDGVLARSVELIASAAARAKASQLLQLPEYISEVDITTGIETNSFEFSSELSEVKKKQLGKRADSKLEALAIQQIEFNQAKFDRIKSDSCGICPYTGEKLTGFGHIDHIIPRSYTRDRFRAVFNSEANLIYCSVAGNNRKGDREYTLDDLNDNYLKAVFNSADREWITGHISEEVSRLLNANTRITSLNSLTFDQRKCIRHAMFIPALRNELLSELNQQNRVRVNGTQKYFLSVLRRKIESAIKAKRPQLALNFRSERVASSVIAAYRNALSQFAPENAKKMPQPAFSHIIDAAMLFAAQSAVGFKNPTNNLAPAEDPAYLKQLLPEEFEITSLNKRPVYRANAWHQPLFKDTIYGAHFLPFIITGEGRSGFGYDQQNCVYINKDEDKVFAAIRPFLRKPSPELNEIKKQAINSKDSIVLTFNKSRIFELLHKVAKYEASESMNYQADLFEAILYQSQKTSLQSAMFDQSGKKMLTREEILKDNRFVTKIELPARLGSNKDFVLPFKFAWLKLLEQDFIKTCFGRKLDNEDLAKLDQKIRTYFLEKTKHNKTSQRMAQRKHARARRVFSLPVKPGAAGAVFAIKRKTPAGQIWQLMASEQAYEGFRTDRSSFGAEAKMLLAQLSASKNAFALGARYSARTANVSVDYMDSWKKIPLNGELATKLISLELCPGQATRRYARITVHDNLFMQAIYPCLAIDNDSERHSLLLLPEYKFAKDKKENFKKELPGLGCPRTFVRIEKAGKEVTFTYEADGVSSAIAGRYFSV

SEQ ID NO: 217 - protein, 1422 aa, synthetic construct
  REGION 1..1422: note = Synthetic
MESSKYIFPVGIDMGAKYTGVFMLSHLDGVLPTAADATAMTIVNSDKIHYSMKHRTAVRHRVRSKKRFVLARRLLNLIVDHQLMKAGFVLSAQEKSQLTEALSGYLKRRGYSRIETEIDLDSLNDVDPIVFAMCPGFEDFFSSDIELLTQWNSLTADLSEVNKINSNKKIPDVKTFKKYVKDNFPDYSSKESLERYLEARKTIIEAARQISELTSLGHLHREKYLDNILHDMGRDSRLKKIGEAFGGICRFWNLIGNLSNLQLRALRWYFNDPWIEKVKPVETENSQPLNEQKLKDIWVRAYKYFHPDPENKARISDVIRALSKADDIIDCLCELDCKSTIPPYEDQNNRRPPLDYTLYLNPAKLTEVYGDSWRSWASRLVNADSDLQDNLDVILQNRDRKSRRTTQDSLDFRLSYILQRALDRSKVNDIFEIRKILSSPTLYSEAATRNLLLFKTLEEQNFGPFLDFARRYFYEVAKAQKGLWNEKESILERSDLHPKQKKKVLDRLVANVLRVDEETAKRFIADVWNGKVKGNSTVKSICTRIEQLRKDRGSAFNLEYQSALTKAALGNEKLDSEEKEYVKLKQDVSLTAAFIGEQLGLSDEQRTKFANPFSLAQLYTIIETERSGFTKITTAALLENAWRLTFKNGAAQCGPLPADSVRPFDGYMRRVLERNAREVGKRLIEKIKRDTQDQGAEIVVPILVEENKFNFTASLLELKRLELSDSRLKKKQEKIEKAGEAQKKKWLSKEERIKDDAKGICAYTGAPLNSEGEVDHIIPRSKTIKNYSSIFNSEVNLIFVSRQGNAAKKENLYFLKQLNSAYLTAVFGTSDFSTIESKIESTVQQLIENKRLGYLDLLSQEERNCVRHALFLNPGSDARKEVLSVLGARRKTVVNGSQAWFIRTLRSYLENGLQNWLTETGNKLSFDAFSIPAVTVSSLRSQLGELENSMFKEDIQSVSSHSVDAMCVYAAACGDASAECVLHGDALLADSHSMRAAQLLKKLYPETCQVVQISPKSFSQKDRINNSAIFKDTIYAERFLNIYKKKEEVFVGFDNDKKSSNEKESLTQVKGKNPHLLLQILEPFFEKRNESKDEGTYRIDKTKAFQLMGKAGCALLSNDESRQLSLLNQLHYTTLKQEVLTELVDTASKKIKLKSKYQSNFKREFLLKLELRDRERQFSAKGNIVYPSYKRWQELSEELSNFLTACPEGGLEEVNARLSSLWTTSEKSSVRHKKVKRSMSLPMLASQSGAVRIRRKDFRDGYVYQSIDANQLYYGFSKKDGKILFNSPLPHPRLTTKNLKIYEYQYQPVNECVKMDEWKTVYEKEGVIVEHAPGTKARRYIRATLPFDLYLLWDKELQKAKDKSSLTLPSKVIRETKDFFEEGIYKNEELAQFFPKPRENNKKFTMNIELVGSTVKFSYVTA

SEQ ID NO: 218 - protein, 1151 aa, synthetic construct
  REGION 1..1151: note = Synthetic
MESSKYIFPVGIDMGAKYTGVFMLSHLDGVLPTAADATAMTIVNSDKIHYSMKHRTAVRHRVRSKKRFVLARRLLNLIVDHQLMKAGFVLSAQEKSQLTEALSGYLKRRGYSRIETEIDLDSLNDVDPIVFAMCPGFEDFFSSDIELLTQWNSLTADLSEVNKINSNKKIPDVKTFKKYVKDNFPDYSSKESLERYLEARKTIIEAARQISELTSLGHLHREKYLDNILHDMGRDSRLKKIGEAFGGICRFWNLIGNLSNLQLRALRWYFNDPWIEKVKPVETENSQPLNEQKLKDIWVRAYKYFHPDPENKARISDVIRALSKADDIIDCLCELDCKSTIPPYEDQNNRRPPLDYTLYLNPAKLTEVYGDSWRSWASRLVNADSDLQDNLDVILQNRDRKSRRTTQDSLDFRLSYILQRALDRSKVNDIFEIRKILSSPTLYSEAATRNLLLFKTLEEQNFGPFLDFARRYFYEVAKAQKGLWNEKESILERSDLHPKQKKKVLDRLVANVLRVDEETAKRFIADVWNGKVKGNSTVKSICTRIEQLRKDRGSAFNLEYQSALTKAALGNEKLDSEEKEYVKLKQDVSLTAAFIGEQLGLSDEQRTKFANPFSLAQLYTIIETERSGFTKITTAALLENAWRLTFKNGAAQCGPLPADSVRPFDGYMRRVLERNAREVGKRLIEKIKRDTQDQGAEIVVPILVEENKFNFTASLLELKRLELSDSRLKKKQEKIEKAGEAQKKKWLSKEERIKDDAKGICAYTGAPLNSEGEVDHIIPRSKTIKNYSSIFNSEVNLIFVSRQGNAAKKENLYFLKQLNSAYLTAVFGTSDFSTIESKIESTVQQLIENKRLGYLDLLSQEERNCVRHALFLNPGSDARKEVLSVLGARRKTVVNGSQAWFIRTLRSYLENGLQNWLTETGNKLSFDAFSIPAVTVSSLRSQLGELENSMFKEDIQSVSSHSVDAMCVYAAACGDASAECVLHGDALLADSHSMRAAQLLKKLYPETCQVVQISPKSFSQKDRINNSAIFKDTIYAERFLNIYKKKEEVFVGFDNDKKGSNEKESLTQVKGKNPHLLLQILEPFFEKRNESKDEGTYRIDKTKAFQLMGKAGCALLSNDESRQLSLLNQLHYTTLKQEVLTELVDTASKKN

SEQ ID NO: 219 - protein, 1432 aa, synthetic construct
  REGION 1..1432: note = Synthetic
MTERPMKPEKKPYKLTLSIDLGGKTTGVMLIGHPGDRFPVAQDCTAAAIVMPEENGNFCYSSANRRAARHRLRGKKRFQMARRLLLMIVNNQLKAKSITLSHEEANRLKEALCGLLKRRGYSRVSGEIDLSLLENLDSIPFANHPEMSSFFYEGTPLADQWEELSNRPDRVHEFLAKNPTNKDFKEYLKKEYPDLQDQSSDYEKGLCIMRDDANAIDQQINMGHKHRTQYLEDILSDMKHDSRLKPAISAFGDLDNLWRLVGNLSNLQLRAERWYFNAPYMCKEDVWQPERLRKTLIRAFKYFHPEPGLAGREMTKLIAELEASTDIVDTLCRIDPVRTIPPYEDQNNRRPPLDQTLWLSPASLNALYGHTWTAWSTSFERVDPTLSDGLDEILTHTDRRSRNVVLSKAPLPILDYKFSYILQRVLDRNSTRDPYALRALASSISSQTSLKGREALERTIGAQHVETFLMFARKYYAETADARSGLWLPRANNLLERADIHPRMKRKLLNCLVGNVFGLDEEFGRKFRASFWNRSIDGTSKTCLRTICNSIEKNRKRFSGEFNFLYGQVKVKLLRHQKLTKEENEIARVHERVERAAAFLLNVVKLDPDCVRRVANPYSLAQLYTLIETEINGFSSTTYAAQLENQWRMSSGSDRQKGAQCSRLPADSVRPFDGILRKNLDRQAYEMVNLVMNRLQESDLRNTPIDFTILVEQNKFAFSASLAEIKKKANTKNKLNKQIERQQVRWLSKEERIRQASQGICAYTGQALGSEVEIDHIIPRSLTTAQMGTIFNSEANLICVSRLGNQSKQDQRYYLEDLNSKYLNKVFGTSDTKTIEKEIEDVVASLLNVGRLGYFEMLSEREQSCVRHALFLKDASEARNAVLRTLSALNRTKVNGTQSWLIRTFIEKLDRCSEEWRRETGCEFVFRSWNTSAEEASLLRRELGKADPDLEKPEIQPVISHSIDALCAYAVACGMNSACGFMGGNPKFADFNTFNFPDSLTYLHPRTCKVILVAAKGIAKKDTINAKPIFKEGIYAEDFLPLIQCRNRLYVGFSLPNKNGENGNSILITGNNPLGVLNILSNYLDQIPLNDQNSIRTYRVVPQKAYELFSRAALDPVSLSNKDKTAALLLRSISFFTKRIPVETRLLDDSRKKFVHKNDFIKDKDFIITIDFSKVSKEFSFKGKLIYPSKKDWMHLADDKKLDTLWGNPVKESFNLSQWLAEKMNMNSANLRHTAVKRTASLPILDRPDGGFRIQRKSLDDTSVYQIYSINTKGAGFEADGKTVNWKKPSLLPQLVHKNLTPLDFSIEGSRSREMVSMDEWRIVYDNGETKVFIAPGTILRRYIKIEVPFSTFQSWLSEEDRQKINSPMKMAHKFKISKPLCVAPSIVKIIGKPRDGAITVREVGDKLIISYSVQSNADMNLSYNNAGNRRF

SEQ ID NO: 220 - protein, 1407 aa, synthetic construct
  REGION 1..1407: note = Synthetic
MKGLVLKIISPIAIDMGAKYTGVYLTQYEQGDVLENANPEGLVVMHTENMQYSQVDRTQRRHQTRTAKRRKMAKRLLWLVLAEHYNLSFKNCDVKEREAINSLLNRRGFTYLSEDVDEALLQEIDSSAFHLYFNSDIPAATNLFEVYQVITTSVETAKSFQNSDEYAISVKDFSKRLEGDYKEQKKQLESGFKAFRQGVDSFINAEQDGHKIRSAYLANIKKDLSEHEDYQFLRTRLTVSIDAFSNFVGHISNLQLRVLRRYFNDENMAYGDIWDFERLHKVFYRNVSGMHYKDNTQDKQNQVTLFSMRAQDIISTFEALDPIVSIPPFEDQNNRRPPKCQSLKLSPTTMIKYLPKWHIIVPQLADDLEARSILVKDGLELNSIKNTNDWAQCLQRILELSYDHDPYLLRRWIGRKDQVGEHTKRAISNFERVIQQQHHADFIVLAELFYAETQAARNSIWFKENSQLLEVCAQKTPHKANQFKELLSGTVNVNLTEDQKEQFEKLWFDNPRIGKRGIKGWCGFAAEMQKEYGNALKEQINRNIWLNENDKKVENKKLIELNKAVESVAKIIADSMNIESKRFANVFDLAKLHNLVEKDQKGFSNNCRCCTKDNAWRGNIVENDEGKDAAFGLRLPADTTRPFDGLLARLIDKQAYQIAQAKVAQLLSEPTNEMVSVPLLIEENKFRFTSSLAEVKKNTKKRKDNEDKAKKREGLWLEKNGRIKEASKNICPYTDKPLYNGGEIDHIISRAESKGRKQTVFNHEANLIYCSVTGNGIKDRQSYSLADLKPKYLTKQFETSNREKIKQRLIALCEPIIAKRELGSFGDLNEDTRQAIRHGLFVDELRPKLIPLLHQSNKTRVNGTQAYLAKLILQKIKLLYKGPIEFSVHYVEAELASRLRVQLGNQYPEFAKPEHQPVASHVIDAAMVMAAGLQQPHTQACLQTAGLDNNGDWLKAILPTEIDVKRIEPKLKFNKKQVHSQTLFKDGIYAEHVIPLVVNDEKFGVGFTADNVAWLKNQEEAPVIWWNALQLYLNKSPETLDDVRKNIGNQTKVYSFNNTAVFELLYKVAKQPCSDEELLSADLLETLIYTSQKVKLQSALYDENNKTYKKITDIVNMKTTDNKGDFTIKLDVKSRYLKTTMRAFESSLIVYPAIASWSNLLEHDFVKAKAGKKEAFDSDSYNRVIKGLFSTIKENTRQHKKVRKNWSLPKLSSPSGGYRARRKNADGSIIWQLFAVEGLSASGFYMIDGKIDFSEAGVAGIKAIDDSKNLTSVKSRYKNIQLPVEPFDNWRRVTIPDKLKGKIKGILLSPNSKSRFRVRIEFSYGQFKENVLPLTDSIELVQAWSQIPAELKMAKGKEWKASFGDLIGTPRSNLFTLVIGTSITLEYIVGSSNTVMKQAYQNGSLID

SEQ ID NO: 221 - protein, 1257 aa, synthetic construct
  REGION 1..1257: note = Synthetic
MKTHISIDMGAKNNGVFLAHTKDGKIIDKTATNYIFEPSSINFLKKDRTKKRHQRRGFKRTRLARRLLDEIIKKLKKQDLSQAEYELLYGLLKNRGFNYINIEFENDLSDESLEILNEIDAYEFKNCVSKNDYELRLSEIANEYDIDEFCEFLAKQVALITQKDENDKDIYKIADKKSILQMFEALRNEMLKNNKHRERYLKDIKELCQGVEFKSVISKLNISVNEFANIIGNISNYQTRVLRRYFNNKFDDNFDDEKLRLQSIKNINFLSYQGKTELENKRIMLENLKNSSYEYLCKNDPKTSIPPYERMNNKSLQTCNVLILKDNLSKSLKTCLKHILENPNFSSLTMDENGVIKEYNALDENELKVVFQRFLDISKGYLEDIKLYPRGFYKYAKYFKDTICLNDSDFDTLQDFANKYYDELLLAKKGVLSNKLLKPCGCHTPYKNNLKHTHLSILWAKPSGFSEDDVNTFVEFINNKANKIKGNTTLKGFLTHLSKTAKAYQNAFYKALEDEKALLENKTTNDKELKKILEQYEKAYELITSQEIFKNVAKSDKLKTMINQLLQTTNIILDDTKGFNKLCKEHSLQSLLRTSGEKAMCSVFGSDSARLINGKVEMYIDRLAYEIVKDIDLSKSKELHVNIEQNAFNFETAAEKLKLTKRKPKEHFVICPYSGEKLNLNNAEYDHILPRSKCEYNSEANLIPVKSYENLRKKDAYMMFDALHENYKNNLYKQCKVSNEKEFKAFINDTLSKINPDDYTNYKNLKYYEQIAFRHALFMPDESFYTKALELLKQDKLKTTTNGTQKRLAKLIVQKALAKNKDLNIYVKFVDSRLTSAIRHELSKNLPELKKEEKQQSHSHCIDASVVFYIANAAKDSKTTIINDISNKFEPKYDFNEIYLQESIMKSPKSKVYLELEQKEISRKQLFKDTIYSLRYEKAESLSDEHVSILKELDLLMEVKKLKSVKVHINTKKVFDLIFASFKAKDIKTLEKIKFLDKFLVSSVRKDILDIFFDAKNKELIKPKDKGANIEKFYEILVKNGVKDKSEVEKIQKLYIDSFYTGNQKNIKRARDKRRVTYSLSVAGGANFVVRRNTGYEGLANENIATKNYFDKDKIVGIKYYTKNVLPCKIEDIIKILSLSDNAAEIYKLSITKDLPQKIIKLEYEVSQADRHTVKVYFDKVKLGYDLNIFKGDLSLKNEEWVKFCNECLISEFAEFLGKPRDYKASIICDNFSVLGFSYSADRTSKANREIMKDNIC

SEQ ID NO: 222 - protein, 1737 aa, synthetic construct
  REGION 1..1737: note = Synthetic
MSEKNDFISPIAVDLGAKNTGVYFTHYKVGSSLDEIQKNKKGIVYKLDNYTLLMQERTIHRHQKRGLDRRQMLKRLFKLIWIKHFKLEWNHQIQQALSFLLNRRGFTFLTEEYDPEVLEEFPLEILEHEDFPKELKDKLLSSNSRQSEFINLHQEIENLSKKSDDLKKVIKLLKYEERKIKRPLFVITRIRKLKDYCNEILKTKKKIKEKGKVKLSELPMWVLEDWKKRGIKSLPETNKEKNSVDLTRYLNELSQEKVEEIFDSIPKTLEEEKQLQNSIWNRKNKKFEIEKFRSDLDKFSSEEEKNKLSWIQTHLHHLEFALEKTENEITSGGRHRSKYFQEVEEVLNQEYNEKSPKYLKNFCYNLKSGKYSPLDREKLKNLIGNLSNFELNLLRSYFNHQSHIKADQWKEKELNEKFKHWIKNIWRVNPKKDRDKGDDGKYSYKKLKEKLKNKNIIDFFLNTDPNLTIPPYQNKDNRHPPKCQSLILNINYLDQNYENWEEWLEKLKIESKDYIEDYEIQLKDLKSDKEKSYFGQEYKNDLKKDSGKRTEKHLKARVLQFIFDRSKKQDKLKLNQIYSYVKRLKERDNKNIEKLKEKLQKTIDNLPEELKSSPNFDKKDIFQEDSFLHLTCEYYKMRHRARAGRLFIHPKYNYVKNRGYENTGRFEESNHLLIYCNHKPRRKHYQTFEDLSSVLQISSQKLRQKVRDSDELIEKLKEIKGLKSNCSKIAEEQKERRSYLKLDINSIYKARKEIDFSNKKNKEEKLIKEALKATEVKDADSLYKLCEKAKELYIEILNKLDRIERNEERKSSIEENLKDNPAIAFYLLSQVNNIAFKERNGNASTCLVCSMDNSERMQLVENSTKASRLSAISTRMINGAIMRMNRIITKAIAEEKWETIKDLLKDNKKVSIPIITESNEFEFEPSKEELIKNQRINPRKGKLLDEDKGFEQLEKEYKDKRNRIKEISLLCPYTGKTLSNNEGEIDHIIPRSSQYGTLNDEANLIYASREGNTNKGNEIYSLFNLNEKYKKEVFGKKDDKEIEEWIKDKIWDEDKKGFLFGKYKNFSYLDSKQQKAFKHALFLVGNHPLRKEVIQAIDNRNRSFVNGTQRYFAEVLANQLYKKAKKEKLEHLLNFDYFSLPSKDISEIRKDMENLKKKEEDKLLYQELEEYKKKKGEKQTDYSHLIDAQVTFISSFSKYYKELKQIPIDVFRDYEKIKISKEDFEVKNLERRSIKPKDTKISHQAIFNSKAGAWHFLKLIEIKIDESSYYLNGFLDFNKLNLCLEQRDWSKIKEKIEKIEDSYHHEKIPIAQLLKEKKELEIVKLYEVGEGKHQFGYQKNEQYPKMIMEKNWNSHSEIPGTSVKNIKVFLHNIDKTKVAKFLLNNFNTKSDPKKWKDEDCQILDQLKTIWYHTKKIEIQYNAKKKEIEAKKKIQDILKFNKDFKFNKCFNSSLFYSWKNLDNKWNQFVKNEKPEEFLKKYFINQYSRKNPKILNQPHQKVRKRFSLPLKSSGQGWFLVKRRIWEKDKNTYIYQCLSEENIPKFGSHKDTLKDILHLHFRQNNLFLFSTSSKNLKEKLDFVDDIIDSDAYFERDIPEDLLNLLEKIENKTSNDNKRAYFRFTFNKHLDENDLDKNFMKIINRFPIRRFVENEGLKNLLEEYSKESIKSILREFEELKRIEEKSKTKEEDDEKKKKNDFYSEVKKLYDKVDENILEYQTNTPFSKKKNNSKLKEKNKKN

SEQ ID NO: 223 - protein, 1480 aa, synthetic construct
  REGION 1..1480: note = Synthetic
MSDNALIFPVAIDLGAKTTGVYAAGYSPNTHVGQFNSDSVFKTGFVAEVDDGQTGYQLLQTQRTSTRHARRSRTRNRQAKRLLMLMLKCCLGFDTDKHQIAISHFINRRGYSYVETNIDEAAINEIASDNLGTFFHVLESNGHEALSELLTQTMPVDGLPLFDALQRIAEDKQQLITLQTELQAFTRQDKKQQRALLPLSKAVDFLIAEQSSGAKHRREYFKNIRSDLKKLSDHPERHCRRLFHALHHHKKTTGSDTFDSFYQLLCHINNFDLKLLNSILKRVKSTQSGEQIEVIVAEKFGKWLTKQWRLSSANGADRLQQIRDVQHAWKDYRAQNPQSVIGFFLDTPPECTVPPYESHTNRRPPSCQTLTLNPDLLSRDYPQWRDWLAWLSSTPAMANAVQAYRTQLVAVESAKGNTLIQTDELDARTLQFIFDSAQDKDPFKLNAIWGTWKKQRQQQRQGDEHDKTTDKLAKLLVQSALPASLTENFTSHPVPGDFWHLINRYFQSRRRAREGRYFLHYDNHYPKQHRWQRDGKLLVMCQHRPRQLKHQATRDIAVLLGVPQTQLQQAVDNGQCDDNKALFAKVKGLQAACRQAYQAQKAWGPDLKAMMVSDPELKKLAEKLAPLTAKVATQLALRDEQYDSFCERNQSVFTFAQLFQLVWGDRSGFAKTCPVCSADNANRMAGEDGQPHAARLNTLTMRLIDGGLKRLLTHQAHHIANRLWDHIEHIGQSADTITVPFVIEQNRFDFTENLPTLKGLNKPKPQPQKINPEQAKKDRIKHASQGLCPYSAGSSVGDNGDIDHIIPRSGQYGVLNDEANLIYSSIKGNRQVKKDRQLTLTDLNPDYLKAQFGTADPIAITQQIETTLCGDDADRFSFGRYSQFAALSAEQQTAFRHALFLSAEHPLRMQVISAMQHRNKAKVNGTQRFMAQLLADILTKKAKQKGLAARLKFDYFQVSANGQDEDSTVALRRLMRDLHAGTKYDIQPFEKGKEKQHAYSHVIDATLAFMIAAEKHQGEGALNIHFDENVSIWGQVDENGVLSDALFPQIAVAPENLAPNVRVGPQSNEHRARQLLAGKKPHQVFSQPIFKQNALGLEFYDLAVIDGQLYKGFVEGEDKHFIKANEKVVDKQLNTFLYAVSHHYYRLIQSSDIQVYTADKHKLTALLFETLAAAKDATTFDSNAEANKLARWVCGKSAGSLYFYSTSAGLEEAPSVVKKQPNSRFRKQWLAHYQSWQAKHPDTPEKNGMWIIPTELEADWRQHCDWYLGRPTDDQQPDHRAVKSDTMRAETKSSGAMALVRRQSQGKAIYQLLALDTQKVPKDHSAALALASPNLVLLDKAIFTKGYQTKVEEQQPLAGKTIESSAFFDQAISEQWQLDISTLQVAIVSNTNVQITGLHKDWVAEHLILSGEDSEKAWTKLTSIAISDEAQVMDVFAKASLKAWLTAPCRNDKSVRVKLDDDQVSLTLPYKQPQLRKLVD

SEQ ID NO: 224 - protein, 1644 aa, synthetic construct
  REGION 1..1644: note = Synthetic
MPGNLIISPISIDLGAKNTGVYFAHYPEGSSIEEIEKEGRVYQLEKDSYTLLMANRTARRHQRRGFDRRQMVKRLFKLIWEKHFGLEWDKNVQQTTSFLFNRRGFSFLTEEYDVEVLSRFPKEAYEQLPEQLKIDHDKSGLYNFADALSQWTNSDNALEKIRGKFHRILFKTYCEKIRKCWKDKTTNDQTVGEGRDSAKLGNTPKDIFEELFQELPELKERIETEEYTFENKRKEKVTARYNRGEAINVLSFVNNNSVDVANKIVGKLPPEQTDWLFNPFADFDLEKSKERLTSPENSNIKLHLQHLTFALHKTLNELQSGGRHRSNYFGEIEDVLKNENHTHKYLEKFCAQLQSGRFKPQDSDSPLTVEALANLIGHLSNLELKPLRKYFNDGKHKTGDLWCEDHLNKIFDRWIMREWRINPDKDKDKLEDKRGDYKKLRKDWKAHNGSVVDFWLATGPFTTIPPYQDNNNRRPPCCQSLILNPTFLNNNYSQWQVWLGELKKLATVQEHLGDFEVQLKSLKSGKEQSYFSDEKVGKLKKFSGHRTHKDLDARILQFIFDRIKANDSLKLNEIYSHAKKYRQEQSTEQERKGAKNKLERAIEDSELPDMLKTSRNHQNSSVFEQGSFLHLICKYYKIRQKARDGRVFIQPEYRYVDGRGYENTRRFDDKDHLLIYCNHKPRQKRYQILGDLAGLLSVAPVKLKDVVEGQHGETLDEKLFNWLNGIDHLKTNCDRAAKEQKDRRGRLKLDIQKIADLIYHQSQSCLPSATEIKKILSKSRVDEASRLHSFCERARNLCLTVTQPLYDDSKQRQWQQDLNRNPAIAVYLLAQINSIAFKERSGNANTCAVCSTDNAQRMQMAASKDDRQSNAKAQRLPAIETRLIDGTVMRMARIVGDVIAEDKWKRIEGDLKAGQSVCVPIITESNRFEFEPSLKEIKGKKPKNVEKKNRSEGQERISVSKDERIKEASRGICPYTGAELGDAGDQDHIIPRSSEWGILNDEANLIWASDEGNKQVKNDEEFSLADLNSNYKQKQFQTSDDQEIKQWIIEQIGDGRGENFQFGPYRNFINLTPDQQKAFRHALFLVGDPLREKVIKAIDNRTRTFVNGTQRYFAEVLANKLYKKARAIDRQNLLSFDYFGVEAQDSSRGDGIYHLRKRFETINPEVQNYRKDNGKAQEPYSHLIDAQLAFSIVADAHRNEGGLKLRIDNSVSLWPVDGTVANTIFNAIRVAPDELRPRKLERRKPDEKYFSHRSIHRDSMYAEHYVPILIDKEKGEVHIGFDWNNSYALRDTKPDRITLYFVLQQFGLLENSLHLTKDTPFHELPQQLANAGFSTETNYFSISLNVQAIHAYYIENYNTAKGYQSYPDEMKFLRSLAYRTEKKKITTLEEVQNVLNKARNFQVTIKKLALPAKREWQRLVDEWEKTDLENDDFLRQFFRVSESRQSHEKVRKVFSLPIKTGEGKILLKRRSWNGEDIFQIVNDSDSRTVDAKIFIPIFVESKGSIAKLLSESARSKKLFLLDEAEYYDRINDDITEIDPTGWHPIELDDRLSSLGIAGLEYRIDNNTRPQVRLTFNKRLEQEKIETILGHPLLKPKEKERLKTQLQEVTEEDKIIEYTGSGFQQGIKQKLLPVLQEHYSRNVSS

SEQ ID NO: 225 - protein, 1443 aa, synthetic construct
  REGION 1..1443: note = Synthetic
MSGSHQKVTLAIDLGARYTGLFLVSHPADRVPTAADAKAMTLVMPQDTTDMTYSMTARRAARHRMRGYKRFKLARRLLALAVEQKIQTAGVSFAEDEKRRQTQALRGLLKRRGYSRLDAEVDLSALEKVDPFPVAQLEPFQDLLSGTTDLATQWENISEHFDKVSELKAALETYGDATQFKKAVKQVLDPEAQGFVKSYGDAFNTLSEAVANLIQAKKFGQRSRSEYLKEIRHDIEYDSRLKKLIGVFGGADNLWRLVGNISNLQLRAERWYFNNPDMVNADLFDPKRLQKTLARAFRYFHAKNDPSKNLPALIEEVEKAPDVIEWLCSTSPEKTIPVYEDQNNRRPPVDQTLWLSPVALTDQFGDDWTQWARKLHEHDPVLSEELDEILQLADRRSRVPALGGEHPTDKTGYRWSYILQRALDRSKSRDDLRLRQIAARGAVPPALEVKFAGVIGSQHKAAFVEFLTRYYNEVSEAKQGIWIPRKGNLLERSDIHPPMKKNVLSTLLGNLVGGDGSLGEKLLACWKKYEKVKGNSTLRSLCQMLEEARKEQGNGFKSGFYNIYGQLEGSGGSGGMWETLAEASRHCKPKEKEEKEYWRYVQNTVAVVDYLQRNIGLTDAQAQRIRNPFSLAQLYNLIETEVDGFTATTLAAHKENLWRMSGAESEKGAQCSRLPADAARPFDGVLRRALDRQAWELTKLIVQTVKTGLKAQDPSTDKQADITLLIEQNKFAFTESLRDLKKLKTKKSAGRVQTQEERLKEASRNICAYSGKPLTGQVEIDHIIPRSATLHAGTIFNSEANLICVSLDGNQNKKTTLYELSDLSPVYLQKVFGTADVTVIEAQIEETVAKLAKSGALRFFTGLRREEQDCVRHALFLPEGSPARRSVLETLGSMNKTKVNGTQAWLIKNIIAKTEEELKAFCQENHVRLIFNAFNIPNDQTGAERRNLPEVYRKEKNPQPVASHSVDAMCVYGAACAIERIRQVVGGIEYSHEPSMKIDADESEGLVTLYPKACDLLRVTSRSVFDKTQTFEKNVFNETIYAENFIPLIQCGNDVFAGFEIPSKKVVDGAATNTAGAVKVTGDGMALLQLLTPYFEDKVTEAAGGSRIFRINKAKAYALLRKVALNDCSGNKDELAAADVVDALAYVTVREPLSQLMKNKAAEKPDNFKIAVKLTPKEADWSIAGSLLLPSYHDLVCACRVAGAMSAQDGSHETQQERARKLQHHRVRREKSLPVKAKPAGSWVRVYRKSVDGSNPVQVLCVPTRYVGYKKETGAGNPEWDAPVTFRAFLNSTVITCGARYLPYEHVMPMSEKRVVFSNEDHTVEMVLGSDSRRTIFWTMPFEPFAKVLYRGAVDKDGDLCWLHFVDKVKLEKGQWEELLQEFPLADEERKAIRTICGKPRDGVFSIARMGSAKITISYKQESSTKAMQRAFDAGKSLENGTK

SEQ ID NO: 226 - protein, 1422 aa, synthetic construct
  REGION 1..1422: note = Synthetic
MRYISPISIDFGAKYTGIHNMHYLEGEDPRGSVQNTGCVLVMDDDNLQLSQVGRTQKRHQSRNYKRQDLARRLLIVILKDCFDQDVWQWPVKNREFLFGLINRRGFNRFDDDSLIEIEFCDLSVFESVLPDIAGYEGLEEWLQALAENAAECRLALQRLGRTREFLKTLPEIWKEEKKSIEATHKHIIHFLETSINASEEGHLHRRKYLRNIAADIILEQHGRLASLFQTNSGITPDQFANLVGHISNLQLRVLRRYFNDQNAKPQNGQTDAWREDHFSKQFWRWIKSWHCDEQTKSRWHELIKFKKKGGSVFKLMLTVQPELTIPPYEDQNNRRPPKDKTLFLNPVALNKAYPLWREIVKRLVAAHPELDSDHASTIAHMDAALDQDCILLQRMLDRTSGLDLYKIRALAMGRPDRGNQLKVASENLRLRLNQHAEPFIQSIARPYYLQINEARQGLWVEEDSLLLCLNRTPQRKARQLPTLLGRIVGDLGSHGQEHIQSLKQQWSQRGVIKGARTPKGWCKFAAEAQKDFGNGLKETIRSYRQLQARIKAGDTEEKLLPEAKKLLALEAALPDVARFIAQGLGLAAENSARFANPFSLAQIYNLLESDPSGFSHVSKPSAHENLWRMQYEQSVDGKDCARASVLSADSIRPFDGMLSRILEKQAYSIAKRKLKQIESHEMTSAKVRVPILIEENRFQFAEDLQTIKKNTRKKKDAQKSCESDFIRFEDKEQRICKASKGMCAYTGEDLGRYGEFDHIIPRSYTQKRTGAIFNSEANLIFVSSRGNQQKRDQLYTLAELDDRYLTSQFGSTNRQQIAQAVQDAVTPFLTKGELIGFHNLGLQEQRMIRHALFVPGLRDQVLQLLAGQRKAKVNGTQAWLAKRIIHHIRQGASATIEFDIIKVPTDSVRFCRGVLASRFPAMAKQSPQPVASHAIDAALVSGSLLMEPAIARSLSLAPVDTTTQAEWLKGLLPETIDIQILRKKPLYRKDAPASSPLFKAGLYGERFLPLLVMNDELRVGFTLPNSAKVLDHADNLYALLRPVLVCKDSHELPSTLAELQESLALGQRQILNINRQKAFAYLHEFGQSPTHNDNCLAIEALLYCVQKKKIDAHIYNKDKKTFKKDEDILADKFFIFETHKNNRPIFPRTVARIEKKDLTLPFKQAWVELCDTDELKNFLGTKQTLPNNFWRNFGSSLFPSIHNEDHQHKKTRKVYSLPLKISEGSYRVRRHTPEGASVWQRMSVGDFGAAGFAKIDGKTQWNKVVEIPHFAKSKNLHSLNRSLEKNPQSITYFDEWRSLCALADALPNGVIKVACAPGTVGRPYIRFEMLESQFIKKINAASGSKYKSSWELPMEIPNVQLAGFDIFSCPLLPKPRTETKKPNKHKARFLRLGKTVLIEYFASSKANKALQQAYEQGEPECI

SEQ ID NO: 227 - protein, 1332 aa, synthetic construct
  REGION 1..1332: note = Synthetic
MNKLTISIDMGAKNNGVFIVKTQNKKVLDKKATCIIVNKGSINFSKKSRRENRHKDRNYKRRKLSKRLISELIDLSKYDNKQTEQIFGLLNNRGYTFISTSTEFEKLNDITSEFINMYFEDLKGLSSREDFENKISEFEDLENLEDFIENINEKVDFECKKKKAEFYKNYQDSFSNFIKKDLQNIKKLFSSILNEIQIGSKPRKKYFDEIKDEIEKDFDFIENFSKVEFFNIISNISNLQLRVLRKYFNNKYDDVLDTKKLDIKIRAYFKAFHYKSEKERTQRVELFEVLNKEKDILNFLKNTNPMLTIPPYEDMNNRNTYKCNSMLIKPSLITKDLENTIDLLLKSDYFSTLLISNDGEFKKESLIKIKPATNNTYIDTDFTYSKYLQRILDTKIDDDNKIYHPRVVFKNKNPKAIELFKKLFGTKTYDNLLDIATSYYEEETKIHNGIYKENTSIFEKCNTNTSYKNNVKELLLKPLYSHNFTHDETKEFISEIENYEEKINRTTLLGFLKFVEEEYKKYQNSFYHIITHNFELENIKDVKDKDIKKLILGLDSCVDSLKNILNKLNIKTYLNDIKKVEKENLSKVLNILKQTYNILFYDLSGFSKTCKSCTKENALRSDENFSIGKRLLSDVAKPIDGMLDMMIDRLAYEITQQINKKDIENCESLEILLEQNRFEFEENLNEIKRANDSSIKRYKNDTKNICPYLDTTFEKGEYDHILPQSKEVYNSKANMIYCSSKGNREKSNKIYKLEDLNIKHLKEIFGLEELEKIKEFISKYIKTINEKDFKNFDNLKLNQQKAFRYALFMPTNSEEYKKALNLVKIDKLKTFSNGTQKRLARFIYEKLVNKYPREFKNKQINIDSKTVDSMLVSATRKSLSSSNKELEKEKYQESHSHCIDAMIVFYLANSKIEGRADRKKDNLTTLIPRYNFEDIYLKESGINNLSKNVTFINSPKKEVGSYKLFDDTIYAENYKHITKESLKKDEFECLIYHSILFKNQKSKKVFINNIEELKDESIYKIDVQKVSNLIYTLFNQRDKSTLLKLKFLDKLQYFTSRKEIESIFFDEKRTKLKKFNEIKNIPYFSVNLYKAVYKKLENKRDLFIVENDKSVLNSKVLNDLLIEMFESKQKDENKEKRKRAKKRHKYTLPILGSPKFKIKRANTWQVLGNNDIATKNYIINGDIKPIAFFGKNTYPVKVKDLLDCLLVNEDTKSVYHVPINISEISKYVSKLEYLVTEAKRCTLLVTFNKNSFKDINFNEIKVFDGTKDEIFKLLINNYIDNKDLNISNYIGSIRDGLKAKAMLIDSNSTTITLQYKAAINVSKKNIILENLK

SEQ ID NO: 228 - protein, 1374 aa, synthetic construct
  REGION 1..1374: note = Synthetic
MESTQQLSPIGIDLGGKFTGVCLTHLETCEEIPNHSNTQYSVILMDQNNFQLSQEPRRTTRHRIRNKKRNQFVKRVALQLIQHLISREINVNEETAIRHYLNNRGYTYLDTDLDEYLKDESTINLLKQLTGHTSESTFIDRFLQKMEYFEFRDELQSKIAQLPPNKESKQTINNIKNFIIGFEKNSVEGHRTRKQYFQNIKSDIENDYRLDDIKKILPTEYLSNIMGHLSNLQWKNLHRYLAKEQNQFNETAFFNEFIRMLKGFRHYKGSREAIVTHELIHQFDTSQPNEHLNLLKNTSPELTIPPYEARTNTGMEKDQTLLLNPDALNRLYPNWRSLIPGILNAHPFLDQSLDHLKFRDRKRLLDSSCQEEKRDAYILHRYLDINKKLDQFKIKNQLSFLCHGKQLPTNLFQIHQQMIQHFTPSLSKTLIEISRAYSKEREDAAQGIWFENIHNLCELSYLNPPRKQKVLPLLVGAVLGVNFINNQQKWIKFKLFWDSHKIGRTLLKNKCKEIEENRKKTGNLFKIKYEESLHRPDKTSDTNLASIIKTIPDIVHALKTALGHDEQQSSIYNNPFSLAQLYTILETKRDGFHKNCVAVTCENYWRTQKTNENPEIAYASRLPADSARPFDGILTRMLQRLAYEISTLKWEQIKNIPNNTNLILPIYIEQNRFEFEQSLKKIKGSIDKSLESTIANQNTHWEEKYQRIINASNDICPYTGLSIGEQGEIDHIYSRSLSKKHFGMVFNSEANLIYCSSQGNHKKQEQHYLLEHLSPTYLKHQFGTEHINEIKEFIYHNVSSIKEFISFHLLSHDQQKAARHALFLDTEDELFKVITRFLMTQQKTLVNGTQKFLGKKIIELLGNKAESKNLKLECSIKQIRSEEVYNYRKSLSQLDSCFKKRTEQPFPSHVVDATITMGLGLNEYPQFHHELDKYWFIQHLIPNEIHLNQIQSKEKYNKTKINSRELFKESIYAEHFIPVWFKGDQTAIGFSEKSLFEIKPSNKEKLFALIKKYSTKNPGDSLLELQNSSKSKWAYFPINKTLALGFLHTYFHKDIVSPDDTDALNFINTLRYYTIKKPFTIKILKDPIPDLSVNFKSTKGDVLGSFTHKIILPAAKDWEKLYKHPRFLSLKENPDQKEFNLFMRMYFLSETNPSSENKHNKDPLTLQKHNTVRKVFSLPIVPGNAGTMMRIRRKNNKGAPLYQLQTIAGTPSKGIRINNGKLINKEILMNAYKTKNVSTINGINDSNIQHYAPFNYWLRLPLAGSKLDTKIIKLEMKPHSKTRRYIRITQSLTHFAQTMTDALIIKPDYLNLDDPLNMPNEIVCKNKLFDSELSPRDGKIKITATGQYVTYEFESNPTPSWIQQIYVTELKKKS

SEQ ID NO: 229 - protein, 1372 aa, synthetic construct
  REGION 1..1372: note = Synthetic
MESSQILSPIGIDLGGKFTGVCLSHLEAFAELPNHANTKYSVILIDHNNFQLSQAQRRATRHRVRNKKRNQFVKRVALQLFQHILSRDLNAKEETALCHYLNNRGYTYVDTDLDEYIKDETTINLLKELLPSESEHNFIDWFLQKMQSSEFRKILVSKVEEKKDDKELKNAVKNIKNFITGFEKNSVEGHRHRKVYFENIKSYITKDNQLDSIKKKIPSVCLSNLLGHLSNLQWKNLHRYLAKNPKQFDEQTFGNEFLRMLKNFRHLKGSQESLAVRNLIQQLEQSQDYISILEKTPPEITIPPYEARTNTGMEKDQSLLLNPEKLNNLYPNWRNLIPGIIDAHPFLEKDLEHTKLRDRKRIISPSKQDEKRDSYILQRYLDLNKKIDKFKIKKQLSFLGQGKQLPANLIETQKEMETHFNSSLVSVLIQIASAYNKEREDAAQGIWFDNAFSLCELSNINPPRKQKILPLLVGAILSEDFINNKDKWAKFKIFWNTHKIGRTSLKSKCKEIEEARKNSGNAFKIDYEEALNHPEHSNNKALIKIIQTIPDIIQAIQSHLGHNDSQALIYHNPFSLSQLYTILETKRDGFHKNCVAVTCENYWRSQKTEIDPEISYASRLPADSVRPFDGVLARMMQRLAYEIAMAKWEQIKHIPDNSSLLIPIYLEQNRFEFEESFKKIKGSSSDKTLEQAIEKQNIQWEEKFQRIINASMNICPYKGASIGGQGEIDHIYPRSLSKKHFGVIFNSEVNLIYCSSQGNREKKEEHYLLEHLSPLYLKHQFGTDNVSDIKNFISQNVANIKKYISFHLLTPEQQKAARHALFLDYDDEAFKTITKFLMSQQKARVNGTQKFLGKQIMEFLSTLADSKQLQLEFSIKQITAEEVHDHRELLSKQEPKLVKSRQQSFPSHAIDATLTMSIGLKEFPQFSQELDNSWFINHLMPDEVHLNPVRSKEKYNKPNISSTPLFKDSLYAERFIPVWVKGETFAIGFSEKDLFEIKPSNKEKLFTLLKTYSTKNPGESLQELQAKSKAKWLYFPINKTLALEFLHHYFHKEIVTPDDTTVCHFINSLRYYTKKESITVKILKEPMPVLSVKFESSKKNVLGSFKHTIALPATKDWERLFNHPNFLALKANPAPNPKEFNEFIRKYFLSDNNPNSDIPNNGHNIKPQKHKAVRKVFSLPVIPGNAGTMMRIRRKDNKGQPLYQLQTIDDTPSMGIQINEDRLVKQEVLMDAYKTRNLSTIDGINNSEGQAYATFDNWLTLPVSTFKPEIIKLEMKPHSKTRRYIRITQSLADFIKTIDEALMIKPSDSIDDPLNMPNEIVCKNKLFGNELKPRDGKMKIVSTGKIVTYEFESDSTPQWIQTLYVTQLKKQP

SEQ ID NO: 230 - protein, 1021 aa, synthetic construct
  REGION 968..1017: note = misc_feature - Xaa can be any naturally occurring amino acid
  REGION 1..1021: note = Synthetic
MESSQILSPIGIDLGGKFTGVCLSHLEAFAELPNHANTKYSVILIDHNNFQLSQAQRRATRHRVRNKKRNQFVKRVALQLFQHILSRDLNAKEETALCHYLNNRGYTYVDTDLDEYIKDETTINLLKELLPSESEHNFIDWFLQKMQSSEFRKILVSKVEEKKDDKELKNAVKNIKNFITGFEKNSVEGHRHRKVYFENIKSDITKDNQLDSIKKKIPSVCLSNLLGHLSNLQWKNLHRYLAKNPKQFDEQTFGNEFLRMLKNFRHLKGSQESLAVRNLIQQLEQSQDYISILEKTPPEITIPPYEARTNTGMEKDQSLLLNPEKLNNLYPNWRNLIPGIIDAHPFLEKDLEHTKLRDRKRIISPSKQDEKRDSYILQRYLDLNKKIDKFKIKKQLSFLGQGKQLPANLIETQKEMETHFNSSLVSVLIQIASAYNKEREDAAQGIWFDNAFSLCELSNINPPRKQKILPLLVGAILSEDFINNKDKWAKFKIFWNTHKIGRTSLKSKCKEIEEARKNSGNAFKIDYEEALNHPEHSNNKALIKIIQTIPDIIQAIQSHLGHNDSQALIYHNPFSLSQLYTILETKRDGFHKNCVAVTCENYWRSQKTEIDPEISYASRLPADSVRPFDGVLARMMQRLAYEIAMAKWEQIKHIPDNSSLLIPIYLEQNRFEFEESFKKIKGSSSDKTLEQAIEKQNIQWEEKFQRIINASMNICPYKGASIGGQGEIDHIYPRSLSKKHFGVIFNSEVNLIYCSSQGNREKKEEHYLLEHLSPLYLKHQFGTDNVSDIKNFISQNVANIKKYISFHLLTPEQQKAARHALFLDYDDEAFKTITKFLMSQQKARVNGTQKFLGKQIMEFLSTLADSKQLQLEFSIKQITAEEVHDHRELLSKQEPKLVKSRQQSFPSHAIDATLTMSIGLKEFPQFSQELDNSWFINHLMPDEVHLNPVRSKEKYNKPNISSTPLFKXXXXXXXXXXXXXXXXXXXXXXXXXXXXXXXXXXXXXXXXXXXXXXXXXXNSCS

SEQ ID NO: 231 - protein, 957 aa, synthetic construct
  REGION 1..957: note = Synthetic
METHFNSSLVSVLIQIASAYNKEREDAAQGIWFDNAFSLCELSNINPPRKQKILPLLVGAILSEDFINNKDKWAKFKIFWNTHKIGRTSLKSKCKEIEEARKNSGNAFKIDYEEALNHPEHSNNKALIKIIQTIPDIIQAIQSHLGHNDSQALIYHNPFSLSQLYTILETKRDGFHKNCVAVTCENYWRSQKTEIDPEISYASRLPADSVRPFDGVLARMMQRLAYEIAMAKWEQIKHIPDNSSLLIPIYLEQNRFEFEESFKKIKGSSSDKTLEQAIEKQNIQWEEKFQRIINASMNICPYKGASIGGQGEIDHIYPRSLSKKHFGVIFNSEVNLIYCSSQGNREKKEEHYLLEHLSPLYLKHQFGTDNVSDIKNFISQNVANIKKYISFHLLTPEQQKAARHALFLDYDDEAFKTITKFLMSQQKARVNGTQKFLGKQIMEFLSTLADSKQLQLEFSIKQITAEEVHDHRELLSKQEPKLVKSRQQSFPSHAIDATLTMSIGLKEFPQFSQELDNSWFINHLMPDEVHLNPVRSKEKYNKPNISSTPLFKDSLYAERFIPVWVKGETFAIGFSEKDLFEIKPSNKEKLFTLLKTYSTKNPGESLQELQAKSKAKWLYFPINKTLALEFLHHYFHKEIVTPDDTTVCHFINSLRYYTKKESITVKILKEPMPVLSVKFESSKKNVLGSFKHTIALPATKDWERLFNHPNFLALKANPAPNPKEFNEFIRKYFLSDNNPNSDIPNNGHNIKPQKHKAVRKVFSLPVIPGNAGTMMRIRRKDNKGQPLYQLQTIDDTPSMGIQINEDRLVKQEVLMDAYKTRNLSTIDGINNSEGQAYATFDNWLTLPVSTFKPEIIKLEMKPHSKTRRYIRITQSLADFIKTIDEALMIKPSDSIDDPLNMPNEIVCKNKLFGNELKPRDGKMKIVSTGKIVTYEFESDSTPQWIQTLYVTQLKKQP

SEQ ID NO: 232 - protein, 1469 aa, synthetic construct
  REGION 1..1469: note = Synthetic
MILKSPIAIDLGAKNTGVVYTTYPPHSKPQGIHGATLILDNLKLSQVDRRAKRHQRRNYSRMRLARRLVYLIVRSHYKVPENDLTPEVKVELQSLLTRRGYTFQSVVTESNEHGQTAWAEIEDYFPKMQIQDKSLPIQTILDSFFSSENIRLEYLEPIKEAETKDDKNHLKMIREQKEAFEAEQNNGARHRIRYFEEIEEDLPRKIKLLECLKKNKIDEKRFLNLIQNISNLQIKPLRDYFNDKNMKEKEIWDPKKLHSSIAGWIRVWHADSKDAEKRNIAKKLLSLLENGRLKAIRGNSTYSTLKHIINFLEEVDPKDTIPPYEDQNNRKPPKCQNLWLDPGILDRYFPGWSGSLQKLLAKEEDSPFEQLVTKDFQINETTEEGKSLLTLIKLYSRAHSDKELDVRAIILQRFLDRSANLDPWSIRLQRKASKEIKITGSLTKQELKKASDAYERMKETIGETDAKQFLDLSGHYYREVEDIKKGMWFSPDSDKKHKEIPKSIVHEENDEVSLFYKCDTKTGSKQKNLSSLVGNVLNVRFSAELFRSFLTFWTEKFDGRSSLNSLAKSIEEARLSTDEFGVEYSILLKKIEKGEIDRKSDIFKAYQNTTKSSGRLEQILKEELGFQAISKSYFDNPFSIAQLYNIISVDRSGFSKVCRSCQEENHWRSTLIDTDRGLRAWASKQVSDTGRPFDGQIAMLLDRIALEVVRLKKAEIEQYLKSNPSKIESVEIPLLIEENSFSFRYELAELKKLAKKKREQLGKSVEEFDKRLNTKQDRIKEASREICPYTGKRISKGEIDHILPRSQTQKQFGTVFNAEVNLIYVSREGNQAKGKRDYSLDDLDEKYLKKIFGTKDLTFIKKTISETVDRLVSSRKNSILVFDRLSMEEQDCLRHALFEKPLRPKVFELLSGQLKARVNGTQLYLAKKIRNLLRKDQDLPKIKFPQFSFFEPRGIDLPYMRRELAQKFPNLEKQNPQPTGSHIVDAAMVMAYAVETDSGSLSYGSKSGSERFDSELLSKYLPNDIRFLRIKSKEKTNSRYPHKKPLFKDGVFGERFLPILVLENGLRLGYTLENSLELSPQDSKKFFEVLRSVLLFKRKPVSHDYPALSSFAKKDKRKYIVLPVNKAKALEVVSQKEHSLLASILKSISYTVFRTPVVSFLFDQKKELIPKIRGKKVDWGEKIEKEFRIKIEVKLGDVKITSGFIQYPGKSEWEKLLLSDSLRGAIKNKSLTLKWFDSRENLSKLDGFFKDTSEPKAKHKRRSNHYALSVPKSPSGRFRIRRNSFDDYKIYQLYSVEGNAFNAFEINTETKENPILLDVYKNSNSVTYADKDYIYPTSGETIAFSEYREIVFKPEERKNLLSTGIISLHIAPGTADRRYIRIVISKDFFSKIFKVKDSFWELALNESIPKENIEKLSLILDKIPSEKRPGMPRSDAPKLNVTKIAVNSVELSYTSPSWKSWLSSYNDSI

SEQ ID NO: 233 - protein, 1061 aa, synthetic construct
  REGION 1..1061: note = Synthetic
LSAYDRSANLDPWSLRLQGKAKKEIKTTESLSKTDLQKASDAYEKIKEILSESDTDQFIKLANRYYLEVADIKKGMWLPTAPERKHKEIPKSIAHEENQDISLFHKCNTKTGSKKKNLSSLVGNVLNVKFSQDAFQNFLILWTEKFDGRSSLNSLAKSIEEIRSIQNEFVVEYSILLKKIKKGEIDKKNDVYKVYQNTIKSSERLEQVLKERLGFQNVSKSYFNNPYSIAQLYNLISVDRSGFSKVCRSCQEENHWRSTLIDTDRGPQAQASKQVSDTGRPFDGQLAMLLDRIAFEIVKLKRIEIERLLSNKNSSKIEVVEIPLLIEENSFNFRYELAELKKLSKKKKDQLKKSVEEFDTKLNSKQERIKAASRELCPYTGKKISKGEIDHILPRSWTQKQFGTALNAEANLIYASREGNQSKGNREYGLNDLDEKYLNIIFGTKEVDSIQRNISDTIDRLDIERGTTRIVFDRLAPNERDCLRHALFIKSLRPKVFELLSGQLKARVNGTQLYLAKRIRSLLLKNQDFITKSLIIKVPSFSFYEPRTVDLPYMRKELAEKFPNLGKQNPQPTGSHIIDAAMVMAYAVETDSGNLSFGSKDKSEGFDSESLSRFLPSNIQFLSIKSKDKTDSKYPYKKPLFKDGVFGERFLPILIAEKGLRVGYTLENSLEVNSENPEEFFNVLKPYLLFKRKPIESNYQTLVAFAQKDKRGYIVLPVNKPKALESISQRKSDPHTSILKNILYTVSRESIPSLIFDKNTLIPEIKSNKVNWGDKLEKKFRIKIEIKLYGKKIADGFIRYPGKTEWEKLLLTEPLKGLVKNKTLTPKWFDSLENLAGLDDHFKDTSNPEAKHKRKSNHYALPVPKGPSGGFRIRRNSFDGYKVYQLYSVDGNSFHAFKIENGWTGKTLLLDIYQNSGNLHSLDYDYENTDISQTALFSKFYKIEFSKEETQKINSKGIKSLYVAPGSSSRQYIRVIFDKQTFSKFIKFQSKFWEFDLITPLPKDKAKDLIESILKIFPEDLRPKKPRNDIHIQNISHDSVQVEYIADGKTQGFGQYFINQN

SEQ ID NO: 234 - protein, 1447 aa, synthetic construct
  REGION 1..1447: note = Synthetic
VEKHVSPVAIDLGAKHTGVFLAHYPSGTDPAEGGRSGHLITAPDGGKQWSQQGRTAKRHQRRGYKRAKLAKRLLRVILTELFKLNLQHPMAPNQTAGQWFDGLLNNRGYTYLADEINKELLAQSGVTIVHLRWPKEFPEQDNLFNRLQFLSDKLDVAKRLISEFLSSREFFKAPAVQELMAEHFPEKEEVKRQQEIYSEARDAIDRLVKAEQEGHRRRQDYLDNIRADIYNHPELSALLNGTSLTADTFANLIGHISNLQLRPLRRYFNDPSMSAKDRWDEERMAKYFWNYIESWRTQEEKDKATRKALLARRHESILKVWLETHPALSVPPFEDQDNRRPPRCQSLLLDPARLDAALPNWKTITRKLLAADPGLDEELENRPAAQGWPMEMPKSHPWRGDDNQLAHILQRALDRSRERDPYCLRLLASIRGESEIVSQSAQNGRAEIDRHIGTQHTGDFVKFASAYYAEARDARDGSWDHEDTQGLLRRCDLHPPRKSKQRERLIGAIIGCELLDAGPLRDYLKSEKIGRPSLLRIAKRAANAQKENGNALKEIYQSNHWLQQSGKKPENKDVLKLFDDSRLAAERIGNWLKQDPKGWENYASPFSLAQIYNILETDIHGFSSTCQGCARENAWRSRVNVQGVANASRLPADSVRPFDGVLRRLLDTQAHEIARRKVDQITQAAVLGTLHIPILIEENRFQFAEGLAEIKKSAKKKRDLLHKMGEEQAERWLDKDERIKAASQGICAYTGKPLGKDGQLDHIVPQSETKKWQGTAYNSEANLIYVSTRGNTDKGKRTYNLEDLKPNYLTNQFGTKDTDAIAARIETTLRPYFDKHKGYTSFLDLAPEEQLCLRHALFAPNLRREAMKLLSTQTKARVNGTQKWFARRIIQHLKHALAKNPNAGLDVTYSIHRISAEDVHHARNVLAAAEPVYQKTSPQPAASHVVDATLAFACGLQDPQLADVLTWPLDDDLEQQTGWLTSLVPATIGIHSLQSKSKYRKPNPAGQKLFKDGLYGERFVPLLIDKKGKLAIGFEPKPNSWIPISKGEEQWFELLRPFLRFQNKPLEGSFSEWQQRARDSGRSHLYFTIDKPAAFDHLYKVAKQPADEASLQQADLLDGLRYIVQKKNLQEALTKDNGKKFKERQEVLKESDFEITVAFAGGNLPRTLDKPKGKVTLPARRDWERLLGAEVFKKRFGGETKDFDWRVELSKIFPSAGTNRRHHAVRKDFSLPIIPDTSGRFRVKRKTPTGDAVWQLLNLEGFSAQGFEIGADGGLGDPSALPFLTESLALVPDGGRYQEPAQQVCYFDDWREIKLDPAKCSWITGLYLAPGSQDRFRVRITMPFHEFSKRVISLLDNTQVINSHQQLLGVLSVPPEKDKERHRTFKEQWIKKLAPSDHGGLILGYPRTKITVLEVGERITFEYEDGKTKDSIKRAKYVQVGIPVTKR

SEQ ID NO: 235 - protein, 1415 aa, synthetic construct
  REGION 1..1415: note = Synthetic
MTDFKIISPIAIDLGGLYTGLYMAQYPFGESLAQHHGKLTTLVMPEEGGKMTWSQAGRTATRHRIRSNKRRKLAKRLLKVTFTQGLSYKLNDSELEALNGLLNRRGYNRIETEIDRRPLETVPPSWIANEFPEFFVSSIAISEQLEELLEDIPKLRDLAATEKFNLNNREAKKQLFENAEDEKVDLLKAYGVLQATVSELLNSIDFGHQHRRKYLEAIGNEVLKDSRLAELRAKFGASALKNLIGNISNLQLRALRWYFNDTAMKGADYYDGERFKSVYVRWLQNWHVDEETRVNRNNALKVIHPSEDILTALMTIDADLTIPPYEDQNNRRPPKDQTLWLNPQSLNEQYGSQWRIWVNNLRKRNPELAEGIAPILEFTDRRSRLITNKQRLTDTSLYADSYFLQRLLDRSKIHDNYALRAISKNFKSGKLDSFRWSLKQDLGDQHTEKFLDLTQKYYREVERAKSGIWEQESASLLEKADINPPSKRKILNRLVGNILGVEMNAEELTTFLSDVWTKKVHGPSTVKSICKAAEDLRKQNGNLFNMYVQSVRYRASVEAGAEKSFKGLDKEIWQLLVKVEKAVDVIADSISATETQKQRLSNSFSLAQLYTLIETDRNGFSKVSAAAHMELAWRMTMIPVDDKEAARCSRLPADSSRPFDGVLRRLLERQAYEIAMLKVEQIKESGVRDSEINIPVVVEENRFTFSIGLADVKKDGAKRKKLLSLGEKQLEKWQEKNERIRQGGSGLCPYKGTTLDKDAELDHIIPRSYSRDASGTIFNSEANLIYASRRGNQEKKDQRYGISDLAPNYLKAVYGTSDSAKITQVIEASVATIKKDFLFSELAGDQKRDVRHALFLERNSKAFEKVFRRLATQQSARVNGTQAWLARKLISVLRGQLKSWQSDTGNTLVFDLCKADAQQTSLVRSGLAVAKPETVKGNRQGVGSHAIDAYCAFSVAAAEGLHEALAQGAGLMEDSEWLAQALPAEVDVNWTERKPRYRKDDISSQPLFKEGIYAESFLTTWVSEKGIESGFSLVSNSVQWQGKETRGLLELIAPFAKETLNVDTALASSRPVQVDIDKEKAFKHFESVAKGPCSEVELRQADILDALRYSTAKKDISSRLIDAQKNTLKNPGDVVKAKDFDVKVDVNVKGLGKLKGKVAHPAIEQWKELFLLPEIESHVGEKASGINWQKIGKKYFGEGSSRPHSKTRRVYSLPVVDSPSGGYRIKRTAPNGSSIWQLMSIEGTGSSGFAVNETGVNWKQAVAIPALRDSSVVGIGERYQPVPEHQVYFDDWKCLDTTDERVLSVSMAPGTKDRRYVSISQALADFKAWLKESGVELQSPFEIPSEIKVDGAKFQKAHGIDVLGKPRSNLFISKVGDVVNYWYIVESSSAAMNQCYDKALLAEREAVNETEPCDI

SEQ ID NO: 236 - protein, 1415 aa, synthetic construct
  REGION 1..1415: note = Synthetic
MTDSKIISPIAIDLGGLYTGLYMAQYPYGESLAQHHGKLTTLVMPEEGGKMTWSQAARTATRHRIRSNKRRKLAKRLLKVIFTQGLSYKLNDAELEALNGLLNRRGYNRVETDIDRQPLETVPPSWIANEFPEFFDSSSPISEQLEELLEDIPKLRDLAADEKFNLNNREAKKQLFTDAEDEQADILKAYGILRESVTELLNSIDFGHQHRRKYLEAVGKEILKDSRLAELRAKLGASALKNLIGNISNLQLRALRWYFNDTAMKSADYYDGERFKSVYVRWLQNWHVDEETRVNRNNALKVIHPSEDILTALMTIDAELTIPPYENQNNRRPPKDQTLWLNPQSLNEQYGSQWRVWVNNLRKRNPELAEGIAPVLEFTDRRSRLKTNKQRLTDTSLYADSYFLQRLLDRSRIHDTYALRAISKNFKSEKLEKFRWNLKQDLGDQHTEKFLDFTQKYYQEVERAKSGIWEQESASLLEKADINPPSKRKILNRLVGNILGVEMSAEELTTFLSDVWTKKVHGPSTVKSICKAAEDLRKQNGNLFNMYIQSVRYRASVEAGAEKKFKGLDKEIWQLLVKVEKAADVISGSISATETQKQRFSNTFSLAQLYTLIETDRNGFSKVSAAAHMELAWRMTMIPVDDKEAARCSRLPADSSRPFDGVLRRLLERQAYEIATLKSGQIKESGVRDSEISIPVVVEENRFTFSIGLADVKKDGSKRKKLLSLGEKQLEKWQEKNERIRQGGSGLCPYKGTILDKDAELDHIIPRSYSRDASGTIFNSEANLIYASRRGNQEKKDQRYGISDLAPNYLKAVYGTSDSAEITRIIEASVASIKKDFLFSELEGDQQRDVRHALFLERDSKAFEKVFRRLATQQSARVNGTQAWLARKLISVLKSQLKSWLSETGNTIVFNLCKADAQQTSFVRTGLAVTKPETTKGERQGVGSHAIDAYCAFSVAAAEGMHETLAQGAGLMEDTEWLATALPVDVDVNWVKRLPLYRKSELSTRPIFKEGIYAESFLTTWISEKGIESGFSLGSNSVQWQGKDTRGLLELLAPFATKNLNVDTALASPRPVQLDISKEKAFKHFEMVAKAPHSEVDLHQADILDALRYCTAKKDISSRLIDVQKKTLKKPEEVLKAKDIYVKVDVDVKGLGKLKGKVTHPAIEQWKRLFLIPDIETRIGEKAVGINWQQIGEKYFGEGSSRPHSKTRRVYSLPIVDSPDGGYRIKRIAPDGSTIWQLTSIKDTGSSGFTVNDKGVNWKQPVAIPALRDSSVVGVGERYQPVPEQQVYFDDWKCVDITDERVLSVSVAPGTKDRRYVSVSQTLSDFKAWLTESGIKLHSPFEIPSRVKVDAAKFQSAHGIDVLGKPKSNLFISKVGDVVNYWYIRESSPVVINQYYDKALLAEREAVNETEPCDI

SEQ ID NO: 237 - protein, 1695 aa, synthetic construct
  REGION 1..1695: note = Synthetic
MNSKILPISIDLGAKNTGVFSAFYEKGTRLENLSNKSGKVYELSKDSYTLLMNSRTAKRHQRRGIDRKQLVKRLFKLIWTEKLNLEWDKDTQQAISFLLNRRGFSFLEEKHDASYFEKFPAEAIELLPKQLRLDIDSNQSYDLNSKIIETLENDTFKDVFDEIENNIKQVKKSIVKANIINIIKSAIDDRVSKGGIKSTKQNKFDDLKKVSLWIIEDIFDSETFTYIENVDNYSKNIFDYLNSLSNDQLENLRKNLPTIDLNEYKNSVWNFNISNFNLDNEKLIDKLEAGDVSVHLHHLGYALQNIKKELDEGSRHRSKYFEEIASVLLEQNHKEGYLRSFCQNLHGNKYQNLNVKKLVNLIGNLSNLELKPLRKYFNDKNHIKGDYWDEKRFAETYCRWILGEWRVGSKDKDKKDGAKYSYKDLCDDLKNKVGTTQDIKSSIIEFLAELDPCRTIPPYQDNNNRKPPKCQSLILNPKFLDDKYPEWQLWLGELRSIESVQRYLENFEDDLKKLKTSKDQPYFVETKSSNKQIASGQRDNKDLDARVLQFIFDRVKASDDLLLNEIYSQAKKVKQNASSEKDKQKAFNNLKVALLDSHLSNELKPEGHFDKLSDLDSDIFEQGTFLHLVCKYYKQRQRAKDYRLYIMPEYRYDKKLDKYSNTSRFDDDNQLLTYCNHKPRQKRYQLLNDLAGVLQISPNLLKDKIGSDNELQTIEWLKNFKIASYCKSAVEIQKQHRGTLKNTVQTAIFKQRLEAIRKNKKASDDEKALLEKYKNAKALTADEKKIVKLVDNIYKATLKIGENLGLDDKQIAKFNSIYSFAQIQQIAFTERKGNANTCAVCSADNAHRMQIISALSQSKCDTQTSNIEASTSLAILDKTNISHNKVTELVEVKPNNALNDFDKAQSSLGAKAQRLPAIPTRIVDGAVKKIATILARNIVDDNWDNIKQALENKQKLHIPIITESNAFEFEPSLAEIKGTKKKDRISSQELFAKKENRIKNFSKGISAYSDTILADGDYDGSKEELDHIIPRSHKKYGTLNDEANLICVTRDDNQKRGNKAVYLSDLKPNYKSKQFCTTDNSQIEKYIAEKIWDAEKQGFKFGNYRSFINLTPEEQIAFRHALFLADENPIKQAVIKSIDNRNRTFVNGTQRYFAEVLANNIYLRAKKENLATDKLSFDYFGVPTTDSSGRGIADIRKLYEKVDDDISFFAKNKDKQQESYSHLIDAMLAFCVAADEHKNDGSIGLEIDNQNGLFPTPDKYDENTGEILSWQDDDIFSQIKVTDSEFSESKLARRKATDGFNTHRQMTRDGIYAESYLPILIHKELDEVRKGFTWKNSEELKIHKGKKYDTQQLNNLLYSLKFISKPIVLDMQINSLDELREILKVNKAQSTAEYYCLNLKTQKLHEYYISNYNTALGYKKYSNEMKFLRELTYRTERVKIKSLDDVNTILGKDSNFKAGKIDLPFKNEWHKLQRAWQNTAIEDDYEFLKTYFDVRSNTKQHQKVRKDFSLPIKSIQGNYLFRRKAWDNSYTYQILNNSDPRKDDVQSFIPVYDISSRQRKKGIIDAFVSKNVFMLSDDEFVKSDIPNIMILNRTNWYTIDITDELRQLGVTDLCYRVDDNSRPSIKISYREILQDNISRLCSNPLIKPNVPKDLADQLKLKSNCKDYIYKGASFSNTSNIALNTALARYYETSNN

SEQ ID NO: 238 - protein, 1646 aa, synthetic construct
  REGION 1..1646: note = Synthetic
MNIKILPIAIDLGAKNTGVFSAFYQKGTSLESLDNKNGKVYELSKDSYTLLMNNRTARRHQRRGIDRKQLVKRLFKLIWTKQLNLEWNKDTQQTISFLLNRRGFSFITDGYSPEYLNIAPEAVKAILMSILDDYNGEDDLDSYLQSATENDSKIDELYNKLLQKALEFKLRKLCIDIKEDKVTTKTLKELSNTEFKLLANYLVDYDRILRTQKFSYTDKQGNLRELNYYHHDKYNIQEFLKRNIIINDVILEKLTDDLDIWNLNFDKFDFEKNLEKLENQEDKDYLQTHLHHFVFAVNKIKSEMASGGRHRSQYFQEITNVLVENNHQEGYLKNFCENLHNKKYSNLSVKNLVNLIGNLSNLELKPLRKYFNDKIHAKADYWDEQKFAETYSDWILGEWRVGAKDKDKKDGAKYSYKNLCDELKQKVGINQDGIINQTKSDFVDFLLELDPCRTIPPYLDNNNRKPPKCQSLILNPKFLDNKYPNWQQYLQELKKLQTVQNYLGNFEIDLKDLKSSKEQPYFVKYKSLNQQIASGQRDYKDLDARVLQFIFDRVKASDELLLNEIYSHAKKLKQNTSSELEKLELCKKLDEVIANSQLSQILKSQHVNGIFEQGTFLHLVCKYYKQRQRARDSRLYIMPEYRYDKKLDKYNNTGRFDDDNQLLTYCNHKPRQKRYQLLNDLAGVLQVSPNFLKDKIGSDDDLFISKWLVEHIRGFKKACEDSLKIQKDNRGLLNHKINIARNTKGKCEKEIFNLICKIEGSEDKKGNYKHGLAYELGVLLFGEPNQASKLEFDRKIKKFNSIYSFAQIQQIAFAERKGNANTCAVCSADNAHRMQQIKVAKPVEGNKDNIILSAKAQRLPAIPTRIVDGAVKKIATILARNIVDDNWDNIKQALSNNQQLHVPIITESNAFEFEPALADIKGKSLKDKRKKALERIDPENVFKDKNNRIKEFAKGISAYSDANLANGDFDGAKEELDHIIPRSHKKYGTLNDEANLICVTREDNQNRGNKAVFLYDLKPNYKLKQFNTTDDLEIEKKIADTIWDASKQDFKFGNYRSFINLTPQEQIAFRHALFLADKNPIKKAVIRAIDNRNRTFVNGTQRYFAEVLANNIYLRAKKENLATNRITFDYFGIETTNSNGRGIADVRKLYEKVDSDIQAYAKGDKPQDSYSHLIDAMIAFCVAADEHKNEGSIGLKMGNQYGLFPTPDKYDENTGEIISWHNDDIFRKIKVSDNQFSDKKLVRKKATEGFNTHRQMTRDGIYGESYLPILIHKNLNEVRKGYNWENSEEIKIFKGKKYDIQQLNNLVYCLKFVDKPISIDIQITTLEELRNILETNNISTTAEYYYINLKTQKLHEYYIENYNTALGYKKYTKEMEFLRSLAYRTERVKIKSIDDVSMILAKDSNFKAGKIELPFKTEWQRLYLEWQNTTIKDNHEFLKSYFSVKNATKQHKKVRKDFSLPISTNEGKLLVKRKTWDNNFIYQILNDSDSRADGTKPFIPAFDISKNEIVETIIKSFTSKNIFWLPKNIELQKVDNKSIFAIDTSRWFEVETPKDLIEIGVSTIQYKIDNNSRPKVRVKLDYVMDDDSKINYFMNHSLLKSRYPDKVLEILKQSTIIEFESSGFNKTIKEMLGMTLAGIYNETSNN

SEQ ID NO: 239 - protein, 1645 aa, synthetic construct
  REGION 1..1645: note = Synthetic
MSIKILPIAIDLGAKNTGVFSAFYDKGLKLESLITKHGMVYELSKDSYTLLMTSRTAKRHQRRGLDRKQLVKRLFKLIWTEKLKLDWDKDTQQTVSFLLNRRGFSFLEEKHDASYFEKFPIEAIELLPQQLRLGIDSEENYDLNSKILETLENDTFKDVFEEIESNIKQAKKNIVKANVINIIKSAIDDKVRMGEIKPTKQNKFNDLKKVSLWIVEDIFDSTTSAYIERVDNYSKNIFNYLNSLSSDQLEILKTNLPIIDLNEHKNSVWNFNISNFNLDNEKLVEKLEVGDVSAHLHHLGYALQNIKKELDEGSRHRSKYFEEVASVLLEQNHKEGYLRNFCQNLHIGKYKNLNVKKLVNLIGNLSNLELKPLRKYFNDKAHAKADYWDEKRFAETYCRWILGEWRVGVKDKDKKDDAKYSYKDLCNELKLEVGTTQEVKANKSKGSVVEFLLELDPCRTIPPYQDNNNRKPPKCQSLILNPKYLDKKYPEWQDYLKQLKQLDSVQKYLEEFEQDLKGLKTSKDQPYFVGTKSENKQIASGQRDQKDLDARVLQFIFDRVKANDDLLLNEIYSQAKKAKQNASNESEIARAVQNLDKTLAKSKLPSALKTQHIKGIFEQGTLLHLVCKYFKARQRARDSRLYIMPEYRYDKNLDKYNNTGRFDDDNQLLTYCNHKPRQKRYQLLNDLAGVLQVSNGQLLSVEKWFRQAQPAETTKSQDEQIFEWLKAFKIASYCKAAVDVQKQYRGTLKNAVQTAIFKQRLETIKKNKKASQDEKALLEKYKNAKPLTADEKNLVKLVDNISKASQKIGENLGLDNKQVSKFNSIYSFAQIQQIAFAERNGNANTCAVCSADNAHRMQISNDSAKAQRLPAIPTRIVDGAVKKMATILARNIVDDNWDNIKKTLENKEELHIPIITESNAFEFEPNLAEIKGTKKKDRISSQELFAKKEERIKKASNEISAYSGASLGGETELDHIIPRSHKKYGTLNDEANLICVTRDDNQKRGNTPYYLSNLADKYKLKLFGTADNQEIEKYIADKIWDSERQDFKFGNYRSFINLSQEEQIAFRHALFLADENPIKQAVIKAIDNRNRAFVNGTQRYFAEVLANNIYLRAKKENLATNKLSFDYFGVETTNSNGRGIADIRKLYEAIDSDIEAYAKGDKPQDSYSHLIDAMIAFCVAADEHKNDGSIGLEIDETYSLYPLDENTGEVFKEDIFSQIKVADSEFRETKLARRKAYTVETNIRQEIQSKGDFKKSIPYKIHIDSLSAERFFPLLQISQDKWKYGFTLDNSVDIPKKDIELIQEFLTKSKEYKDYTVWIVNKTQAQEFLINIGYVGADKQQEKIAKLLDKLSYTTIKKEITSILAKANKTPDTVGDALDVIDELVFKTDKKNKLINFVKSEILLPVYNDWIMLKKAMQKADMNQNLHDFLSMYFITTNLKNKHQKVRKNFSLPVVSTIGTIRIRRKSWDGSNIYQVTGDESLAKYGFDGTVRPKTILSRNSVPIKYYNGKEKEVLIEPLSWIILDIDDLTDTSIIRAQIKNRSAGQVSIKVELSSLDNICLKEDSWSGNIIYAGDKDKPNTIKGDKFYIKKEDFYWLKDFSLMFDSGKTKASLSIDKIGNSYILEFVSSKGKKEKQWLKNETPNS

SEQ ID NO: 240 - protein, 1629 aa, synthetic construct
  REGION 1..1629: note = Synthetic
MNVKILPIAIDLGVKNTGVFSAFYQKGTSLERLDNKNGKVYELSKDSYTLLMNNRTARRHQRRGIDRKQLVKRLFKLIWTEQLNLEWDKDTQQAISFLFNRRGFSFITDGYSPEYLNIVPEQVKAILMDIFDDYNGEDDLDSYLKLATEQESKISEIYNKLMQKILEFKLRKLCTDIKDDKVSTKTLKEITSYEFELLADYLANYSEILKTQKFSYTDKQGNLKELSYYHHDKYNIQEFLKRHATINDEILDTLLTDDLDIWNFNFEKFDFDKNEEKLQNQEDKDHTQAHLHHFVFAVNKIKSEMASGGRHRGQYFQEITNVLDENNHQEGYLKNFCENLHNKKYSNLSVKNLVNLIGNLSNLELKPLRKYFNDKIHAKADHWDEQKFTETYCHWILGEWRVGVKDQDKKDGAKYSYKDLCNELKQKVTKAGLVDFLLELDPCRTIPPYLDNNNRKPPKCQSLILNPKFLDNQYPNWQQYLQELKKLQSIQNYLESFETDLKVLKSSKDQPYFVEYKSSNQQIASGQRDYKDLDARILQFIFDRVKASDELLLNEIYFQAKKLKQKASSELEKLESSKKLDEVIANSQLSQILKSQHTNGIFEQGTFLHLVCKYYKQRQRARDSRLYIMPEYRYDKKLDKYNNTGRFDDDNQLLTYCNHKPRQKRYQLLNDLAGVLQVSPNFLKDKIGSDDDLFISKWLVEHIRGFKKACEDSLKIQKDNRGLLNHKINIARNTKGKCEKEIFNLICKIEGSEDKKGNYKHGLAYELGVLLFGEPNEASKPEFDRKIKKFNSIYSFAQIQQIAFAERKGNANSCAVCSADNAHRMQQIKITEPVEDNKDKIILSAKAQRLPAIPTRIVDGAVKKMATILAKNIVDDNWQNIKQVLSAKHQLHIPIITESNAFEFEPALADVKGKSIKDRRKKALERISPENIFKDKNNRIKEFAKGISAYSGDNLASGDFDGAKEELDHIIPRSHKKYGTLNDEANLICVTRDDNKNKGNRIFCLHDLANNYKLKQFETTDDLEIEKKIADTIWDASKKDFKFGNYRSFINLTPQEQKAFRHALFLADENPIKQAVIRAINNRNRTFVNGTQRYFAEVLANNIYLRAKKENLNTDKISFDYFGIPTIGNGRGIAEIRQLYEKVDSDIQAYAKGDKPQASYSHLIDAMLAFCIAADEHRNDGSIGLEIDKNYSLYPLDKNTGEVFTKDIFSQIKITNNEFSDKKLVRKKATEGFNTHRQMTRDGIYAENYLPILIHKELDEVRKGYTWGNSEELKIHKGKKYDIQQLNNLVYCLKFIDKSISIDIQISTLEELRNILTTNNIATTAEYYYINLKTQKLHEYYIENYNTALGYKKYTKEMEFLRSLAYRSERVKIKSIDDVKQVLDKDSNFIIGKITLPFKKEWQRLYREWQNTTIKDDYEFLKSFFNVKSITKLHKKVRKDFSLPISTNEGKFLVKRKTWDNNFIYQILNDSDSRVDGTKPFIPAFDISKNEIVEAIIDSFTSKNIFWLPKNIELQKVDNKNIFAIDTSKWFEVETPSDLRDIGVATIQYKIDNNSRPKVRVKLDYVIDDDSKINYFTNHSLLKSRYPDKVLEILKQSTIIEFESSGFNKTIKEMLGMTLAGIYNETSNN

SEQ ID NO: 241 - protein, 1125 aa, synthetic construct
  REGION 1..1125: note = Synthetic
MNVKILPIAIDLDVKNTGVFSAFYQKGTSLEKLDNKNGKVYELSKDSYTLLMNNRTARRHQRRGIDRKQLVKRLFKLVWTEQLNLEWDKDTQQAISFLFNRRGFSFITDGYSTEYLNIVPEQVKAILMDIFDDYNGEDDLDSYLKLATEQESKISEIYNKLMQKILEFKLRKLCTDIKDDKVSTKTLKEITSYEFELLADYLANYSESLKIQKFSYTDKQGNLKELSYYHHDKYNIQEFLKRHATINDEILDTLLTDDFDIWNFNFEKFDFDKNEEKLQNQEDKDHTQAHLHHFVFAVNKIKSEMASGGRHRSQYFQEITNVLDENNHQEGYLKNFCENLHNKKYSNLSVKNLVNLVGNLSNLELKPLRKYFNDKIHAKADHWDEQKFTETYCHWILGEWRVGVKDQDKKDGAKYSYKDLCNELKQKVTKAGLIDFLLELDPCRTIPPYLDNNNRKPPKCQSLILNPKFLDNQYPNWQQYLQELKKLQSIQDYLDSFETDLKDLKSSKDQPYFVEYKSSNQQMASGQRDYKDLDARILQFIFDRVKASDELLLNEIYFQAKKLKQKASSELEKLESSKKLDEVIANSQLSQILKSQHTNGIFEQGTFLHLVCKYYKQRQRARDSRLYIMPEYRYDKKLDKYNNTGRFDDNNQLLTYCNHKPRQKRYQLLNDLAGVLQVSRNQLLSSVEEWFQQAQRVGEISKSQDEQIFEWLKSFKIASYCKAAVEMQKQYRGTLKNAIQTAIFRQSENINKNKNKNTGNQQQALSENSKDVKSLTADEKKLLKLIENIAKASQKIGESLGLNDKQIKKFNSIYSFAQIQQIAFAERKGNANTCAVCSADNAHRMQQIKITELVEDNKDNIILSAKAQRLPAIPTRIVDGAVKKMATILAKNIVDDNWQNIKQVLSAKHQLHIPIITESNAFEFEPALADVKGKSLKDRRKKALERISPENIFKDKNNRIKEFAKGISAYSGANLTDGDFDGAKEELDHIIPRSHKKYGTLNDEANLICVTRDDNKNIFAIDTSKWFEIETPSDLRDIGVATIQYKIDNNSRPKVRVKLDYVIDDDSKINYFMNHSLLKSRYPDKVLEILKQSTIIEFESSGFNKTIKEMLGMTLAGIYNETSNN

SEQ ID NO: 242 - protein, 749 aa, synthetic construct
  REGION 1..749: note = Synthetic
MNVKILPIAIDLDVKNTGVFSAFYQKGTSLEKLDNKNGKVYELSKDSYTLLMNNRTARRHKRRGIDRKQLVKRLFKLVWTEQLNLEWDKDTQQAISFLFNRRGFSFITDGYSTEYLNIVPEQVKAILMDIFDDYNGEDDLDSYLKLATEQESKISEIYNKLMQKILEFKLRKLCTDIKDDKVSTKTLKEITSYEFELLADYLANYSESLKTQKFSYTDKQGNLKELSYYHHDKYNIQEFLKRHATINDEILGTLLTDDFDIWNFNFEKFDFDKNEEKLQNQEDKDHTQAHLHHFVFVVNKIKSEMASGGRHRSQYFQEITNVLDENNHQEGYLKNFCENLHNKKYSNLSVKNLVNLVGNLSNLELKPLRKYFNDKIHAKADHWDEQKFTETYCHWILGEWRVGVKDQDKKDGAKYSYKDLCNELKQKVTKAGLIDFLLELDPCRTIPPYLDNNNRKPPKCQSLILNPKFLDNQYPNWQQYLQELKKLQSIQDYLDSFETDLKDLKSSKDQPYFVEYKSSNQQMASGQRDYKDLDARILQFIFDRVKASDELLLNEIYFQAKKLKQKASSELEKLESSKKLDEVIANSQLSQILKSQHTNGIFEQGTFLHLVCKYYKQRQRARDSRLYIMPEYRYDKKLDKYNNTGRFDDNNQLLTYCNHKPRQKRYQLLNDLAGVLQVSRNQLLSSVEEWFQQAQRVGEISKSQDEQIFEWLKSFKIASYCKAAVEMQKQYRGTLKTRFKLLYLDKVKI

SEQ ID NO: 243 - protein, 1429 aa, synthetic construct
  REGION 1..1429: note = Synthetic
LKTFIPIKFNILKFYNGGSKMKFVVSIDQGAKNTGIVIAETEKDSLKNVEGNVIVIDEANFKLSQLDRRTKRHQRRGYKRRKLAKRLLKLILEKEFKWDFSKLNKAQKDFIFGLINRRGFNYIIEDMNEDILNNFDFLDFIVRLFPESLNKEEKLTEQILKNSSNPDWFKKIVDNENSKFLTKKDSKQSERLTLKEYCQKNNFEYSEELQDFYDEFVDTISQFYNEMVGGAKPRKKYFEEIKAVIFAETPIDDLFKDNFNKDKFFKLVAHISNFQLRVLRKYFNDEKMKNGDYWDEKKLKKIILREVRSWHTSGNEELKNRRSKLIKLLKEDKSLLDIWFGLDPIETIPPYEDMNNRNIPDCQTLYLDPQKLSEKYGNWKEIVNKLLEKESDSHIKEGLLENKWVSLEKQKISDDDKLARILQRFFDRVKDKDPYKFRLLSLSKDKSTEEYKKAINSLKQTINNEKDVELLLSIARTYFVEQENAKKGLWDANNTILKKCNLHTKHKANLSHIIIGGILDVKMNQDEVNNFYNFLKNTKVKRKTLMGIAHDCSELVKKEGNKLRAKLEMALNDEKNCKKLEKEQNGLLSIYKDVIEGAKKISEYIKKDNPDRYSDIWSFAQIYNVLEGDRHGFSKICEICHEENAFRSSEFDNSVMFTRLFADSVRPFDGVVDRLVRKQADVISKLILEKLKNKKVKKDEKIEINFIAEQNEFSFEEELKSIKGKPSKDKEKFDEEKAFNSKIERIMRFNSLCPYTGDPIGENGDIDHILPRSWTKKQYGAVFNDEMNLIYSSVRGNRELKSRGENGLWEFDELSNSFLNELYGTDDKNEIKKIITNTLTKLGILEGTYKGKIIFSRLDKDTQRDLRIALFIPEYRELLVNYLNNSLAARVNGTQSYLLKLIVKNIKKEYSKVRVNISKVDSELIQQFRKDLVTGNKELTKNREGQSLYSHVVDASIALFFNVESGDFNKCLPEGIKVIEAKALSSIHKLKKKDFYSTSVFKDGIYGEKFVPVILYKEKLYFGFDTKNCVMVKKNEENIFNLISPYLRYRNGKSFIDANNKNFDEWKEISNKIPLRFFVNKTKTFDFFAKIAKEPFNENEKAIFNILEGLRYTTQKVELLSLLTNSDKKNYLTKDEIFESDNFKIKIFNKELTFPGRKFIENILESNEIKDKLGKPIKDNKIDIDIIKKFFKNLYGGKSITDPRVKARKVFSVNVIKSPSGGFRIKRKDLYGAKTYQLVEISDRASIGFEIKDGKIDKESFVLHPVLYYDKNIVPVGEVYKPYPEKYVPMDEWREIELTDKEKSYINRLWICPGTKNRSYYRIQLSIEQFVTNLLPGIDEELCKILENNKGSIYRLLIPLVKLNLDNIYFLNDEEIKKIILGPRSDKKDGVRYGKVRIIEANKDNVLVEYEANGFMPEEAQRRYVKAQK

SEQ ID NO: 244 - protein, 1470 aa, synthetic construct
  REGION 1..1470: note = Synthetic
MKKFSINVDMGAKNNGVFLASVEGASAKITNKSAFNIKIDKGENFVLDRANRLAKRHTRRSFDRDCFVLRFAGQIFDLDKLPTRKELLEKIENQKIEYKKELKEPKELIFGLFKNRGFNYQNIKIKDEVFDDENFICLLEKFNCLKEYGYEFSECRCLEDFENFINQKADELSNSNSFKDDMLNFLNEQSKIINDIKEFYDITNNLSDKVLKNNAKAIEIAQKEINALGNDDENLANLQTKLENLQKNYPKFVEILKDKEFIEILKVKDEDKESVLKKFVKFFNELINAAKSELERNNKHRKAYLKDINKELNSSDNKILAWEYDEIFNNLRDKVEGKKWSKDEFYKFVGNVANIQTRVWRRYFNFANYKMPNFDKDKLKIYDDSKLAKQILRNFRDFRYEKKHEKDTFEKIKPIMQNLMKELKSKKEQKSLLALTFLKSTDPVLTIPPYESRINKNPRACNAMSIKPESKIITPNLTNITKKIFANNEFGFLLINENGEITTPDFNDTKITAKYLQRFLDISKSKLNDSDLYPRNLIQDNAQKIEIFKRFFALSDDEITKFVEFSKAYYDEVDSAKKGVVKGKILKICGLHTPHKHKNKAELISALFIKNIKNHGQISSEEFDKLCDFMQNTGEYKSKAKNTKPRKIAKFFEDLDEVRKSYQNAFFNEALNTLKALNENNDKNLDANLRKIVQDYEIIAKSIQENINFCKFQTPFEASNLATNLNYLLQLGDIIFSDKNAGFLKTCKEHTMENLLRSGGEAMASRLPSNSGKLINGKIEMYLDRLAYEIIKQSPKFDDFDEVEINVEMNKFAFEENAVAVGLKKQAKKTKNAKSWICPYSVKVENISESNCEYDHIIARNDKGFNIVFNSTANLIPCKSSANLEKSNKIYKLDDLHPKHLQSVFGTSNKAEIKDFISKNLATIDEKTYTNFYNLSKKEQIAFRYALFLREGQDFGKAVRLLNQDKIKGYSNGTQKRFVNLLIEKIKKLSKIQKFSVNFIDSKMLSATRTELSIMREDIRKQNIQDSHSHCIDASLVFHLVNSKLIKNSNSQREFLYDYFDEIYLSQSEIITPKNKQYLELKTNIARKRLFDDSVYSLVYEQCDNGKFISIKNLKILRDLGLLHTRKNGKKIQVPAGQAIDENALKKYFVSTHKVFDKIFGYFENKNIAGLEKLKFLDKYLKSYKREDITDIFGIGNDNKIIIKKEKYATPNITKFYQILKENEEKISRIEDGKVKIDENAIKSLYKQTFDKGEKRKRNKTRCVYSLSMIADNSQYVIRRNGGYMGLKGDKIAAKNYLFKNKKGEFDIQSVPFYSKNVLPKKISDILTILSLPKDALLVYDFTDIILAKISPKIMPENIAKHIAKLDFVISQAARHITRLYLRKNSFDDINFDELKDFTLSNKEFVKLYENYDNLFKSVLGTPRVEKQELSSAKILQNDSEILGFEYTASNSASFKALIKELLNETSSAK

SEQ ID NO: 245 - protein, 1192 aa, synthetic construct
  REGION 1..1192: note = Synthetic
VKFFNELINAAKSELERNNKHRKAYLKDINKELNSSDNKILAWEYDEIFNNLRDKVESKKWSKDEFYKFVGNVANIQTRVWRRYFNFANYKMPNFDKDKLKIYDDSKLAKQILRNFRDFRYEKKYEKDTFEKIKPIMQNLMKELKSKKEQKSLLALTFLKSTDPVLTIPPYESRINKNPRACNAMSIKPESKIITPNLTNITKKIFANNEFGFLLINENGEITTPDFNDTKITAKYLQRFLDISKSKLNDSDLYPRNLIQDNAQKIEIFKRFFALSDDEITKFVEFSKAYYDEVDSAKKGVLKGEILKICGLHTPHKHKNKAELISALFIKNHGQISSEEFDKLCDFMQNTGEYKSKAKNTKTRKIAKFFEDLDEVRKSYQNAFFHEALNTLKALNENKNLDASLVKIVQDYEIIAKSIQENINFCKFQTPFEASNLATNLNYLLQLGDIIFSDKNAGFLKTCKEHTMENLLRCGGEAMASRLPSNSGKLINGKIEMYLDRLAYEIIKQSPKFDDFDEVEINVEMNKFAFEENAVAVGLKKGAKNDEKAQKAKKTKKTKNENDLICPYGGEGISQSNCEYDHIIARNDKGFNSVFNSTANLIPCESFENLKKSNKIYKLDDLHPKHLQSVFGTSNKAEIKDFISKNLATIDEETYTNFYNLSKKEQIAFRYALFLREGKDFGKAVRLLNQDKIKGYSNGTQKRFVNLLIEKIKKLSKIQKFSVNFIDSKMLSATRTELSIMREDIRKQNIQDSHSHCIDASLVFHLANSKLIKNSNSQREFLYDYFDEIYLSQSEIITPKNKQYLELKTNIARKPLFDDSVYSLVYEQRDNKGKFISIKKLEILRDLGLLHTRKNGKKIQVPAGQAIDENALKKYFVSTHKVFDKIFEYFENKNIDGFKELKFLDNYLQSYKREDITDIFGIGNDNKMIIKKEKYATPNVTKFYQILKENEEKISRIEDGKVKIDENAIKSLYKQTFDKGEKRKRNKTRCIYSLSMIADNSQYVIRRNGGYMGLKGDKIAAKNYLFKNKIQSVPFYSKNVLPKKIGDILTILNLPKDALLVYDFTDINLAKISPEIMPQNIAKHIAKLDFVISEAARHIIRLYLRKNSFDDINFDELKDFTLSNKEFVKLYENYDKLFKSVLGTPRVEKQKLFSAKILQNDSEILGFEYTASNSANFKALIKELLNETPSAK

SEQ ID NO: 246 - protein, 1418 aa, synthetic construct
  REGION 1..1418: note = Synthetic
MNTMKNIIKSNLALDLGGKFTGLISYTSCGLPSRDEIQAVIINMPDSQMNYTVKSRTSTRHLVRSLDRYKKARKLIYILVAESLKRELSDDEKEALSSLMLRRGYTRQETELSDEALDNCSIDDFVNNANFTDLFNTSSQLKEQFYKLIEDKNKLEGLYKSINETGIKNIPKEYRSIARCMSDICNDIIQQDNFGHKHRKKYFEDITIDLKHDSRLKNIREKIGETQLFNLIGNISNLQLRALRWYFDDPKMQGAGIYDSDKLKNALIRAYKFFHYKTSEERSNIRKFIDSINKSKKEHKDALELLFNTDPLITIPPYEDQNNRNPPEDLTLLLNPLALDRKYPSNWEKWALSFISNLDFIDGELCEIVKLTDRKSRLNPKLSSAYTQEKLRLSYVLQRVFDLSRNEDKVFTKIRAWAKDPLSRKVADVNAYLLSLICDDEIGDFENLAREYYEEIELAKKGIWSTVEEPILEISNIHPQMKNKVLADLVANVLCLHEDFDFDNFKNNIWTAKIGRSTVRSICANIEKIRKSYKNYFNHFYEAAVKKYLGNKNNELDKKDKELIQIYKKVNEVSKVIAEKLYLDPLDGLKFKNPFSLAQLYNLIETDISGFSSNCLAVIKENNYRMRNDFSNGALCTRLAAESVRPFDGALRKILERQAYEIAKIKSQEIKSLPSICNSQIDLNILVEENSFEFSSSIETLKTGKKQNEKEDSLKKEFFVSKYERIKKDSLVFTGSEKAICAYTGEFLGGENNCEFDHIIPRSKTTSNMGTIFNSELNLIYVSQKGNQKKRESEYTLYDLSKEYLNNVFGTYNINEIKLKIEETVNKLKETNPRFLVDSMTIDERICARHALFMPHSKEYNIVVRALSRIYSTRVNGTQAYLVKSIISNIKEMLSLWTKEHNNVLTFDTWNISSKETHDIRENLSGENSCLKKQEIQPITSHAIDALCVFAAACDNKSISQKLSTCDGFENISKPEILNTLVPEEFVIKNISRKDFIQKDKPASKKLYKDTIYAEHFLPIIAKGEKVKIGFDFYKNAVEVKKGGENLLCFLTPFFKDEYKYSEELKVYHIVNRKVFDFIDKNKESSDSDEFKRLVYIFDALRYTTLKTEPLELIKKAEKNAKSIKNEAEKQQKIRTTIEDSFCINLKNKSTISKISLANNTKIILPTYNEFKIIKRDLDLFLEKDPDAKREDFFETFNKTTKNKKANSALEHRKCKRNYSIPVISAPSGGIRVKRKTASSDYVYQLIAANTPDTSINQGVILENNQIDFEKKAVFVDIYTEKNIVFSPYKSSRVKASHKDFLPMDERILLVDNENIKVEASLSTADRRKVFVTVSFDEFNIGLKNKFSSYLDLKEEYTLKDNCSDLFEYLESLIDDKNINISKPRNKKISFTVIGKTLCFSYNTDSDIKRSISYKLSM

SEQ ID NO: 247 - protein, 1409 aa, synthetic construct
  REGION 1..1409: note = Synthetic
MLVSPISVDLGGKNTGFFSFTDSLDNSQSGTVIYDESFVLSQVGRRSKRHSKRNNLRNKLVKRLFLLILQEHHGLSIDVLPDEIRGLFNKRGYTYAGFELDEKKKDALESDTLKEFLSEKLQSIDRDSDVEDFLNQIASNAESFKDYKKGFEAVFASATHSPNKKLELKDELKSEYGENAKELLAGLRVTKEILDEFDKQENQGNLPRAKYFEELGEYIATNEKVKSFFDSNSLKLTDMTKLIGNISNYQLKELRRYFNDKEMEKGDIWIPNKLHKITERFVRSWHPKNDADRQRRAELMKDLKSKEIMELLTTTEPVMTIPPYDDMNNRGAVKCQTLRLNEEYLDKHLPNWRDIAKRLNHGKFNDDLADSTVKGYSEDSTLLHRLLDTSKEIDIYELRGKKPNELLVKTLGQSDANRLYGFAQNYYELIRQKVRAGIWVPVKNKDDSLNLEDNSNMLKRCNHNPPHKKNQIHNLVAGILGVKLDEAKFAEFEKELWSAKVGNKKLSAYCKNIEELRKTHGNTFKIDIEELRKKDPAELSKEEKAKLRLTDDVILNEWSQKIANFFDIDDKHRQRFNNLFSMAQLHTVIDTPRSGFSSTCKRCTAENRFRSETAFYNDETGEFHKKATATCQRLPADTQRPFSGKIERYIDKLGYELAKIKAKELEGMEAKEIKVPIILEQNAFEYEESLRKSKTGSNDRVINSKKDRDGKKLAKAKENAEDRLKDKDKRIKAFSSGICPYCGDTIGDDGEIDHILPRSHTLKIYGTVFNPEGNLIYVHQKCNQAKADSIYKLSDIKAGVSAQWIEEQVANIKGYKTFSVLSAEQQKAFRYALFLQNDNEAYKKVVDWLRTDQSARVNGTQKYLAKKIQEKLTKMLPNKHLSFEFILADATEVSELRRQYARQNPLLAKAEKQAPSSHAIDAVMAFVARYQKVFKDGTPPNADEVAKLAMLDSWNPASNEPLTKGLSTNQKIEKMIKSGDYGQKNMREVFGKSIFGENAIGERYKPIVVQEGGYYIGYPATVKKGYELKNCKVVTSKNDIAKLEKIIKNQDLISLKENQYIKIFSINKQTISELSNRYFNMNYKNLVERDKEIVGLLEFIVENCRYYTKKVDVKFAPKYIHETKYPFYDDWRRFDEAWRYLQENQNKTSSKDRFVIDKSSLNEYYQPDKNEYKLDVDTQPIWDDFCRWYFLDRYKTANDKKSIRIKARKTFSLLAESGVQGKVFRAKRKIPTGYAYQALPMDNNVIAGDYANILLEANSKTLSLVPKSGISIEKQLDKKLDVIKKTDVRGLAIDNNSFFNADFDTHGIRLIVENTSVKVGNFPISAIDKSAKRMIFRALFEKEKGKRKKKTTISFKESGPVQDYLKVFLKKIVKIQLRTDGSISNIVVRKNAADFTLSFRSEHIQKLLK

SEQ ID NO: 248 - protein, 1365 aa, synthetic construct
  REGION 1..1365: note = Synthetic
MNTTSIISLDLGGKNTGFFSCTTNDFNNLKNFQSGTIIYDESFILSQVNRRGKRHTKRNNLRRKLAKRLFLLILKEHYKLKIKYLPDEILALFNKRGYTYASFELSSEEQESLFSNILKEFLNENLGNFNISNDIEIEDFLNQIASNENTFKQYSKDFLNLYESSTFKPKNKIELKDEIKNIYEDKEDQKELFDGLKTVKKTLEEFDKQQNQGNLPRAKYFLEIKEEIKTNSNIQNFLKNSNLEEEKINNLIGNISNFQLKELRRYFNDKEMVQGDIWIEDKLHKIVWRFITSWHPKKDETIKKNQDELTSNLKNSKIIDFLTQNNPNKTIPPYDDMNNRGAVKCKSLRLNKNYLDTHLPNWRNITNRLASDSLKENLKDCTTNKSDIDLTLLHRLLDTSSSIDSYKLREYKIENYVDILGKDDSLKFKKFTQNYYETITKKVRTGIWQKADEIFELCNHNPPYKNNQIHTLVNGILGVEISDTKFKEFEETLWNKKIGNKKLVNYCKNIEELRKKKGNLFKLYIEELKEIEKPDIEQKKDIKILNDEQLLFWVDEIANFFKLDDIFKSRFSNYFSMAQLYSIIETKRAGFMSTCKWCSAENSFRTKTNIENFTLYDKSTGEKLEDVIFDENIHIKVYENSNAQRLPADTQRPFSGKIEKYIDKLGYEIAKIKAKELENIKEKKIDLKIVLEQNSFEYEESIRSAKIKNANAKAKKGLEDSKKFFEKSIEEKEKRIKNFNNKICLYCNNEITTDGEIDHILPRSYTLKNYGTVFNSEGNLLYVHQKCNQSKSNKIYKLEDIKASINVNEVEEQISKIKSYKTFTLLNQKQQEAFKFALFLPNSSEAYKKVLGFLRTDQSSRVNGTQKYLAKKIQEKLIKMFEKKGFKFDFEFILASSEDVSRLRKDYAKQNPILEKPKDSKQSPSSHTIDAVVALSSVFKKVTGLDDIPTSNKVLEFVQINNIPIKPLGKIEKEKIGNLGNGSIFKDSIYQENFAPIYKFENRFYTGFLKASKVPDFKNCIEIKSSDFEQIKKYFKNEIKKENGLVIYQINKQNTLDLFHNISNNLSNQLNLAQTLNKFSYNLIKTSVENAPKILKDSKKTSTKIYGKTLILPIKDEWERFDSFFKKELINQNIEYKEKDGKYQVDNEILISICKKYFNIQNKNIRNKARKVFSLPSVEAPSGGFRIRRKNHKNEDIYQLVGIDGAKSAGFVLENGKINSSKDVLLPTLVKSKNISFKEPAKKEIQEYIDMNNFRNLTDFINLENISIFVAPASTNRPLVKVELDFNLLKKILKNENLNFLELDNIKLEDEQKEIFDEVFNSCNFVPRDNKIKILKADSNRVLIEFSNNNKTIMKYYDKAEDINI

SEQ ID NO: 249 - protein, 1358 aa, synthetic construct
  REGION 1..1358: note = Synthetic
MQSIISLDLGGKNTGFFSFTSKDVSSIKNFQSGTIIYDESFVLSQVGRRGKRHTKRNNLRNKLVKRLFLLILQKHYGLKIDYLPNEILGLFNKRGYTYASFEINENEKEQLESSILKEFLNDRLSSYNIENDDETEDFFNQIASDEVEFREYKKHFEDLFKVSTHQPKKQLELVEEIKKEFEKDDAKEILDGLKIVKKIIDEFEKQKNQGNLPRAKYFEELNLEIKQNQKIQDFFKAHNIKIQDMKNLIGNLSNYQLKELRRYFNDKNMVKGDIWKPEHLFKVTWRFVASWHPKNDEDKARQKENLANLKYKNIIEFLTTTNPIMTIPPYDDMNNRGAVKCHTLRLNEAYLNKHLANWREITQKLANENQKKDLDISTVKGWSIDSTLLHRILDTSSQIDEYELRSEKPSLLLEKTLGNQANKFHNFAQDYYELIRTKVRTGIWTKDDYMLKKCDHNPPYKNNQIHNLIAGILGVKILPEQFAKFETELWNAKFGNKKLSSYCKNIEELRKSHGNLFKSYIEELFKEDRKEFTKEEQSDKKLLETKVLDEWVEKIGEFLGIEEKYRARFNNHFSMAQLHTIIDTKRSGFNSTCKWCSSENQYRASTNIEVDSETGEITTNANAQRLPADTQRPFSGKIERYIDKLGYEIAKIKAKELQNLHEEKIELKIILEQNAFEYEESIRSAKIKNANAKAKKNLEELTKKYKKSLEDKDERIKAFSGVIKNKDNSYSNGICPYCGQSLGEDGEIDHILPRSFTLKNFGTVFNSEGNLLFVHQKCNQAKKETIYKLSDIKAPITQKEIEEQIATIKGYKTFSILKPEQQKAFKYALFLDKENESYQKVINWLRTDQSSRVNGTQKYLAKKIQEKLKVMLPQIEFDFEFILADAEDVSLLRKKYARENPLLKKPDTQPPSSHTIDAIMAFLSVYPKLSKQEELPNSQKVLQWVEINNLKIKPLSKIQKDQKQNLGGTTIFKDSIYQERFAPIYEVENKFYTGFVVNSKILDLSNCAELKAKDFESIKEYFKTKNQKPNGLKIYEIDKQKTLTLFHNISKGLSDKLKLAELLNRFSYNLLKTKVEEAPKILKDDKKLSTKVYDKNIILPIKNEWQNFDKAFKKHLEDKNIEYKEKDGKYNVGDDVLTEFCKTYFKIQNKSIRNKARKVFSLPTVEAPSGGFRIRRQNYKGEDVYQLVGIDGAKSAGFGLKDGQINTAVDVPLATLAKSNNVSFKDPQRMELKKYIDMSAFRDISDSVSIDGIKIFVAPASTNRPLVRCVIFINKFMQIINNQDFNYLELSDLKFTTDESFGVLKEKFDELFKGCNFAPRDKLKIIKANTKGIELEFSNNNKTIMKHYDNGIDIKLDD

SEQ ID NO: 250 - protein, 1399 aa, synthetic construct
  REGION 1..1399: note = Synthetic
LCERRLLHHRRRRRNKQRHHRSVGVGYSCGFGYFKGEGMTSLISLDLGGKNTGFFSFTAKDVSIIDTFQSGTIIYDESFVLSQVARRGKRHGKRNNLRNTLVKRLFLLLLQKHYGLSLDFLPDEILGLFNKRGYTYASFEIKEDEKENLESDILKEFLNDKLNYTIQNDDEVEEFLNQIASNEETFKNYKKDFENLFGASTHQPKKQIELIDEIKKDLEKEDAKELLDGLKVIKKIIDEFHKQQNQGNLPRAKYFEELYLEIEYNLKIQKFFTCNHLHINDMQYLIGNLSNYQLKELRRYFNDEAMAKEDFWSCEKLHRITWRFIQSWHPKSPEDKQRQKENLANLKTKSIIEFLTTTNPLMTIPPYDDMNNRGAVKCQTLRLNEEYLDKHLPHWRAIAHTLASETQKENLEGVTVKGYSEDSTLLHRILDTSSIIDPYRLRSDEIDSYCDVLTKDNAFALKKFAKEYYQLVKEKVRTGIWTKDDDMFKKCDHNPPHKNNQIHNLVAGILGKPIAKERFEAFENELWNVKFGNKKLSSYCKNIEEFRKSNGNLFKQIVELGEDKEVQKYQKELNEWVRKIGEFFNIETPYRARFNNLFSMAQLHTIIDTTRSGFNATCKWCSCENQYRASTRIEIDEQTGEITTNANCQRLPADTQRPFSGKIERYIDKLGYEIAKVKAKELEGIKEDTIDLKIILEQNAFAYEESIRNAKIKNANAKAKKALEEAQKRGLKNIEDKTKRIKDFSNSICPYCGQSLGEDGEIDHILSRSYTLKKYDTVFNSEGNLLYVHQKCNQAKLAKTDYSLQDLKIDISQKWIEEQIATIKTYKTFSVLTQEQQKAFKYALFLDNSNEAYQKVISWLRTDQSSRVNGTQKYLAKKIQEKLKAMFPAKTFNFEFILADANDVHDLRIKAYQLPEKPKDSKQETYSHTIDAVMSLVSVWDKVLPKTEKPTKEDILKFANVENWSALNNEFLTKGKSANQKIEEMIQANDFGQKNMRQVFSKPIFKDESIGERYKPFVRYHNQFYIGYPISIKDGYDMQHCQAMISKNDISRVEEILKDTSLCTLLKEKNGIKLYSINKQSINELSNQFFNLNYQNLNDAQKKKSELAEFVINHCKYYVKKTSVINAPQFIDKDSMKPYPFYKDWQKFHEAYKKELDAEPKTKKDNGKLVYDISGIDDFWTEFCKKYFGIKTKDNRNKARKVFSIVALTSAPGTVFRIKRKTPKGHIYQATAIDNQQISGDYANVLLAGNSKTLALAGQKPSSDLKKELSVKESKDIRDIKLEPSRFFKEGFDCRGIEVIVNKTSATIKNFPLTKIDKKIKKLIFKTLFEKKDGKRQKQKTSISLKEKNTMQETLKKLLKDSIKVTIRDGSISGIEISKKTVNFTLPFKSENLAKLLDD

SEQ ID NO: 251 - protein, 926 aa, synthetic construct
  REGION 1..926: note = Synthetic
MNTTSIISLDLGGKNTGFFSCTTNDFNNLKNFQSGTIIYDESFILSQVNRRGKRHTKRNNLRKKLVKRLFLLILKEHYKLKIKYLPDEILALFNKRGYTYASFELSNEEQESLSSNILKEFLNENLENFNISNDIEIEDFLNQIASNENAFKQYSKDFLNLYESSTFKPKNKIELKDEIKNSYEDKEEQKELFDGLKTVKKILEEFDKQQNQGNLPRAKYFLEIKEEIKTNSNIQNFLKNSNLEEEKINNLIGNISNFQLKELRRYFNDKEMVQGDIWIENKLHKIVWRFITSWHPKKDETIKKNQDELTSNLKNSKIIEFLTQTNPNKTIPPYDDMNNRGAVKCQSLRLNKNYLDTHLPNWRKIANTLANDSLKENLKNCTTNKSDIDLTLLHRLLDTSSSIDSYKLREYNIENYIDILGKDDSLKFKKFTQNYYETITKKVRTGIWQKADNIFELCNHNPPYKNNQIHTLVSAILGVEISDTKFKEFEETLWNKKFGNKKLVNYCKNIEEIRKRKGNLFKLYIEELKEIEKPDSEQKKDINLLKDELLLFWTDEIANFFKLDNIFKSRFSNHFSMAQLYTIIETKRAGFMSTCKWCSAENSFRTKTNIENFTLYDKFTGEKLEDVIFDENIHIKVYENSNAQRLPADTQRPFSGKIERYIDKLGYEIAKIKAKELENTEEKKIDLKIVLEQNSFEYEESIRSAKIKNANAKAKKSLEDSKKFFEKSIEEKEKRIKNFNNKICLYCNSEITTDGEIDHILPRSYTLKNYGTVFNSEGNLLYVHQKCNQSKGNKIYKLEDIKASMNVNEIEEQISKIKSYKTFTLLNQKQQEAFKFALFLPNSSEAYKKVLGFLRTDQSSRVNGTQKYLAKKIQEKLIKMFPQKEFDFEFILASSEDVSRLRKDYAKQNSILENQKIINNLHLVTQ

SEQ ID NO: 252 - protein, 896 aa, synthetic construct
  REGION 1..896: note = Synthetic
MQSVISLDLGGKYTGFFSFTSQDVLKIDDFKSGTIIYDENFVLSQVNRRAKRHTKRNNLRNSLVKRLFLLILQKHYNLDIKFLPDEILGLFNKRGYTYASFELNDEKREKLESDELREILEEQFGQITQDSIERFLTDIASNEDEFKKFFVDFKIFKEQKSKEKLSKDIKSGLKTIEDILNDHDKQQNQGNLPRAKYFEELNQEIAQNRKIQEFFQSYNLQIEYMQNLIGNLSNYQLKELRRYFNDKNMAKCDIWKPEQLHKVTWRFVQSWHPKNNEDKARQKENLTSLKSKNIIEFLTTTNPIMTIPPYDDMNNRGAVKCQTLRLNENYLDIHLPNWRNIAHKLANQNQTVNLTKSTVKGYSEDSTLLHRILDTSSSIDPYQLRSGKIDGYIDILGKSDALALQKFSKNYYELIKNKVRTGIWTEADDMFKKCNHNPPYKNNQIHNLVAEILGVKIDADKFLSFKTELWNAKFGNKKLSSYCKNIEELRKSRNNFKSYIEELFSKEDKELSKEEQKDKKLLDIKVLNEWVEKIGEFFKIEEKYRARFNNHFSMAQLHTTIDTKRKGFNSTCKWCSEENRYRASTNIEINSETGEVITNANCQRLPADTQRPFSGKIERYIDKLGYEIAKIKAKELETIEDKKIDLKIILEQNAFEYEESIRSAKIKNANAKAKKSLEESIKKYKKSLDDKDRRIKSFSNSTCPYCGESLGEDGEIDHILPRSYTLKVYGTVFNSEGNLLYVHQKCNQAKKENIYKLQDIKAPITQEEIEKTINPMSKNSYKTFTALSPEQQKAFKYALFLDDNNEAYQKVVNWLTTDQSSRVNGTQKYLAKKIQEKLKVMLPSKEFNFEFILADSEDVSGLRKEYAKENILLKKPDTTTIKSHNRCNYVIFECLS

SEQ ID NO: 253 - protein, 1470 aa, synthetic construct
  REGION 1..1470: note = Synthetic
MREGEGFDMGKEVISPIAIDLGAKNTGVFAATYVPGEFLTNPDIIKEGYLLQMGDIQLSQADRTVKRHQLRGNRRKKLVRRLLFLILKEKFGINEFSKSTSEFLQGLLKRRGFSYISENINEDVLKSADLEFFEQFTQGKITKKSPLLNQLFDISQNLYDAQSLLDCEIFQKNKKDIKSFLRTQEIEVNDDLLDQIESTKSYLETIIKSDIDGHKHRRDYIKNISKDVEAKWKSIQEFSSLNMEPLDFSNLLGHISNLQLKPLRKYFNDPQMAEGNDYWDEERLGTIIRKWLKSLRPSEAKDIQNLRTLLSKIRSNESKIIEILLKTNPELSIPPYEDMNNRRIPSCQTQYLHTPALNQLYPRWKIWTDKLVKDLTDGKELIADAGFDDFRLDSELIILPKVGESYKEIQDRKQARLLQRVLDLSKKVDPYSIRSQSVETKKGLTKKEKSELAGAKDRLDKLLDKDSDAFIGMAKDYYNQLKTIRQGIELSEDISLFHSCEEKTKKKGNNQTESIRTILGINNISDERLETIMDTVWKDRLYGNTTLRSYCNSCEEARKKDGTAFILTLSSVKKKKKLNINITEDHEKKVSGLLDNMHLAVKKICEAFPEIQEISSKRMERDWEDKDYNYLPFANLFSLAQIFNILEGDTRGFSKICNQCIVENKWRGTIVRSGSNLDQGAIASRLNSDTIRQFDGVLRRMTDRLAFEIAYKKKEELKDINRNSKIIIPILTEMNRFEFNLDLGHYKLEARIASRMQKKGNQKNEQALERLESFEDSKKDRIKEASLQICAITGKAIGENGQIDHIIPRSHSKKSNATIFNTEMNLIYLSTGGNVQKGAKFYSIADLHPNYLQAQFGTKDKEQVQKQITEGIESILRIKRKVFRSYRPDEQKILRHSLFIPELFPLVIPLLGEGIMAKANGTQAYLARCLQKRLKDILEKEGFKNFEFSIFHLRSEEISDIRKELSNYKQDYSKPGKGQQQAPGSHILDAVSVLVGSLGNPNIQSILKTDIFSEDKGDMSKEEQAKSIEACLPSQIRILKIDSLPKYRKKNLGSKSLFKEGIFGERFVPLYLHKEMLFIGFDTQMKSGLEIKNNPEKVFDALKPYFMIHNISYNQALELSKKSIIRFPIDRKKAVRYLFDSVKQNTWNDVSEILQGLRYTVSKKDIASQIVDKNSKIQDKEEILKETQKNIKVEISKLELTGELLKGVFEYPGITDWNTFLKDFYKQKGIKTGEKLNFEIYDKFCREYFNIIKQDKQHQKVRKMFSLPVIDNPSGGFRIKRKNYDGTEIYQVATADDGYAAGFTVIDGNVEIYNKKLGRALPSLEKAESISTLQNKNNSSDDFVFMDDWREIDISEVETLKRLCIQPNSLPRARIYAEVNITDFKKVCENIDSLSIYKIPQVLKLKDNIKISENFKILKEPRGDIRVKLIDAKKGILGIEYIIQSTDKAISELYNLGKPIGSPYATPDSN

SEQ ID NO: 254 - protein, 1603 aa, synthetic construct
  REGION 1..1603: note = Synthetic
MSKIISPIAIDMGAKNTGVYYAHYQRNSTFQEVDKKGQVLVYGNYTPLLVSRTANRHTRRGYTRKKLAKRLLSVVLKEYFDFPAEKHTQALGFLMNRRGFSFLEEEYSKEYLNNLPNDSWEALSEEVQKMLGGQENIADRLMNLATTNPSEVTKLLEAVQNIKGYKDFQEEDKEIKADLVYFDYIEKISKACKLVKKGESIEDDKVTKSKKDKQNLSKTANWVVARLNNENALNLTVATESYQTNLIEEITQINYQQIQNNLPDFEKEREVIKQRKKDNNTSDWKFNYSEFKFNTPNEKGLEEDVARTHLHHFCYAVYKINNEIISGGRHRSKFFDEIKDDLDNFTTNSFLNNKHNPEYLKDFILAINENKGLDVDKLYKLVCHISNFELKPLRKYFNTEAYKSGDKLDNKNLSKITSRWFLQHWIVTKEKDKEAKVEDYEKLKKAWRAHQKCQDDNKNNIISFWLKTDPKLTIPPYQAMLNRHPPKCQSLLLNADYLNKHYPHWEDWLDDLNSNEEYQTKLQSLQRGKGRRKAKNGKEIDGRLLDDEKIKTRQLQFILDTAKKQDFYKLNEIWSVYHKLQKSDVDKIKWQEKLGNLIDASKLPKDLKQDLDFSQEESFGHFLNKYYQTRRKARDGRYFLIQEKKEKWLTNNKLLILCTHKPRQKKHQWQLDLAAVLGVNADDLKAKIVGNPEDYFKSIKGFASNCEKAAKAQKEHRGELKHKIYTELTSNPIDKLGKLANKCSNLKQELIKEIKIPELLADKQTNEVNQKIALVFKFAQIHNIVFKDRSGFSKTCPVCSTDNAFRMQENDKGITKASRLPALSIRLIDGVVMRICDAIARQVAVTKWNDIKDDLQNGTKVSVPLILEQNRFEFEPNLKKIKTAPKPGVKAAEKADEIKDNRTNKYKGQKVSLYSGEGLGSDGEIDHIIPRTGPYGILNDEANLIYISKSDNQNKGNDIKFLKDLHKNYKTEIFGKKSDAEIKEFIYKRLGKDIESKDFAFDKYLSFINLGEKDKKAFRHALFLQEGDPLREKVIRALNNRNRAIVNGTQRYLAQCIADKIHRIAKKENKHNLIEFDYLEYTARWDDPKSTYNLRKKYDLVKSKKQPLYSHLIDAQLAFLLASEDHQNDGTMGIKFDNNQTIWEYETNKETGEISPSKSFNAIDVGESDLKKIDLSPKDSNQKIIDIEKNNSNKKQNLSKIFKRRMFKANAIGERYKPIVKFKDKWYLGYPMTIKGGIYNCDEYCQEVASKNDIKKIEDVVNDDKYYQLTTDHKQIKIWTIKIVDKKYKKINKDSHRYFSQLNPEYNNDEKKEVDQIKFILDKCRYYVAKTDVINAPKIFDKQGYPFYKNWVDFDNAWRKEIGDDYSVKTGEYDLSNNTTKKKWDIFCKNRFSPPENQHKNKHQVKGKKYTMISSGTPSGNVFRVKRNNQNIYQALPLDNNIILKKKSNFLIKHSKNLTLSSAVADKDLAKPIDIEEKIELKNCVIPANNFFKDELKGVKVFLNNTSVDIKDFPLDKFREYFNKEIDVKKSIKIEILTEEQAEIDLTENPNLLYAHKCKVDASIRYTTRDGSVTNIRVGVKERLVSFSLPFRSCEKIYKDSQG

SEQ ID NO: 255 - protein, 1612 aa, synthetic construct
  REGION 1..1612: note = Synthetic
MSKIISPIAIDMGAKNTGVYYAHYQQNSTFEEMNKQGQVLVYGNYTPLLADRTTKRHVRRGYQRKKLAKRLLSVILKEYFDFSADKHTQALGFLMNRRGFSFLEEEYSKEHLNKLPDEVWGKLSEEVKNLFNGKGNIANQLMKIASNDHNKITQIFEAIQNIEDYKKYQKTDKEIKSDLVYVDYIEKINKACKIIAQNRNITDELVVKGDNDKQKLSKTSNWIIERLNKENNLTLKINKESYQTDLTKEITSINYQKIQQKLPNFEEQRNTIKQQQIESNKSIWHQINFSEFKLNPKNEKDLEEITTKTHLHHFCYAVYKINNEIISGGRHRSKFFDEIKDDLENFAKNDFLNDVGLGFKIKNGKPTKEKVKNPKYLKEFILAINANEKLGIDKLHKLICHISNFELKPLRAYFNNEDYKNGDDLDNKNLSKIASRWFMKHWIVTEEKDNKDKVNSYEKLKKEWINHNDKNNIIDFWLNTEPKLTIPPYQAMLNRYPPKCQSLLLNIGYLGKHCPNWKEWLNKLNPDKEYQEKLESLQSGKGKRTTKNGKKTDGRLVGDEKIMARQLQFILDTVKKQDSYKLNEIWSIYHQWQKPKTQNKDELQEKLQETLQKSHLPSELKRSLTFDDFEIEDSFAHFLNKYYQTRRKARDGRYFLIQEKKEKYLTRGKLLTLCTHRPRQKTHQWQLDLAAVLGVSADILKDKISDQNPEDYFKNITGFVSNCEKAAKVQKDHRGELKLKIYHELTNKPKGTLAKLANKCDELKQALIKEIGIKEILADKQPNEFNQKIALVFKFAQIHNIVFKDRSGFSKTCPVCSTDNAFRMQESDSGIAKASRLSALSIRLIDGVVMRICDVIARKVAITKWNDIKDDLQNGNKITIPLILEQNRFEFEPSLKMIKTNAKKIDEIQEDRGNQYKGQIVSAYSGENLGKDGEIDHIIPRASKYGTMNDEANLIYISKGDNQNKGNDAKFLNDLHNNYKKEIFGNKSDEEIKQFIYQELDNGINSESFAFGKYLSFINLNEEQKKAFRHALFLQDNDLLKQKVINALQNRNRTIVNGTQRYLAQCIADKIHRIARKEKKETLIEFDYFEYSARWNDPKSTYNLRKEYGLTKPKKQLLYSHLIDAQLAFLLATEDHQNDGSMGIKFLDKQTIWGRKIDKETGEVLPNQFFSDADVGKDKLERVDLNPKDSNQKIIDIEKNNSNEKQDLSKIFKRSIFKQQAIGERYRPVIKFEGKWYLGYPMTIKGGIYSCDEYCQEITKKNDVKKIEGIINNEKYYQLTTDNEKIKIWTIKTIDKKYKQIDKDSHKYFSQLNPKYGNDEKEEVGEIKFILSKCRYYVAKDEVCNAPKVLGKPGTKKYPFYKNWVDFDNAWHEEIGDDYAVKSGEYDLLNSVIEKKWNDFCKKRFASPENQLRNRHQVKGKKYTMISLGTASGTVFRINRNNQNIYQALPLDAQIIGKDKSNFLIKHSKNLTLSSSTADNDLAKNIDIKEAVKLERFEIPADQFFKEKLEGVKVFLNNNSVDVEYFPLDKFKKYFSQEIGDNKSIEVLTEAKAKDNLKNNPKLLYAYKNKIDESIKYTTRDGRVINIKPNKQSVNFSLMFKNCEGIYNDSKE

SEQ ID NO: 256 - protein, 1715 aa, synthetic construct
  REGION 1..1715: note = Synthetic
MRNHKINNNRRHNAVMLCADSPLDCLPIQDKKMKIISPIAIDMGAKNTGVYYAKYEQDSTFEQIEKQGQVLVYSKYLYPLQYRNYTSLLKNRTAKRHARRGYQRKKLAKRLLVLVLENYFNFPAKQHTQAIGFLLNRRGFTFLEEDYSKESLNDLPDNAWQNLSVKVQELLSEQQGIADKLMDLATNCPEQITDIFNAIQEIDDYQTYQKEKETINKEFIYFDYIEKINKACDLVNQDKEVTDKAVELKEGDKKHLSKTAHWIVERLNKEIGSNFVIPEGKYQIDLTSQINSTKATRIQKQLPDFEEQRVAVKYRKTINAKSLWDFTISKFEFNSKNEKGLEENKEKTHLHHLCYAVYKINHEIISGARHRSTYFEEIQDDLENFSNPNFLDNKHSPKYLINFINEITNHSQLNIDKLHKLVCHISNFELKPLRAYFNDKTPIKRDKNYKKENTDKSNFISHVAKNGGDQFNNEKLTRLASIWFMKNWRVDLGRDKQGKVDSYKELKEQWQDHHDKNDIIAFWLKTDPVLTIPPYQNMNNRKPPKCQTLVLNSEYLNHHYPDWRDWLDKLKPDQKYQEKLQELESGKGPRTTKAGKKIDGRLISDDSIKLRQLQFILDTAKKVDKYKLNEIWSIHHQLQKPTATDENQLKTAIKDSTLPECLKKDLEFSSESSFKHFINKYYQTRRKARDGRYFLIQVKKEKWLTKGKLLTLCTHKPWQKKHQWKIDLAAVFGIDKEELEDKLTNTDGKEIAPEDYFKDIKGCCEKSAKAQKDHRGELKYKIGRALARSASGEKLPKGEAKDLSNLAANCYKSKTKLIEITGIDGLLADIQTKENDQKIALVFKFAQINNIIFKERSGFSKTCPVCSTDNAFRMQKNDEGIARASRLPALSIRLIDGVVMRICDAISRHVASTKWNHIKSDLKQGKEVHLPLIFEQNRFEFEPSLAKIKGRTIKLNDDRDDQFNDKNKRIKAAASGISAYSGREFSDGEIDHIIPQSSKYGTLNDEANLIYLSNEDNQFKSNKTKSLVDLHQNYKNKIFGGDTKTDEEIKQFIYDKLIGENKKPENIDKDDDNFSFGKYLSFINLEKDVAIAFRHALFLDGDPLKQKVINALQNRNRTIVNGTQRYLAQCIADKIHRSYRKENPKGKLEFDYFEYTAKVNEENSTTELRKYFEGKKAKLSDGLLIDISKKTNEKQKTQSHLIDAQMAFLLAAYNHQDDGSMGLKFDKLETIKQGDVSADTGEYNPTKFFDASLVGENDYQKVELNPKSSNEKIVDIENRKNNKKQNLSKIFKRYVFKENAIGERYKPIVEFNGKMYLGYPMTIKGGIYRCDGYCKEITTKSGLKNLQNIINDDKYYKLTIDNEQIKIWTIKTVDKKYKQIDKDSHKYFSKLNPQYTDDEKQEIEQIKFILGACKYYVSRYKVENAPGILAKFAEYNEDNKEWVFKKNVKYPFYQNWIDFDKAWRGCIKNAYKVDTKGQYDLSDDEAEKKWKDFCKKRFSPPKNQLKNKHRVKGKKYTMISSGIPPGAVFRINRNNQDIYQAISLDTTIIGKNKSSFLIKHSKNLTLNSPTADKDLNKEITLEITNIDLKIDNIEDIFQKDFIDNKEIKTQIELVKASLTNNQVAISNFPVSIFKDVIDNFSKWEEGNSILFKQSDDRKPKANNGELKKIIKLPYRFDGKSSIKDITIKDDFVDFKLSCKKDIAHKFKKNLENNSD

SEQ ID NO: 257 - protein, 1422 aa, synthetic construct
  REGION 1..1422: note = Synthetic
MTQSERRFSCSIGIDMGAKYTGVFYALFDREELPTNLNSKAMTLVMPETGPRYVQAQRTAVRHRLRGQKRYTLARKLAFLVVDDMMKKQEKRLTDEEWKRGREALSGLLKRRGYSRPNADGEDLTPLENVRAEVFAAHPAFSTYFSEVRSLAEQWEEFTANISNVEMFLGDSNIPADKEFVDFAVAEGLIDKTEKKAYLSALSTMRANANVLTGLRQMGHKPRSEYFKAIEANLKKDSRLAKICEAFGGADRLARLLGNLSNLQLRAERWYFNAPDIMKDRGWEPDRFKKTLVRAFKFFHPAKDQNKQHLELIKQIENSEDIIETLCTLDPNRTIPPYEDQNNRRPPLDQTLLLSPEKLTRQYGEIWKTWSARLTSDEPTLAPAAEILERSTDRKSRVAVNGHEPLPTLAYQLSYALQRAFDRSKALDPYALRALAAGSKSNKLTSARTALENCIGGQNVEKFLDCARRYYREADDAKVGLWFDNADGLLERSDLHPPMKKKILPLLVANILQTDETTGQKFLDEIWRKQIKGRETVASRCARIETVRKSFGGGFNIAYNTAQYRKVNKLPRNAQDKELLTIRDRVAETADFIAANLGLSDEQKRKFANPFSLAQFYTLIETEVSGFSATTLAVHLENAWRMTIKDAVINGETVRAAQCSRLPAETARPFDGLVRRLVDRQAWEIAKRVSTDIQSKVDFSNGIVDVSIFVEENKFEFSASVADLKKNKRVKDKMLSEAEKLETRWLNKNERIKTASRETCPYTGQRLAEGGEIDHILPRSLIKDARGIVFNSEPNLIYVSSRGNQLKKDQRYSLSNLHTDYLKKIFKTSNIAAITAEIEDVVTKLQQTHRLKFFDLLNEHEQDCVRHTLFLDDGSEARNAVLELLATQRRTRVNGTQIWMIKNLANKIREELQDWCRTTNNRLHFQAAATDVSTAKNLRLKLAQHQLDFEKPDIQPIASHSIDALCSFAVGSADAERDQDGFDYLDGKAVLGLYPQSCEVIHLQAKPQEDKSHFDSVAIFKEGIYAEQFLPIFTLNGKIWIGYETLDAKGERCGAIEVSGKQPEELLSMLAPFFNKPVGDLSAHATYRIQKKPAYEFLAKAALQPLSAEEKRLAALLDALRYCTSRKSLMSLCMATNGKSLKKREDVLKPKLFQLKVELKGEKAFKLNGSLTLPMKQDWLRICDSPELVDAFGKPCSADELTSKLARIWKRPVMRDLAHAPVRREFSLPAIDNPSGGFRIRRTNLFGNELYQVHAINAKKYCGFASAGSNVDWSKGILFNELQHENLTECGGRFITSADVTPMSEWRKVVAEDNLSIWIAPGTEGRRYVRVETTFIQASHWFEQSVENWAITSPLSLPASFKVDKPAEFQKAVGTELSELLGQPRDKIFIESIVNTKRIRFWYTVKNSNKKMNESYNNASKS

SEQ ID NO: 258 - protein, 1259 aa, synthetic construct
  REGION 1..1259: note = Synthetic
MTQSERRFSCSIGIDMGAKYTGVFYALFDREELPTNLNSKAMTLVMPETGPRYVQAQRTAVRHRLRGQKRYTLARKLAFLVVDDMIKKQEKRLTDEEWKRGREALSGLLKRRGYSRPNADGEDLTPLENVRADVFAAHPAFSTYFSEVRSLAEQWEEFTANISNVEKFLGDPNIPADKEFIEFAVAEGLIDKTEKKAYQSALSTLRANANVLTGLRQMGHKPRSEYFKAIEADLKKDSRLAKINEAFGGAERLARLLGNLSNLQLRAERWYFNAPDIMKDRGWEPDRFKKTLVRAFKFFHPAKDQNKQHLELIKQIENSEDIIETLCTLDPNRTIPPYEDQNNRRPPLDQTLLLSPEKLTRQYGEIWKTWSARLTSAEPTLAPAAEILERSTDRKSRVAVNGHEPLPTLAYQLSYALQRAFDRSKALDPYALRALAAGSKSNKLTSARTALENCIGGQNVKTFLDCARRYYREADDAKVGLWFDNADGLLERSDLHPPMKKKILPLLVANILQTDETTGQKFLDEIWRKQIKGRETVASRCARIETVRKSFGGGFNIAYNTAQYREVNKLPRNAQDKELLTIRDRVAETADFIAANLGLSDEQKRKFANPFSLAQFYTLIETEVSGFSATTLAVHLENAWRMTIKDAVINGETVRAAQCSRLPAETARPFDGLVRRLVDRQAWEIAKRVSTDIQSKVDFSNGIVDVSIFVEENKFEFSASVADLKKNKRVNGTQIWMIKNLANKIREELQNWCKTTNNRLHFQAAATNVSDAKNLRLKLAQNQPDFEKPDIQPIASHSIDALCSFAVGSADAERDQNGFDYLDGKTVLGLYPQSCEVIHLQAKPQEEKSHFDSVAIFKEGIYAEQFLPIFTLNEKIWIGYETLNAKGERCGAIEVSGKQPKELLEMLAPFFNKPVGDLSAHATYRILKKPAYEFLAKAALQPLSAEEKRLAALLDALRYCTSRKSLMSLFMAANGKSLKKREDVLKPKLFQLKVELKGEKSFKLNGSLTLPVKQDWLRICDSPELADAFGKPCSADELTSKLARIWKRPVMRDLAHAPVRREFSLPAIDNPSGGFRIRRTNLFGNELYQVHAINAKKYRGFASAGSNVDWSKGILFNELQHENLTECGGRFITSADVTPMSEWRKVVAEDNLSIWIAPGTEGRRYVRVETTFIQASHWFEQSVENWAITSPLSLPASFKVDKPAEFQKAVGTELSELLGQPRSEIFIENVGNAKHIRFWYIVVSSNKKMNESYNNVSKS

SEQ ID NO: 259 - protein, 1223 aa, synthetic construct
  REGION 1..1223: note = Synthetic
MTQSERRFSCSIGIDMGAKYTGVFYALFDREELPTNLNSKAMTLVMPDTGPRYVQAQRTAVRHRLRGQKRYTLARKLAFLVVDDMMKKQEKRLTDEEWKRGREALSGLLKRRGYSRPNADGEDLTPLENVRADVFAAHPAFSTYFSEVRSLAEQWEEFTANISNVEKFLGDSNIPADKEFVDFAVAEGLIDKTEKKAYQSALSTMRANANVLTGLRQMGHKPRSEYFKAIEADLKKDSRLAKISEAFGGADRLARLLGNLSNLQLRAERWYFNAPDIMKDRGWEPDRFKKTLVRAFKFFHPAKDQNKQHLELIKQIENSEDIIETLCTLDPNRTIPPYEDQNNRRPPLDQTLLLSPEKLTRQYGEIWKTWSARLTSDEPTLAPAAEILERSTDRKSRVAVNGHEPQPTLAYQLSYALQRAFDRSKALDPYALRALAAGSKSNKLTSARTALENCIGRQNVETFLDCARRYYREADDAKVGLWFDNADGLLERSDLHSPMKKKILPLLVANILQTDETTGQKFLDEIWRKQIKGRETVASRCARIETVRKSLGGGFNIAYNTAQYREINKLPRNAQDKELLTIRDRVAETADFIAANLGLSDEQKRKFANPFSLAQFYTLIETEVSGFSATTLAVHLENAWRMTIKDAVINGETVRAAQCSRLPAETARPFDGLVRRLVDRQAWEIAKRASTDIQSKVDFSNGIVDVSIFVEENKFEFSASVADLKKNKRVKDKMLSEAEKLETRWLNKNERIKKASRGICPYRGKHLAEGGEIDHILPRSLIKDARGIVFNAEPNLIYVSSQANQIKKNQRYSLSDLKANYRNEIFKTSNIAAITAEIEDVVTKLQQTHRLKFFDLLNEHEQDCVRHALFLDDGSEARNAVLELLATQRRTRVNGTQIWMIKSLANKIREELQDWCRTTNNRLHFQAAATDVSTAKNLRLKLAQNQPDFEKPDIQPIASHSIDALCSFAVGSADAERDQDGFDYLDGNAVLGLYPQSCEVIRLQAKPQEEKSHFDSVAIFKEGIYAEQFLPIFTLNGRIWIGYETLDSKGERCGAIEVSGKKPEELLSMLTPFFNKPVGDLSAHATYRIQKKPAYEFLAKVALQPLSAEEKRLAALLDALRYCTSRKSLMSLFMAANGKSLKKREDVLKPKLFQLKVELKGEKAFKLNGSLTLPVKQDWLRICDSPELVDAFGKPCSADELTSKLARIWKRPVMRDLAHAPVR

SEQ ID NO: 260 - protein, 1176 aa, synthetic construct
  REGION 1..1176: note = Synthetic
LEAQTASLDFSATSQICSCGQNGGTSMRPISMKDRGWEPDRFKKTLVRAFKFFHPAKDQNKQHLELIKQIENSEDIIETLCTLDPNRTIPPYEDQNNRRPPLDQTLLLSPEKLTRQYGEIWKTWSARLTSDEPTLAPAAEILERSTDRKSRVAVNGHEPQPTLAYQLSYALQRAFDRSKALDPYALRALAAGSKSNKLTSARTALENCIGGQNVEKFLDCARRYYREADDAKVGLWFDNAEGLLERSDLHPPMKKKILPLLVANILQTDETTGQKFLDEIWRKQIKGRETVASRCARIETVRKSFGGGFNIAYNTAQYREVNKLPRNAQDKELLIIRDRVAETADFIAANLGLSDEQKRKFANPFSLAQFYTLIETEVSGFSATTLAVHLENAWRMTIKDAVINGETVRAAQCSRLPAETARPFDGLVRRLVDRQAWEIAKRASTDIQSKVDFSNGIVDVSIFVEENKFEFSASVADLKKNKRVKDKMLSEAEKLETRWLNKNERIKKASRETCPYTGDRLAEGGEIDHILPRSLIKDARGIVFNAEPNLIYASSRGNQLKKNQRYSLSKLDPDYLNKVFKTSNIAAITAEIEDVVTKLQQTHRLKFFDLLNEHEQDCVRHALFLDDGSEARNAVLELLATQRRTRVNGTQIWMIKSLANKIREELQDWCRTTNNRLHFQAAATDVSTAKNLRLKLAQNQPNFEKPDIQPIASHSIDALCSFAVGSADAERDQDGFDYLDGKAVLGLYPQSCEVIRLQAKPQEEKSHFDSVAIFKEGIYAEQFLPIFTLNGRIWIGYETLDSKGERCGAIEVSGKKPEELLSMLAPFFNKPVGDLSAHATYRIQKKPAYEFLAKAALQPLSAEEKRLAALLDALRYCTSRKSLKSFFMAANGKSLKKREDLLKPKLFQLKVELKGEKAFKLNGSLTLPMKQDWLRICNSPELADAFGNPCSADELTSKLAQIWKRPVMRDLAHAPVRREFSLPVIDNPSGGFRIRRTNLFGNELYQVHAINAKKYRGFASADSNVDWANGILFNELQHENLTECCGRFITSADVTPMSEWRKVVTEDNLRIWIAPGTEGRRYVRVETTFIQASHWFEQSVENWAITSPLSLPASFKVDKPAEFQKAVGTELSELLGQPRSEIFIESVGNAKHIRFWYIVVSSNKKMNESYNNASKS

SEQ ID NO: 261 - protein, 1002 aa, synthetic construct
  REGION 1..1002: note = Synthetic
MTQSERRFSCSIGIDMGAKYTGVFYALFDREELPTNLNSKAMTLVMPETGPRYVQAQRTAVRHRLRGQKRYTLARKLAFLIVDDMMKKQEKRLTDEEWKRGREALSGLLKRRGYSRPNADGEDLTPLENVRADVFAAHPAFCTYFSEVRSLAEQWEEFTANISNVEKFLGDSNIPADKEFVDFAVAEGLIDKTEKKAYLSALSTMRANANVLTGLRQMGHKPRSEYFKAIEADLKKDSRLAKICEAFRGADRLARLLGNLSNLQLRAERWYFNAPDIMKDRGWEPDRFKKTLVRAFKFFHPAKDQNKQHLELIKQIENSEDIIETLCTLDPNRTIPPYEDQNNRRPPLDQTLLLSPEKLARQYGEIWKTWSARLTSAEPTLAPAAEILERSTDRKSRVAVDGHEPQPTLAYQLSYALQRAFDRSKALDPYALRALAAGNKSNKLTSARTALENCIGGQNVEKFLDCARRYYREADDAKVGLWFDNADGLLERSDLHPPMKKKILPLLVANILQTDETTGQKFLDEIWRKQIKARETVASRCARIETARKSLGGGFNIAYNTAQYREVNKLPRNAQDKELLIIRDRVAETADFIAANLGLSDEQKRKFANPFSLAQFYTLIETEVSGFSATTLAVHLENAWRMTIKDAVINGETVRAAQCSRLPAETARPFDGLVRRLVDRQAWEIAKRTSTDIQSKVDFSNGIVDVSIFVEENKFEFSASVADLKKNKRVKDKMLSESQKLETRWLNKNERIKKASRETCPYTGDHLAEGGEIDHILPRSLIKDARGIVFNAEPNLIYVSSRGNQLKKDQRYSLSKLDTDYLNKVFKTSNIAAITAKIEDVVTKLQQTQRLKFFDLLNEHEQDCVRHALFLDDGSEARNAVLELLATQRRTRVNGTQIWMIKSLANKIREELQDWCKTTNNRLHFQAAATDVSTAQRLRLKLAQNQLDFEKPDIQPIASHSIDALCSFAVGSADAERDQDGLSAVLRSDSLAGKTTGREISL

SEQ ID NO: 262 - protein, 1430 aa, synthetic construct
  REGION 1..1430: note = Synthetic
VSNTYYSNIAIDMGGKYTGFISYTSNDLPDSENVKAAIIEMPDDGSVINYTVKNRTAVRHHLRANNRYKKARKLIFTILADTIKRNLTQSEQEAISSLMLRRGYTRLETEIDLEQLKECPVDLFFQCCPGLFTGDVPLYDQFINNCNDDTVYVYRESLSSIKETVSNLSDKTEKSMYGSALKTMVDFVDKFIDQKEFGHKHRTEYLANIRKDIQKDSRLNDLIKLISGEDRLYNCIGNISNLQLRALRWYFNDRGMSGKAVFDKKRFKDVWYRAYKYFHYTAGSNQKDNAEKVDIIKKKNEFLKRIEQTENITDLLLAQDPVFTIPPYEDQNNRRPPVDQTLLLSPQSLDAHYPGKWELWVQKFMDYGSGSYSSLSDELEQIVKLTDRSSRLQSAGGKQSDHIASYTEQKLIHSYYLQRLLDITYNRGNPESQIRKWAQNPNSCSATNAVIKNILGESDIDSFFELANNYYREVSLSKKGLWSIVEHPLLEISGIHPPMKSKMLEELVAGVLNIRKGFNLERFKEVWNSTVKGKSTVRSLCSYIEKTRKKYGNCFKQEYKNVCRYEELKNKASEVHFSSDIKIDKEVVKVYEYTKNLSKFIGEKLELSTDQQSKFANPFSLAQLYTILETDVHGFSGNCKAVCLENTCRMQMSDKGNALCCRLPAESTRPFDGSLGNILDRQAYEIAKIKIAEIKELSALKNTKVKLSVLVEENSFEFSSSLSTIKKSLKAKQLREFALKAEKTEREKWKSKDERLKNDSHNICAYTGMALSDDLSENDHIVSRSETKESYGTIYNSEFNLIRVSRRGNQLKGNNIYTLDNLNPKYLEAVFGTSDTAIITTRIRETLNRLLISNPNLNIDIMTEEERQCCRHALFTSRTGVPFNQIIQAISKQYRARVNGTQAWFVKNLIAKIDEGLREWKSINNITVEYNAYKIDAGSTSEIRHDIGKLDARYEKKDIQPITSHAIDAVCLLGNASTQQEISEEISGNNEISVLSDVKELIKLIPDRFDIIRISSLNFAEKNNPESKQLFKDTIYAEHFLCIMEKDDTVKVGFDFGSNSIQIVKGGKQLLSCLANYLESPKQNETTGFRTYKVCKTAAFKLFERFYRGLVAEGSDEELAYLALMSLRYTTLHQDVFSLLYDVKSKKFAAKKDILKNLDIKISFPSVLKLKTDKASLVLPSFNEWAHIASIFEDYLGKKDEQESGYDKLKQYLGTILNKTINKNHAKSKRVYSLPVVASPSGGVRIKRLTHTHGDIYQLVAANTPVTSISKGFASADNGDVLWDEAVMVDSYTTKNLTVINKKISGDKNFVSMDEQRLVYESPDERVYMTPATDIRRGITIEQKFEKFVYCIDQQNIYKSFHDLPTEIKTDPKIFMERLNIDICGKPRGNLKILSIGNIIKYSYMVESSNRVMNQVYNNPIDKGTIFKSN

SEQ ID NO: 263 - protein, 1490 aa, synthetic construct
  REGION 1..1490: note = Synthetic
MKWLYPIALDLGAKNTGVFNLSYAAGTKLESFINANQVTKNAFVAQVPETKQGGYQFLQTNRTATRHSIRCRKRRKQAKKLFLFLLERVYRFQTQGHTEAINHFLNRRGYNYHESQIDFETLEQFEQEDWIALQTFLIEQNASSVLEQLDFSEVAESLLQLQAFELEELQQHLECIEKPKKNSPAAALLKVTKELKQEKIKEQTSGAKHRRDYFDAVRHDIEEMAKSKDKQFKKLYNALKHAKGFKQGEFVNVFWQLLCHVNNFDLKLLNRIHKALNDSTTSEQVDATLAKYVSHWVLKLWQGSDANTAERKQFKQTLKSHIKTNPNQILQFLLQTSPEHTIAPYESHSNRKPPYCQTLILNAQTLNNQYPAWQNWLQLLANGCEQTQQAVEQYQTKLRCKTSKEGNILVEIEKQNGLLELQARTLQFVFDASVKTCPYKLSEIWGKLKQINQLKRNSKETKKVQASLTNLLAQSQLPDTLKLACNSNPEEGSFWHLINKYYQARRRTKQGRYFIHRDNSQNSELNKWQSRDQLFQICQHKPKQLKHQALTDVLQLLGLEQNKFQVLNGSNEAVLLEQLATEIKGSAKGIVGVAKNAHKAQKDYGIDLKAAIATESKLQSLADKAKVLTQKLAEHFFTNKIQQDYFFERNKSLFTFAQLHSLLFNVERSGFAKTCPVCSADNAARMQMNQGVAQASRLSTMSLRLIDGGLKRLLNHQAHHIVNRLWPELEHHLKQGHKVDIPLILEQNRFDFSAHLHALKGQGKNKQQRPPEDERYFEQKQTRIFDAGKQLCPYTGDALSLNQADIDHIIPRSGAYGVLNDEANLIAASTVGNRKVKQDRILHFEDLSKAYLQAQFDTANVEQIKAHLYTTLWDANKKQFVFEQYKQFIALTEIQQTAFRHTLFLENTDELKQAVISAIQHSSKSRVNGTQRFMAQLLADIFWQKAKVIQCENLLHFDYFEYSANSQDELSTTSLRRTLTQTFANTEWDLTPFNKQKGHSQVPYSHVIDAMCAMALAVEQHQGEGALAVDVGDTSVWPKIDKQTGEYQASNFNMLAIKAEQLAPEVSVKPTSLATKIKQQGLTSKPHTVISRRIFGENALGIRFYDLAIDNNQVVKGYYHEQNGHQEFVRATTKVVDKTTAMLEWLTTNQYYQLKQKQAVEFYVPNLQAILSLMFRVLSAAKQTKFDKKSDEYKAVKWLFGKGDGQLFYYTNKAALQAAPSIIDKLKSSNPLMKKWQHFYAGWQAICGGSAKVNQGQFVIEAEQLNQWQNYCQAFLGQSVERNKHSPVRNYTMFNETVARGNVALQFKRDKFTLYPFNNNDVPKAQSMHIMLNSPNLVAFESSVLTKGYVVELEEKTNYKGTHIKVKTLIDENKADALKLNLEQLSIKVPSNTQINISGVCKTWFEQNLLLKRAVEADAWKKRTSLGFDKYDDEKCAVITDTLKSVLKTAIRAERNKSLKLLHTEAALTIGLPVKAEHIAKLLAKQNSEG

SEQ ID NO: 264 - protein, 1495 aa, synthetic construct
  REGION 1..1495: note = Synthetic
MDWLYPIALDLGAKNTGVFNLSYAANTKLADFDKKNKVLKKAFVAQVPNIMNGGYQFLQINRTATRHAIRCRKRKKQAKKLFLFLLEHVHNFKTQGHQEAINHFLNRRGYNYHESEIDFTAVKQVEQEHWIALQAFLIEANASPVFDQLNFSEIEESLLQLRVFELEELQQHLESIDNKKKNSPQALLLKVVKDLKNEKAQVTGAKHRRDYFKAIHHDIEHMSKSEDKKFKRLFNALTHAKGYKQGEFIRVFWSLLCHVNNFDLKLLNRIHKSLDDKLTYDQIDAILNQHISHWVLKLWQGTDANTPERKKFKQTLKAYTQANPKKILQFLLQTNPEHTIAPYESHTNRKPPYCQTLLLNTETLTSQYPEWQKWLVQLSSSCEKMQQALSNYQTRLRSKISKEGNVLVESEKQNGVLELQARSLQFVFDTSAKQCPYKLSEIWGKLKQINQLKRKGKSTDKAEANLASLLEKSWLPSNLKVECTSQPEQSEFWHLINLYYQTRRRTKQGRYFIHRDNKQNSELNKWQKNRKLLQVCQHKPKQLKHQALGDVLQLLGLEQEQLFTISTNDEAISLEKLAEQIKSAAKGIITLAKDAHKAQKDYGIDLQAAIVSEPKLQKLASKAQEVTQKLAVYFFQDTSQQNYFFNRNKSLFTYAQLHSLLFNIERSGFGKTCPLCSADNAARMQISNGFAQASRLSTMSLRLIDGGLKRLLNHQAHHIANYLWPELEGILKQGHRVSLPLVLEQNRFDFSANLHALKGQGKNKQQRLPEDEKYFTQKQERIFNAGKQLCPYTGEVINFSKSDIDHIIPRSGVFGVLNDEANLIASSVTGNRKVKQNRLLSLKDLSKEYLQAHFNTTDPELIKAHLYATLWDSNKAKFVFGQYRQFIALTPVQQVAFRHALFLDEFDELKQGVISAIQHGSKSRVNGTQRFMAQLLADAFWQKARIIQCENQLNFDYFEYSANSQDELSTTSLRRVLTQALVKTDWDLTPFCKNKGQSQRPYSHVIDAMCAMALAVEQHQGEGALSIDVGDSSIWPKVDAQTGEYKASNFTSLAIKAEQLQPELIVKPTSLANKIVKNGPISKPHTVISRRIFGENALGIRFYDLAVDNSNVVKGYYKSEIEAGEFVRATAKVADKNVEILQWLTTHAYYQLKLKQGIKFYTPNSYAILSLMFSVLMTAKKSNLDKNSQEYKAVKWLFGKGDGQLFYYTSKAPLQAAPNIVERLKSNNPLMQKWLHFYNGWQAICGGSAKVNLGQFVIESGQLNQWKNYCQAFLGQTEKFNKHSPVRHYTMFNETTARGNVALQFKQGKFTHYPVNNNEVPKSQSMHILLNSPTLVAFESSVLTKGYLVELEEKVSFKDAQINVKTLINEKKAKVLSLNIDLLNIKVLSNTQINIEGVSKQWFEKNLLLKRAIEAEAWKKRSSLNFDKYDTEKCVIVTDTLKSILNTAIRAERNKTVKVQHIDETVSLGLPVKAEHIAKLVAKQNLEEAKSQKAP

SEQ ID NO: 265 - protein, 1403 aa, synthetic construct
  REGION 1..1403: note = Synthetic
MENETYISPIAIDLGAAHTGVYSLIYKAGSTLADVEEKSGVVYELDPQNNTLLMVSRRQKRHQRRNLDRRQMAKRLFRLIWEKHFGLQWDADAAQSIGFLFNRRGFSFITEHYDIQALANFPEEAWQELPRAFTDLIPVDLRNSSGLAEFIMALPRDEPLSNSCLCELYKETNKIKKELVFTQKSIALAKACEAIGQGRGVPVERRKKESPLASVSKWIVERWRDEGVCGLEAVEPTGPVYNIAGFLTEHPSLAETVTATLPDYRAAQNESKQSMWNFAIDKFKLEEAEFERTGETTSEKQDFIRTHLHHLAFAIYTISDELRSGARHRARYFEEVEKVLTGITHRHGYLQRFCGSLQQEHFAGLTPAKLTRLISHISNLELKPLRKYFNDKKHQGGFYWDEERLKRCFSDWVLGQWRVDLAKNRDKGAGKPQDYQKLRTVLQNYEGGIIEFWIGHDPQLSIPPYQDNNNRNPPRCQSLLLNACFLDHAYPSWRRWLEALKDNAADHLGDLETRLLGLESGKKNSYFNQAKSGDQRKDSQKLGMADLDARLFQFILDRRKDSDPLRLADIYGHAKRLRQLGWRTELTEPEKMEQARHQQKLAQTVLESGLPPDLKTSPQFNQQDIFPAGSFLHLVCRYFKNRLRAREGRLFIHPDYQRTAHRGYQFRNRFISENNLLRYCNLKPRQKRYQMVNDVAGVLQVSPDRRVLVARQNHNDGSQSEAVFAWLKDFRGLQTACKNAADSQKEHRGLLKTKLLAGDRALQRLQDRCTQLSRLIAREICSGDEDPEARAQKFSSIFSFAQLYAIAFSDRAGNASTCPVCSLDNSRRMEMVGEDQRAKAQRLPAISTRVIDGAVKRMARILGRKIANDRWPLLKQKLVQGTPVRVPIITESNRFEFEPALSRLKPGVKEKSIGKDTSYEDKRNRIAEQGGGICPYTGQPVGENGEIDHIIPRSSSFGTLNDEANLIFATEQGNKAKGGQFYSLKNLSRTYKQGLFGTNTDEQIAAWIRETLWDERRGRFRFGNYLSFINLGSDEQKAFRHALFLEDGDHVREQVVAAISNRSRAFVNGTQRYFAEVLANEFYKEALDIGKERLISFDYFGVEATSTSRGDGVRDWRRHYEEFYPGEFAPYRKKDGISQHPYSHLLDAQIAFAINADKHRGDGGLRLRIPDHMGLDALNMDTGEILHDNIFHAIRVLPEQMTAVHVQRRRPSDNRCTHRAFTRDLFYADRYLPILLKQEENGVILKAGFTWKNAEVFNKNQRRLLPQLLPLLTQAPHYPARLSQELDKGSTAGTAFEQRLYQLLINTDYFKEQIDRTGAIYLTINRKTLHELWLERHNTKNGTPFENKDHATLFEFCWGKLGYRTEKKHIATEDDLKKLEAKEGNFTPPLTARKSCCRLNMTG

SEQ ID NO: 266 - protein, 1403 aa, synthetic construct
  REGION 1..1403: note = Synthetic
MKIINSNIAIDMGGKYTGVVSYTSDKVPASEDINALVINMPETGSGINYTVKERTSARHRIRSLDRFKKARKLIFQVISFVVNRDLSSDEKEAISSLMKRRGYTRLESEIDLEILNQCSTEFFADNIDCINNDSPLLEQFSSLTCSLDKTKEFLSKIQVSDLDEKIKDISDKNEKALCKDVLKIMKEACGSMISQEQFGHKHRSQYLEAIKADLEKDSRLKNLIECIGSSERLYRCVGNISNLQLRALRWYFNDISMKSNTMFKPDRFKKVWIRAYQFFHYPEKEEVVKLLNEIMHSDNIVETLGNIDPARTIPPYEDQNNRRPPIDQTLLLNPSALDEKYPDKWEKWTDLFVSKKSEITDKLDEIVILTDRKSRRCNTIHPSYTYEKIKHSYALQRLFDLSKGESLISNIRAWANNPEGRKNLEINEIINNLLGNDADEFLQLAQEYYRECDYAKRGLWSLVEKPILEVSSIHPPMKKKAGVMADMVSAVLCINKVLDLEKFKKEIWNVKVKGNSTVRSICKSIEDTRKAYGNAFKQEYEFALEKQQSDPKSLSKEEKDLVKLSETVAFVADYIFKNLNGNDLDSPKYANPFSLAQLYTILESDPHGFSSNCPAVIKENAWRMQSYDGLGAICSRLVAETVRPFDGSLGKILDKQAYEIASRKVKEILSIPNLTDTLIKLGIVIESNQFEFSASIAKIKKSGKYKKIQASADRGLAKQELRWEEKSDRIKRLSNNICAYTGEELDGVICEIDHIIPRSFTKEFMGTVFNSEANLIYVSQKGNQTKKENLYHLKDLHPKYLLSIFGTANVQEINNKIEDTVKKVLKKNPRFIFELMSVEEMQCVKHALFMSYDSEAYKTVLNAMAKIYSTRVNGSQAWFVRAIILKIKSLLSDWLKSTRNTLSFEAWKVSGEETHRIRESLANLDPNLGKKDIQPITSHAIDALCILASACVDEKKSSFLGENGCLNFLYKPENLIKVIPEQFEISDVSRKPFTEKDKPESRKLYKETIYGEHFIPVMVLGDIVKVGFNWKDNCFEVSKGADKLLELLSPFFNEQFKMDNKFHSYSINKEKAFDYLHKASVSSCDKTMLDTVNCIQNLYYSTRKVAVVDSIYDSTKHKFKTESEVLNNKKFDIKLKTTFTKEIKLKANNSGNLELPAISSWKQILSQFNEYIGKSIDKGDELVRKELGSTKFSSSSKLKHKRVKQDFSLPMLDGPSGGIRVKRFNYDNKAVYQLVAANTPETVTSQGFPVENNKINWNGSVPLPIYSEDNLTSVDIENNQNDIQSYVKMAEQRLVYRDDNLKVMMSPGTRDRRYVFIEQDFESFKTCLNDVNVKSPLDLSNEIKLKDSDCKSFAQSFNKLTDSKVDVGIPRGVLKITSIGKIISYYYSVQSSNSNMNSAFEKA

SEQ ID NO: 267 - protein, 1548 aa, synthetic construct
  REGION 1..1548: note = Synthetic
MVDLEPRSPAESRAMGSFDRQGRSQKSAVSPRELLSGASTGASGSPALFAPIAIDLGAKHTGCFFPGIIGPPNQTDPAEGSRGLVVEVDQNAFTLMMTERRARRHQRRAYKRRRLAKRLVCLWLEPQFVKLESEDRIRCERFLRGLMNRRGFTYLSLDERIRGDELERALPMLEAAHLLGNHPTVAAWLTEAASDPKVAEQVLQHELFRTVEVNRRSKKRLSAALQKMLDASGQTQDGDIIKAARESLLKVLDYLTAVAQAPQTGHKHRSEYFRDIESDVTHTAEGRYVSNLLGLTPKSLSNLVGHISNWDLRALRSYFHDPSRKCLEKLDPVRFHRAWLQFFRRWSLAGERPERRQDFAEKRRRWVQRLQEIPKGERGELWKLLTETDPNETIPPFESQGNRRPPRCQSLLLCPDSLDKHYPPQAEGQPPQWRVWAQRLAQHNPSLLEDLESIARADARCLGRVPMPARGAKWHELSASDQQVLLEETQKRWYDARLLQRVLERHQELDPYRLRSIVSRTAASNQADALATLTRHIGDHQVDAFLEFACCFYDETRKARRGIWLPGNAKLLRVCNAHPPHKRKIEDLLVAQIITRSSAPPPRLGQTVRDAVGNTSVQPPPELQGARTRSLRTLLNRMADGVKQYSGDLKYWYRAALAKKQAEQPKPLDPPEQEAFELYAWAQAAARQLAGRLGLSESAIEHFDNPYSLAQLHQILFAGVSGFASTCKACTHENFWRSVVDSQGRANAARLPAHSIRPIDGAVAKALEAKARQVAREFANALSNEEIPPGVLLHVPILLEENRFKFRQELAEIKGIGQGKKGKQPAQQAAQNVATHEPWKGKYERIREDGGGLCPYCGGVVGEDGEFDHIVAQAVTTDYEGYGFDSEANLIYAHSSCNQSKGKNLYSLENLADAWLREQFQTTDRNEIEEEVRKLVEPWLEERLNRRAFDQLEKPLQRAIRHALFVDHLRGHVLQRLAMQNVARVNGTQRWFGQILIDRISALLKKNGRVDLNGVNFSLHRVPAYEVKALRDNLAKVEPRLKKPGEQGPYSHVIDAALCYAVATTQPQVRQLLGLSSIEHLAEFISPARALALLPDQVRIARVQRRPIYEKKHPWHRPLFKANPLGERFVPLNVTRDGGLFPGFSAQADKPEHSTVNHPKQQKAASNLLRLLWPVLANPPGEVDPSSPNLLEQIAELARRNPEGVIRLHVDKTKAFRHWQECRHKPDDQLARILDALAYRVQRQNLEEIFFGEQGSVSPDKILAKEYFSFEVKLPGLPKTTVTLPCRRAWEALLRDPDLEPHLRSGKKLVKKSNAGELPENAVAIDWDAVVARHFQRPAATRRHRRVRQVFALPRLADASGGFRVERRGFEGSVFQLLQVEEGAYAGFTADAKKPHGFNPSRPVLLPVLARSKSLTPIERTQGASAVVRFNEPKLFESDLLRENGIERLEVLPGTRPRRQVRMRIRREKLQVLMGKEVDAFSLEHSTLLIGKDHKRQLAKLLQEATKISALAPRKDQVEVDGWDRDCIELSWTAGTGAQKKGDANSQQ

SEQ ID NO: 268 - protein, 1581 aa, synthetic construct
  REGION 1..1581: note = Synthetic
MVKKSNSSQIMMPIAIDLGSKNTGVYTANYPQGTHISEFKDTSKVKKQALVLEFLAKENKGYQILQSDRTAVRHTIRNRTRNKLAKRLLKLILKEYYRFPIEDKDHEKALNYLLNRRGYSYVESDYCDLSLKEITDDQLEQIANDASNGAKHRTKYFENINHDLKTLGDRKEKYLSRFNGALEEHQLNHRNTGNFKEIFEKTLCHINNFDLRSLRAFFNNSNGENQEWWRRGNTPDSADAIEYKLSTIFHRWICDQWIVNKEKNGQKKVDDYQSLKKEWLEFTKNNTGKLFSFWQKTDPKLTIPPYESQTNRRPPACQTLLLNVQCLTQYYPTWEIWLKDLQSGSNLDVERYNKELLECTSRDRQGTPIIHTKPGKQRTDKPNESFSQEDKTRTFQLLLDTSKKNDVFQLNKIWSRYHKLQQQIRDNEDKLKINKQIKSLNEVVKNSQLPESLKTQLTFDESQKKYKEETFGHLLNKYYQTRKRAKDGRYFIHYDNTQSSKLNRWKTNEKDLLRLCHHRPRQKKDQGFIDLQAIFGVDNELWKKPLEQAAKNETTKDKTSNIEKATEWLRSKDFKGLKTHCHAAAAAQKEHKGALKQLLDRAESVQNSNHEVAPAKTTDKQLLDRAESVQNPDKIDKKLIKLNKKSKELAKRLALCFYPNDNSQKERLSKRLNNIYTFAQMHNIVFLDRSGFSKTCPICSVDNGFRSQMDGDGAYAHASRLSALSLTIIDGAAKRLLNHKAHHLTNRLWETIEPYLNEGQNVSIPIILEKNAFSFEYDLADLKKTQTKSKETQKKAKETQTKSKQTKERIEESYKDKKTRIKDASKDSAGQYHCPYGGQLSGTDGQLDHILPRVSKFGTLNDEANFIYTSSTGNQNKSNKIYRLKDLNKDYLNVHFKNKNIEQITKHIYTTLFGTEDIHAIESKNFVFGSYRNFSNLEKKYQPCFRHALFLQDNDPARRRVIDAIQHNNKTMVNGTQRLFAQLVANCFWKKANAINKKHLLTFDYFQYAPISGDRMSPFGLRNRITSLVSGTDCCIDEYSKNDDKQHPYSHVIDATMAFLLATEQHCNEGTMRINIDENMSVWGSTNEQSEDLSADCYQAVSVSSNDVETITVQPQSVATKIKRADSASSAPSLHRLFSRRFFKENALGLRYKQLFKREHDNDGTDVWSHGYIDYSESDKPQFIKVEPMSTKSNNESIEYLVKQGFYSERERDAFDKNDEKVTYRMLSPKKKMIDAALFNFLSKANEDKVNLKDPKIKEEIKEEIKAKIKALEFVLSDLKQWVQSKPIEETTKVINKKDKLNPWLIQWKKFDEGWKERSGDNCKVDKNQKYIIDETNQKLWNEYCKEFFPSGSNDCPIKHKKSRKYSLIATTKPSGALVMIKKPERRNCSEGYYCMAIDKNIISKDKAAFIALKSKNIVLFDKSIFSKGYVYDTTEYDRLFGKSIETKYFINTDTAKDFVKDLQQIVITISTHKETEVTLSGIKRTYFEKYLFNKGSEPIKQGAFYFSDSEQNTINETNIKELIIPSIRQEKSKPPAKIIAITKDFLSMTLTFRSENLRKVLDKQAESKKSEVCEQSSDHD

SEQ ID NO: 269 - protein, 1397 aa, synthetic construct
  REGION 1..1397: note = Synthetic
MTKNYISPIAIDLGAKFTGVALYQYLEGADCTQEVAKGLLVDDRGNVTWSQEGRRGKRHQVRGYKRRKMAKRLLWLILDSEYGIKREEVTEPLLKFINGLLNRRGYTYISEEVDEESMNVSPLPFSEMMPDYFNSSAPLLEQLAKLLSDKNKLVRFRAEGKIPSNKNEFKKLLDTALDGKYKDEKKELSEAWGNILIASENVLKSTVDGHKSRSEYLANIKEDIKSNEELEKQISSKEIDGFYNLVGHLSNFQLRLLRKYFNDPNMSGVSYWDEKRLEKYFYQWVQGWHTKGGTDEAEKKNIILKTKGAPLLKTLKSLSADLTIPPYEDQNNRRPPKCQSVLLSDEKLTMHYPKWKEWVGQLVKQNDNAYLNENVTLANALHRIVERSRSIDPYQLRLLISITDAEKRNDLAGYKRLKLSLGSEVDEFLLLVKNIVDETKEAREGLWFETENKLFFKCGKTPPRKEKLKSTLLSAVLGKNLSDDEQSSFIEEFWKSGTPKIERRNVRGWCRLASQVQKTYGVYLKEYGLQQLHKLEAGKKLDDKPLALLYKNSGLIASKIGEALNIEPDEVSRFASPHSLAQIFNIIEGDVAGFNKTCRACTYENIWRMQEEKVESLLTNQLLSEIHGERKVPLKSAMCTRLSADSTRPFDGQMASIIEHIARKIAQHKIAQINDVPKEFSIDIPIIIESNQFSFTAELEEIKRGRGSAKAKKAKELGEKSKAGWVSKTERIKTSSEGICPYTGAPLGGSGEIDHIIPRSLTGRTKKTVFNSEANLIYCSSKGNHDKGNRVYVIEQLNDKYLKKQFSTSDVNLIKKKIKTTIQRFTEGGEKLRSFSELSREDQKAFRHALFVPELKSEVTSLLAVKNITRVNGTQAWLAKKIASLLAEHLDKQGRDYTLSAHQIDPWSVSKQRKMLASAEPIWAKKDPQPAASHVVDAVCTFLEALEQPHTASRLKTISSTSFEKTGWRSALIPDLIKVDALDRRPKYRRYNIGSTSLFKDGIYAERFLPILIDENGLMAGYDIDNSLKAKGADVVFESLSPFLLFKGEEVGAQSLSDWQERIDGRYLYMSIDKVKAFDYLQEKVGEKDIAAELLNSIHFTQRKTELRAKFSDDSGKKMKTLDAIRKSLKLTVTVNEIGKRKEKCGFSGTIGIPAKSAWENLLDEPLLETYWGTKMPPQEIWEKVYRKHFPRNIPNQAHRKVRKDFSLPVVDSVSGGFRVKRKTPNGYNYQLLAIDGYSAVGFKKEGDNVDFKSPALVPQIAESKSVTPISSELVHLDKNEIVYFDEWRKIDISDSDLKQFVSSLELAPGSQNRFYIRFTVDEDQFERHFKSALRVNGIQDLDTVNKTFDWNREIPSLLIPPRSNLFLLETGQKITFEYIANGANAEVKKAYSLRRA

SEQ ID NO: 270 - DNA, 23225 bp, synthetic construct
  source 1..23225: mol_type = other DNA
  misc_feature 1..23225: note = Synthetic
cgcccgcatggccctggaggtggccctcatggccctggagggcacggccacagagctttggtatgaccagctggagggcctgcgcgccctggcggacagccacctgagcacccgggaccgggacctcttcaaggccctgcaggagcacgtctgcgtgcgcggcggcgccgatgaccagcaggccctggacacgaagatgctcacccaggtgctgctcgccctgggccaccccgaaggcccccgcgagctggagctgacctaccaggccgcctccacgggccgcaccagcgcccggaccgtggtgcccttcacactcacccacgatgtgttctccggcggcgccttcctcttggcctgggacgcggccaagcaggagccccgacacttccgcctggcccgcatcgtggaggccaaggccctggcccggcggggcctcatccccgacaagcgccccctggaggcggcccgggaactgcagatcggcgggtggttcagcccctcggcgcccttcaggatccaggtgcgcgtggctggcaccaactggccccaggcgctgctggacgctcccccagccctgcccggcatcgaggtccgcaaggagaaggggggcacggtgctcctcagcttccaggccacggagccctcgggtcccacccgcttcatcctgcagttcggggccgatgccgaggtgctcgagccgaagagcctgcggacccagctgctggcgacgctcaagctcatggccgccaagtatcgctgaacagaggaagggccggcgctgccggcccctcttctgtccctgctggaaaactattttttcgcgaccttgggcttcccgagatcccggagcaccacctgcccctggcgggcatagtcgatggcctcgcccaggatgcgggcggcttcctggggggcgtggaagcccatggagttctcggcgttcacgaagtccacgcgccactgggccttgcgctggagctcgaagacgggctgcagcttcgcatcgtccacgccagcctgcttggcggcgacaatgtcactgatcagctgcaccacggcatcctcggcgcggtccatgagggccttggtgcggtcctggatggccgtcacgcgggccttgagctcttcctcggggaagcgatggcaggtctggcaggagcgcgagacgtccagcagcgggctgcgcacctggtggttgctgatcttgatggcaccctcgcggacatagggcatgtggcagtcggcgcaggagacaccggagcgggcgtggacgccctggctccacatctcgaactccggatgctgggccttgagcacttcggcgccggtctgggcgtgcttccagtcgaagaagcggtggccgtcgctgaacttgtagctgtcgtaataggcctcgatctgctcgaccttgaggccgttgttccaggggaagaacagcgtcgccttggggccgcagtagtactccacgtggcactggccgcagaccatggagcgcagctcctggcgggaggcgtcgcggttggcgtcgtagggcatggccttgtcgcccttgcgccacttctcgatggagggcaggtgcggcacgggctccgtgctgttcgccagggccacgacgccccggatgaagccaggcttggtgacgcgcagggccatgttcttggggtcgtggcagtcgatgcaggccacggggtgcttgaccagcttggtcgcctcggcatagggcagcttgcagacggcctcgaagcccgccatgagctgggcctgggcattggggctcggaaaggcttcgtccagggtgcctggcgcgccacccttcaggcccgcctcgcggtaggccacggtgttggacgcgtggcagtgcatgcaggcgccggtctggggcttggtcgtgacgcgcttcgtgttgcgctggtcctccagcatgtaggcgtgcccctggcgctggttgaagtcgatggcgaaggcatagccgtcgaagatgctgaccaggcgggggtcttccaggatccggctcttgggcaggccctcgctgccggcgccgccgtatttggtgctgtacttctcggcggtgcgcttgtaggcatcgaggtggcgggggaagttcttgccccagatctcgggatccacggtcttctcgtccaagtccacgaccttgaggctggtctgccgggcctcagccttgcggctggagatgctcgcgtagaggctcatcatcagcaccgtggccacggccgcgccgatggccaggagccccatgcgggcccaggggcgggagaacaggggggtgggctggtcggtcatcggagggttcctcccgcgtgggtgacacgcatcgtcgggttggggtcaggcgttggcatggggctttatcgggtggggccgtggcccacaccctggtggcagcggacacagccgtagaggtcggccttctggcccggatccgtggcgacacccagggttccgtgggccgtgatctcgtccgtcagctcgccgtggcagcggaggcagttcgcctccagcacctcggcgttgccgggcttgatgcggatgggctcggcgaagttcaggagcgtgaaggccttggagtggtggtagccgttgctggccttcacgaagagcttgttcaccacgttgtcatggggcaggtggcagtcgttgcagaccgccaccgcgtggtgagagccgtgctgccagccgtcgaagtcgtcgcgcatgatgtggcagttcacacagaccgcgggatcgttcgacaggtaggaggtgccgtgggccgagataaaggtgtaggcacccgaccccaggaacaccccgaggaagacgctggtggccaggctcaggaacaggagtcgacgctttccgctcacgggtcatccatcggtgggaccgggcactcacccagcacctggaaggatgggttcataattaagaccagtcaatcctaaattcctgtttatttgcccggcaaggagcaggaatccttcgtgggtgtagcttcccattacatacaaatgtatctaattgccgatattcacgctgattatcttggtcttttcagtgcctcgcccctgccctgagggcagacctcccccatcggaggaccgtatactggcctcccggagcgcccatgtcccagaccatcgatcaccccgagctcagcgccgccgagtggaagctcatccaaggcctgcgtgccctgccggaagaggctctgcaggcccggatgctgggctccgtccaggagctgctgttcttcttcagcaacccccggtgccagggcatgggcgtggagggcttcccctgcggcgaaccccgctccacctgcgaggagtgccacgaggtctgggacatgctggaccgactgtccgcgcgcaaccggaagccctgacctgcagcgcccttcgtgttgctcgacccggatggcgggagcatggcagattccggccttcattaacgactgccgggttattatcagagtccccccggaggccccatgcgcacccccgccaccctcgccctcatgctcctgcttcccgcctgcctcagcgccgcgggagcccgcaagtacggccagcccctggccctcaaggacgaggtgaaggtggccgagatcctggccaatcctgatgccttcgccggcaagaaggtccgcgtgaagggcctcgtgacggaggtttgcgaggagcgcggctgctggatcaagatcggcgccgacaagaaggagatcctgttcaaggtcgaggatggggtcatcgccttccccatggccgccaagggcggcaccgtggtggccgagggcacggtgtccaagcgcgtcctctccgtcgagcagcagaaggccatgtgcgacaaggaagccaaggccctgagcaagcccgccgactacggcaagatcaccggccccaagaccatcgtgcgcatcgaaggcctcggcgccgaggtccagtaggccccaggtgactcccgaaccggcccgccgggcacggccctggcgccgctggaacgccgccacccaccgggatgtgggctacgtcaccgtggccctcaccgtggcctatgccatctccggcctggcggtgaaccacatcgccagctggaatcccaactacgccaaggtgaaagaggtccgccagatccagcccctgagccggacggaccccacggaggccctggtgcgggccgcccaggctcagctgcagcccgagggccgcttcaagagcgccttccagccggatgacgacacgctgaacctctactacgaacgggccagctatgcggtggacctgcccacggggaaggtgctggtggaggccgtgcggccccgccccgtcctcttcgccatgaaccagctgcacctcaacgctcccaagcgcctgtggacggtcatcgccgacctgtatgccctggccctcctcgtcctggccttcacgggcctgttcatcctcaagggccctaagggcttcctgggccggggcctgtggctgaccggggccggggccgcggtccctgtcgcctactggatctggtggcgcaccctggcctgaggcccgcgctcagagctgttcccagagcgcccgcgccttcccggcggcatcggcggtggccagcttcaccagcgtccgcaggttgtcgggcagctgcagggcggcctccagggcctggatgcggaagggcggcgccaggctgccccaggccgtcagcagcgccctgcaccaggactcgtccccgaggcaagcccgggccggccaccgccaggccgcccccatcccgggctcgtggagggccttgagcgccggctggatcaggccggtccggagggccagctccgccacagcctccgcggcctcgcgctgggcatagggatccggcagcaaggtgagcagcggccccagggccagctctccaccgaccttgcccagggcccgcgccagggcaaaacgggcgctcgccggggccgccgtgagggcctccgccagccaggggccgtcgccgtcccgcacggccgcgacgaggccatcggcggcagcgcgccggacgcccacctgccccgtggccaaggcatccaggtaggggccgagccgcgcgctgaagccctcatcccgccgcggccccgccaccgtggcggcttcccgctcctgggcggaaaaccccgggaggggctcctcgccccagcccgcggcctcggcgctctccagccaggtcgccagctccccgcccaaggtggccatgtccggcaggcgcctggcgggatcgggctggagcgcccgcagcaccagcccggcgaggcgagggggaaagccgggtcggcaggccgccggggcgatctgcacctgggcgtagggctgcccggtggtgaactcgtagagcaccgcacccagggcatagacatcgcagcggccatccacccgccggggatcgccatgctgttccggggccatgtagcccagagtgcccaccaccatctggctgcgggtggcgcgggtgaggccctcctccccttcccagaaacagacgccgaagtccgtcaccttgagctggcccgtggcggcgaagaggaggttcgacggcttgaggtcccggtgcaccacgcccgcggcgtgggccacgcccagggcgccgcagaccggaacgaggcggcggaccagggcggcgggcgcctcgccccggcaggccttgaggctgccgccgggcagcagctccatcaccaggtagggccagccgttgctcgtcccgaaggagtagatctccaccagggccgggtgcgagaggcgctccagcacctcgccctcgcgcaggaagcggcgcaccaaatccctgtcccggtgcacctccgggcgcagcagcttcacggcgcaggagagctcgggacggaagcggtcctcgccccggaacaccagggccatgcccccttcgcccaagggctccagcaggcgcacgctgccgatctgggcgggcggacgctgcccgttcatggcgcggcgacggcgcggttccggccccggtccttggcggcgtagagggccacatcggcccgcgccaggagggatcccccgcaggcatcctccagcttcagttccgccacacccaggctgcaggtcaccaggatcgcccggccatcctccagggtcaggggccgctcagcaagcgagcggcggaagtcctcggcggcactgagggccaggtccacggaggtctccggcagcaccgccaggaactcatcgccacccaggcggcccaccggatccgagctgcggagccgccgccgcagcagcccgccgaaggcctccagcgcctggtctcccgcccggtgaccgaaggtgtcgttgacctgcttgaaccggtccaggtccgccaggagcagcgacagcggtcgctggtggcggcgcgccagctccacgtgggactcgagctgctgcaggatggtggcccggttatggacgcccgtgaggggatccagcgtggtgcgggcgacgatgtcctggtggtagcgccgctccagggcatccatgtgcttgagcttgaaggcatggccgcccacccggaccacgtcttcagccaccagccgatggggagcggccgtgaccggcagccgtcggccgttgacgaagacaccattggtggaccccagatcccagaggctcaccgagacccggtccggcgagacctccagacgggcgtgccttcggctcacctggggctccagcaggcagagcccgttctcgggatcccggcccacctccaggcccagcgtcgacagcggaatggcttcccccatgggctgccccacgtagcggaccagcacccactggtgggcggcgggatcctcaaacagatccgattccacctgcgcggcggcagggtcccaaggaggcagctcggggggggtgggttcgaggggcatcgacgagagtctagcggagttccattcagtcctcgcagacgcgattccggccctgggccttggcgcgatagagggcggcatcggcccgggccagcaagtggcccgcctccaggtccgccaccgtccgctgggccacgcccatgctgcaggtgatgctcaggctcccggtgggcaggaggatgggtttcccggcgatggacttgcgcagacgctcggtcaggatgcgcgcgcccgccagatccgtctcgggcagcaccatgaggaactcctcgcccccgatgcgtccggccagatccgcctcccggagggccgcctgcagccgctctccgaaggcgcgcagcaccagatccccgccgccgtggccatggacatcattgacctgcttgaacaggtccaggtcgcagatgactaccgaaagggggcggctgtagcggaagctcaggccgaaccggttctggaactccgtcagggtgctgctgcggttggccagccctgtcagggcatcccgggtgctgaggtccagcagggtctcgtggaaggcgcgctccagcggatccagatacacgagcttgagcacgtgcccacccagggacagccggtcgccgacgccgagctgcacgaggcctctcaccaggtcaccgttgaccagggtgccattggtcgagcccagatcctcgagctggatcccagcctcggtcacctggaggcggacgtggtgccggctcacctcgccatccaccagcgccaccgtgcagtccgaggcgcgccccagcaggagctcacccctgggcagcggaaacacccggcccagcgccgcgccggcataggctacaaaagcccactccgctggcgccaggtggccttcgtccagcgtcttgggacggaccacggtctccatctccggcagaccggggagggtctcatccgctgaagaaaggggccctggggtgcctttgcgcttcacgagccctccacgaagcagcttagcaacgctccgtcgtccttgcgccgggccagaatgaagggttcccggggcgcccggaccgccgaggcctccaggcggatcaggatccggctctgccgggggtcgtggcgcaggtccgccacccctttgcgcgggatgcggaagagtccgagcacctccaggttccggacgttctccccggtgccgcgcaccagctgcaggctgtagcgcatccacaggcccttgggcagccgctggatgtcctcggcgcggatggggatgggcagtcccaggatggcctccaggccagcctgagcgctcacgttgccaagcctgggatccaggcgccgggtgcccggccgggccagcggctccgcgatgcggcgcgtgctggggcaggccggcggctccacccggcccagcgtccgggcctggagcgggagggggggcaccgcaacctgcgcggcgcgccccgcttccaggggcgtcatgcggaccacttcggccgcggccccccagctcgcccagcccgcctcggcctgcagcttcgcctcgaaggcgggcagcgccagggccggcaccccttcccggaagagccgggccccctggcccgtagcggccaggagctccaggccggacctgggatcgaccgcgagcagggctccgcgatggctcccggggtggaagtgctccgggaccacggtcacgacagggagcccggcaaaagtccgacgcagcgtctccgccgcgtccgccatggcgcccttcacccggctgaacatcaggagcccttcacgaccaggctctgcagcgccacagtgacccgctcgaggggctcggtcaggtccatgtggtagcccgcctccagcagcttggccatggcctgctcctgggcggcggcatccaccgaggccgcgaacatcacccgcaggggcgccgcgccctccgccagctgcagcaggatgtctcggggacccgcccggaaggtggtacccaccttcaccagcggagtctcctgggacttctgcaccgccagcaccgggcacttcgcgtccccggaccagccgcccgccagctccgtcgcgctgaggatgaacaggtccggcggcgtcttcagctccttcagcagcgtcttctggatgacctcctccttcaggtggggctccagcgacttgccgtagaggatgctctgcaggtgggtgggcgtgatgggctccgtgtagcggaagtcgagagggatgcccgaggtgtccgtgaccagcagcccccccaggtagctcgctccctctttgaccgccatgaaataagccagcttgattgattccgccatggatacacctctcccctgaaggctacctccccatcggcggtaccgccccttgccttttgtctggcacctggtacagtgaatcttccactcattggggagtggtctaatggtaggacaacggtttctggtaccgtcaggtgagggttcaaatccttcctccccaaccattcaaaaagcagtatgcagtaggcaatacggtcccatcgtatagcggttagtacaccgccctctcacggcgggaacaggggttcgattccccttgggactaccaaacaaaacccgcgcctagcgcgggttttctgctgcttggcgattaatttgtaaatatcatatataaggttagttgagtcctactgaaagcacttggggttgctcatccagatggggctacgaaacaagctgggcggaccaagcttcgccgaggcgctaaacggagccgagaaagccggaggatgagagagagcggaggacatgacaggcggggtccgagttgagcggagggttaggcaatccacagggcctggcatcggcgaacaggcagcggcccacagaaggtctacagggggcgctgggttgctatgaagaccctgatcccatggagggatgtgcgggggcgcgtcttcctcacagttgccaaacggattgtagctccgttcaaccttcagtaaaaaaagaggggcatcgttgccgatgccccaaaaacccttgaagggaggatgcccgtataaggggcagcgcctacggacacaaactagttgggtccttactgagactcaccaagcaagcgcccgctcaagtacacgagcgtatgattccatcaaccgtagttgactacaagggggtttttgtgccttttcctggtgaagtcggggttgtccttggattggatcttggaacggcctccgttgggtggtgtgcccttgaagcgggatgggaccctcagtcgaaggcttgggttcctcattccatccttggcatgggttcccgcatcttcgatccaggcaccagcggagacattgaacgcgggaaggatgaaagccgtggtgtagagcgtcggcaggctcgggggatgcgaagggggttggcccgacgcgccgggcggatgcacacactcttcctcgctctggttgctgggggactgctaccgataccaagtgacccgaagaagcctttggccactcgaatctttcagaccctcaaggacctagatggggatctgctggttgctgggggagatccagtccgcttgccttactcactccgtgccaaagccatctcaggcccactcgaccctttcgccctcggccgggccttttaccacttggggcagcgtaggggattcaagagcaaccggaaggcagcgcgcaaggaggcggatgaagagacagggatcgtccgtggaagcattgaggcacttcggcgccagatggctgaccagggggtgagcactctgggaactctgttcgccaagcacgatccagagaaccatgctgggacaggcccaaacaggatcaggggtcgttacacctcccgaaacatgattgaggcggagttcgagatcatctgggccgagcaagggaagcaccatccctgtttgctgaccccagaactgaaggagaggctccacagggccatcttcttccagagacccttgcagagcgccgaccacttgattggctggtgttcactggagcagggccgttgggtaaaggttaagaagacccatcgtcgcgatggtcgacccctagagaagggaagcctggtccccatctacaaggccccgcgaaggatggctttggcccatcccaaggcccagttgttccgcatcctacagaaggtcaatgacctgaaggtccagtggaacgacggaacggtgtccgaagcaacgccagagcaacggcagtggctcatcggtgaactcggtagaggggatgtgtcctttgcatccattaagtctcagtgggggatcggtcgccgggggaagctgaacctagccgaaggggctgccaaaggccttccggggaaccgcacggttgctcgcatcgataaggcagtcccagggctttggtcccgcctggatgcagatcatcaggaagccctagtcaaggcgctgcgccacgccgaagatccagatgcctttgcctctaccctccagatggactggagcctttccaaatcagaggcagccctcctcgctgacacggcactagaagatggttacctcgccatctctcgccaggcggtcgaaaagcttcttccgtggcttgaacaaggcaccccttactccacagccgttaagcaggtctatggcgcagagccgactccaactcccgtagacaagctccctcgggtcatcgaagccttccctgccctaagaaatccaatggtttccagaaccctgaccgaacttcggaaggtggttcatgcagtcattcgtgcgtgggggaaacccgttgccatccacatcgaactggctagggatctgaagaagagccgggatgttcgcgccgccatctccaagaagattgctgaccggaccaaggaccgtgagacagctcgcgaggccattcgccccttcaaggccgacccaaagggcagagacatcgagaaatacctcctgtggcaggaatgcggtggcccaatggcgctctgcccctacaccgggaagccaatcactcttaccgaggtcttccaggcaagcagtccatgggatgtcgaacacatcattcctttcagcaagtccctggatgattcattcgccaataagactctttgctgggcggaacacaaccggaatgtgaagagaaatctggccccaatggaggcatacacgcctggcgtcatggccgaaatccttgggcgaatcgagaactggaaggacggaccggggaagatcgtaaaacttcagcgattccgccagacggaactggacggggatttcatttcctctcagttgaatgacacagcccacgccagtcgactggcttgccaatacatgtccttgctatatggggggctctgggatcaagaaggccgaaggattcatgcctcaaagggccaggtgacatcaatgctccggggcctgtgggaactgaatcctctacttggtggtggagagaagaaccgtcaggaccaccggcaccatgccctggatgcactggtcatcgcggtgaccagccctgggaccctcaaagccctttcagacgcatccaagaacggttgggaggcaaggcgatcccgcttctccaccttcagcctcccctgggccgacttttccaaggacgcggctgccgctctggaaacagtcaccattagccgtcgggtccgcaggaagctacagggacgcatccacaaggagacgatctacggggtcgagggggcaagcctgatccagcggattcgcgtggaggaccttggtcccaaggatatagccaagatcgtggatgactcggttcgtggaagggtggaggcgcgactagccgaaatgaggcagaccgagcccaaaaaggcattcaaggaaccaaaggaccacccccacttgctctgtcgcgatggtcgccatatccccatccacaaggtccgaatcaaggtatccggaactgtcattcctgttggtcaggaccaccggcttcgccatgtggagtcagatgcgaatcaccatatgaccatccatgaagccctggatgccaaggggaggtccatttggaaggcggatgtggtttctctgttcgaggcccttcgaagacacgccgcaggagaagccgtgatcaggcgagaggatggattcgtcatgtcgcttcgttcaggggataccgtgcaatacgaagaagaaggtgttgtgaaggcggcatgggtcagaacagtaaaaaccaactgccaaatcggtctcgcttcccattcagatgcgaggctgaagcaggagcaggaaaaagtgggggcttatttccttgtggcaccatctagggccagagaattgagcctgagaaaaacccaaattgaccctattggactgtcccgaagctcccgtgactgatcgggtcttagagatcgccgagtcaccagcccgcatccacctggccctggagtcgttacagatcgaccaacctgggagggagcctgtccggattccgctggaggatctgggtgtgcttgtcctctcccacccccaggcacagatctcttctgctgcgcttcaagccattgccatggtgggaggtgccgtgctggtctgcgacacaaaacaccaaccagcaggccttctcctgcctcttcagggacacttcattcaggcagaacgaatggcccgccaggcaggtgcatccctcccactgaagaagcgtctctggcagcagatcgtcaaggcaaaggtgaaggcccaggcctccctgttgaagctagtaagaggcaaggatgaagggcttggaatcatggctaggcagatccggtctggggacgagggcaaccttgaggcacaagctgccagaaggtattggagggcgctcattggcgaccctgagttcaggcgcgaccgggaggctgatgatgccaaccgcttcctgaactacggctatgcagtgctcagggctcaggtagctcgaagcctttgcgcctgtgggctccacccggcattgggcctccagcatcacaataaatacagtaacttccctctggctgatgacctgatggaaccctaccgcccctttgtggatgccgtcgtggtccagttgcttaatagccacgaagccaaggcaaaaatgagccaggagatccggggtgaactgttgggcgtgcttcatactcggattagtatggaaaaggaaagcctccgcctgtctcatgccgtgttgaagagcgcccagagcctcgccgcagcactgacaggcaacaccaagaagttgatctttcccgacacatgaccgacctctctggataccgcgccatgtggttgctggccatgtttgacctgcccgtggagaccgccgaactgaaacggaactattccctgttcagaaaggctctcctcaaggatggcttcatgatgttgcaatactcggtgtatggccgattctgtgagagcgaggatgccgctgatgtccacaggaaacgggtcaggcgctgggtcccggaagaaggcgaggtccgagtgttggcccttacagaccgtcagttcgccaagatggaagtctttcgaggaaaacgccgtgtccaggtcgaagaagaacccccactactgcaactcatgtagtccgatcatcacactaagcctcccccttatatgcatttgggggaggatggagtgtacttgagcggacgctcttggtgggccacagcccgctctacgcaaatggtggcacgccgcctagtgtacttgagcggacgctcttggtgggccacagcggccaggtcgaggtcgaggaacttcccacaagtgtacttgagcggacgctcttggtgggccacagcaagcgggccgtgatggcccaggccgcgaaagtgtacttgagcggacgctcttggtgggccacagccttggtcttgatgatctcgatggcttcactagtgtacttgagcggacgctcttggtgggccacagccagcttgtggagcggctcaagaagaccttgagtgtacttgagcggacgctcttggtgggccacagcgcctcgataagtcctcgacggaaaaggggaagtgtacttgagcggacgctcttggtgggccacagccaatatttaccgagcctccaatctccatccagtgtacttgagcggacgctcttggtgggccacagccggcacttatcagcaatgaaaagcaatagaagtgtacttgagcggacgctcttggtgggccacagcagccgtaacatgccatccgcgggccctaggagtgtacttgagcggacgctcttggtgggccacagcccgcttgagcgcctggcgcagccagccctgagtgtacttgagcggacgctcttggtgggccacagcacgctgcacccgatcttcaaccacctgctcagtgtacttgagcggacgctcttggtgggccacagcgtcgatcacgaactcccagcgcacacgctcagtgtacttgagcggacgctcttggtgggccacagctaagttgtgtctttccatgcgccgttccctagtgtacttgagcggacgctcttggtgggccacagcgataagtcggcgctggatatgtccttgcggagtgtacttgagcggacgctcttggtgggccacagcacttctgcgccatatacgacagacctgtatagtgtacttgagcggacgctcttggtgggccacagctccatgtatcagcagatgacgggcatgagcagtgtacttgagcggacgctcttggtgggccacagccttgacgcagtagggccgcagctggcgacagtgtacttgagcggacgctcttggtgggccacagccttccgtcgctcggttaaccgctgtctgaaagtgtacttgagcggacgctcttggtgggccacagcaacaaactctctcgggtggtggcgcagaaagtgtacttgagcggacgctcttggtgggccacagccaccagggcgctcgggtccaccgcgaagcagtgtacttgagcggacgctcttggtgggccacagcttggcggtcagagggcacttcaccccctccagtgtacttgagcggacgctcttggtgggccacagcttcggggctgggcgggctccttgaacgggcaagggcactgctcccagtcccaaagcctcacagggaccccccgcccgtcgtcatcgatgcgccgcgcacctgtgcccagtgcggcggcatgatcctgcgcctgccgctgaccgcaatggcccggtccccgccgctggaggccgcatgcatataggccccccagcagaccattacccacgccattccttgcatcaaggcaggtcggcgaagctctgcctgcacggggacctggtggagtgcctggaccatcctgcccgccccagacccacgaacgggcctagcggacaagcagctcaggctcctcccgccgctatgccagacccgatttccccataacggtcagttcggccctcgccgctacgggcttgttcaacatcgcatttcgccggtgggcaccgccgcgcctacccacaccatcaacccggtcccgccaccgacgaaatgctcactgttttcgcccaagccaataaccaaaggcagcgctgcgcctgcccagccgttcgtcaggtccagtcgcagacgaaatgctgaatattctacgctactggtctacctattaataatggcggtgtcgcatcaccggcagaaaaaatccgcctaaatgtgttttatctgagagaaattagccatcaatctgtatataaagaaggagagaagatgtcacatcgagacgacagtaaattcaatagccataatggggacaaaaaaacccaagtaatttattttgctaaacctacaaaaaagcacgagtccacggacagacaaaatatctcgaacaagaagaaagtcctacggaattgaatctaattcaatctcgattacaaactggcaccaatcacctagtccattccatctgtatttacaacattatattaaaaaaagatatgactgatacttgactaatcacccaaataaccgacattatagcgtaccagatcattatccacggagttggcaatgaacgtgaaaaattcctatcttcatacaataaccatcttaatcaacaagcgtaatagctgtgatgaagctattttaaggctcctatatctggttattagtgatccagagatgcttagccttgaggccgaggaggaagcgattcctcatcctgctgctgatcgccctgttcctcgggccgttaaacgcagtcctgccctggttgaaacgcatcttcctgagccctcccatggccctgggttcaacgggatgatgctttggaaggccgctgagaagttgctgaagttggagggccacgccatgggcctaaccgatatggttgaagccctaagacgcggaggcttggaccataaatccaagaatctctactgcaaccttgccaacgccatgaaaggcaagccggataagttcaagtgcgtcagtaagtccgtcttcgatctcaactttgaggtagacagaacactcaatccatccagctaactagctgattaaagaatgcataacaccgcaccaaccccttaatcggggagagaggagaactatgcccaggcgagcaacaagatcacatcaagcaccatcggcagatatctctacggtactggccgagaaattccaggaaaccatgagaaggctgttcagaccttgcttcccccaggagagaacctacgcccggtttgccgagatcatgatttccatcctcgcaggggaggggccgaagacaattacctcgaccgtcttcctgcgctccaaggaccaaggcgactggtctaacgactacaaggtgttctcgacctcgccgtgggaacctgaagacctgttcaagagggtccttggggccacgattcaatttcttccaaatgagaatgagccaatcgttctagcaatagatgatacatgtcactggcgctggagcaagaaggttccgggaacggcttggcaccacgatgctcttggcccgaagttcttcggcaagggttcagggatgccgcctttaaagtggggacatcagatgcttcatgcagtcctgatgatccctccagtactaggttatgccccaactgcgattcccgtggcgtatgaaccaatcctgggcatacccaagaagaagaaaaagaaaacccaagcctccggagagccagtcaagcgaggccgaccaaagggattcaagccctcggaaaccctcgttccagactcatctatcgcccagattaaaaccccacccaaggcaaccgagcaggccctggcggtaatcaagagggtgaggagttggcttgatgattttggccttcaggagagagatctgatggttgtggtagacgccagttactgcaacgggaccgtgctccggaaccttcccaaaagaaccgaaatcataggccgcaccagggaagatgcctgtctctacgccccaattgcacaaaagcagggtaagcagatttatggcgacaggatccctacacccaaacaaatatcgcaagatacgaacattcctcatgaaaccagggtgttcaagtttggcggtgatcaataccagttccgatggaaggaagccaatccggtgctctggaaaaacggatccaagagccgtcccctgcggctactggtaactcttcccgttcctcatggacggcgttccaaccggggttatcgaaagtacggctacctactgacaactaaactggatggggattctggccctttgctccaagcttacctctggcggattgagatcgagaaccttcaccgaatcttcaagactacccttggaatgggacagacccagtgccttagctcaagtcccaagatcttcgcttccattgcggctacctgggctgtcttctccctagtcagccggagtgtgggtggagaggtccggggcgaccaacaacccgtcctctccaaatggcaagccaacaagaggaggtggcgggaggaaacccggctcagacaggggagacccatgccgaagtaccggcctaccgccatggacaacatcaccatgctgcgttctggcctgggatttcattggaagaacggggtcctgagaaaagcctaatcaagtgcaacatgagatagaaaaaaaggcttcccatgaattgtgggaagcctttttttctgtctattattgaatcaactcttgtatttgcagcaaaatatagcctaattaatcgccaagcagcagaaaacccgcgcctagcgcgggtttttagtttgggaggtccaaggggaatcgaagtcacagaattgccagctttcgtcttggcccggggagacagcccggggggctgtcggacctgggacagaaagctgagcaattcgtgcggccggagcgtcacctcggaggcgcagccgcagaggtgacgcgtagggattccccgctgcccaatctgccaagcccaaaggggggtcaacccctgttcccgctgtgagagggcgaagagagcgcacctgtgagatgccgaaccccgggggcaggtcagcacggcccggccggtctgacgcccattccttcaggttttgagcggccctccgatgagagacgaaggttgagtgaaagagtttgtatttaatttctttatcgtttttttctatttggactttcgaaatccatgcgtctcatgtgattcctcaagggaccaagaatgcttcctgattttgcagacctgcccgacggcattgtcttttcggacatgcagggcctggtccagggcttctcgccgacagccatgaccatgttccgctatgccacggaccgggagcagacgggtcgcccgatcacggattttctggtgccggaagaccgagcgcaggctgcaggccacttttcgaagcgcctgatcggggaggagccggggctgaaacactaccgggggctgcgcgcggatggcagcaccttccccatggaggtgaacgggcagaccatcctcggcgcagatggtcaacccaaagaagtcctgttcatcatccgggacctctccggacgccgggggatggagcggaagctggagaagacctcccagctcctccagaccgcgttcagggtggctggcatggggcagatcatcaccaacctccaggacccgacctggccctgggcgtgctcgcccgggatcgacgagatgctcggcattgatctcgacttcgagaagaacttggagggcatggccaccctccttcatcctgaggaccgggaccgggtgttggcccagctgaaggagtccgtgcagaagcaccagcccttctctgagcaggcccggatcatccggccggctgatggggagctgcgctggatcgcggcctgggcggacacgcaacacgaccaggacggcaagcccctccagcacatcgggatcctccaggacatcaccaccagcaagcaggctgagctggcaatcgcagagagcgaagcccacttccgaacctggttcaggctgccgctggtgggaatcgccatcagctcaccaaccaaaggctggctggaggtgaacgaccacctgtgcgccatgctgggctaccgccccgaggagctgcgaagcatgacctgggctgagatcacccaccccgaggatctggcctcagatgagacgcacttcgagcgagtgctccagggaaagctggagggttattccctggaaaaacgcttcgtccgcaaggatggcagcatcctgccttccgagctctcgacacgaagcgtccggaggcctgatgggcaggtcgactacatggtgaccctggtccaggacatctcggagcgcaggaaggccgtggaggcgctgcgggcctcggaggccatgtatcgggagcttctggagcgtcaaggagaaggctttggcgttctggatgagcaggaacggtttgtcctgaccaatccagtggccgaggagatcttcggcgcggctcaggggtccctggtcgggcggtccttgatggacttcctctcgaaggatcagcaggaacggattcggcagcagaccctgctgcgtgcccaaggcactcacagcacctatgagctgcagatccggcgcgaagatggcaccctgcggtccttgctgatcaccgccacgccagcggcccaccaggagggcaaggctctgcaggtcatcggagtgttccgcgacatcaccgatcagaaacatacggagaatgcccttctggaggcccaccagcatctggagtcccttgtcgccgccataccgggcgtggtctaccagttcctcgtgacccccgctcacgaatggaaattcttgtatgtcagcgagggcatccaggacctctacggtgtctctcctgaggcagctctgcacgatcagaacgccttgtcggagcgcatccatcccgaggatcgagaggcccatcggcaggccgtcctggaagcggcccgggacttcaagttctgggcgcatgaacaccgcatcctcaccccgaacggacagctgaaatgggtccggggctacgctcagccagtccgccagcaggatggaggggtgctgtggaatggcgtgctgctggactggacagaccgcaagctggccgaagaagagaagctccacctccagcaccagctgcagcaggcccagaagatggagagcctgggcagcctggccgggggggtggcgcacgacatgaacaacgtactgggcgccatcctcggcttggcctcagcccacatcggcagccaaccctacggcagccccctccacaaggccctcgataccatctgcaaggccaccgaacggggcggcaagatggtcaagagcctgctgagcttcgcccggcaggccccggcggaggaatccagactagacttgaatgccattctcagcgagcaggtcaccctgctggaacggacgaccctctccaaggttcgcctgcagctgaatctggaagcagacctccgtcccatcctgggtgatgccagcgccctggcccatgccttcatgaacctctgcgtgaatgcagtggatgccatgcccgacaagggcaccctcaccctgcacacccgcaacgtcgatcacgactgggtcgaggtggtggtggaggacaacgggataggcatgcccaaggtggtcctggagaaagccatggaccccttcttcaccaccaaggaggtcggcaagggcacggggttgggcctctccatggtcttcagcaccgtgacggcccaccgggggcagatcgagcttcagagtgagccagggcagggcacccgcgtgctgcttcgcttccccgcctgcgagcaggaaccgcaactccaggcagcggaacccgaggttgcccagcaggcgatggcgccccagggagcgctgaaggtgctgctggtggatgacgacgacctcatcctgagtgccgttcagatgattctggaagtcatgggccaccgggtgcacctcgccccgagcggcgaggaggctctgggcctgctcgaagcagggctggcgccagacctcgtcatcctggacatgaacatgcctgggctgggcggggcggggaccctgccccggctgcgtgcgttgtgcccaaaggtgcccgtcctgctctcgacggggcgagccgatcggaccgcactgaccctcgcctcggcgcatcctggcgtcaccttgatgtccaagcctttcggcctgagggagctccaggcccacctcgagagcattgggctggggtgaacgcctgtcgccattccctggcagatggggacccaggccgggaccccactcgtcagaagcctacttcaccccatccatccagataatcagcttcagaaggagggcggaggacagcaccacggcgaccaggtagaggccgatcaagaaccggtttgaggtagtcacgttcgccgccatggggttctccttggggtcggggttgttgtgtttgacaattcttgtgatgcaccatactacgagccccgtgacgcgacctagctaattccaactaggaatcagaacttttctgcccggtagggatgcccgagtctcaggcttttggcctccgtagccaagggcctcgtctccaggctcaggccacgggcaggatcaactccgggctgtcgttgcgcacattccccacagcggcgcccaccgggtgggcacgcaagagttcgctgggacagggcaccagcaggcgctggaggtcccgggtctgggctgcgggatccagccagtcaccccaggcggccttcggcaggatcaccggcatccggttgtggatgtcagccatgagtccgttgggctcggtggtgatgatacaggtgcttaccatcacttcgccgtccggcccctgccagtcctccaggaggccggcaaaggcaaacagctctccttcactagggtggat

SEQ ID NO: 271 - DNA, 16590 bp, synthetic construct
  source 1..16590: mol_type = other DNA
  misc_feature 1..16590: note = Synthetic
agacttaaattcaattaatggaatagtacaaaaacatcttgtttataacttcaaagaagcagaccttcttagagtatcaaagacagtgttaactgaaaaagatggccataaaccaaccaaattattagcagaagccaaaaatgaaattgataattatttctccggaagtcacaaagcaactacagaatttgcttctctcagcaaaacattggcagaaaatcattacataattaaaggatatccagacaaacaaatatttacagagtggggagaagtaaacaaagggagaacggaactaaatatttcagctatcgagggcgagtaccaagaactgaaagaaataaatattgtaatagacgtctctgagcacagagatgaaatcctaaaagaggtgttgaaattttttgacgagaaaatttctaaaaacgcgggtgtctcacaatttgattttcagccaactcaaaaaaactggataataggacctatccaatggagccaggaagataatgtcacctacttaaaaatgcttaccccaaatccatttgtccccattcacatcgcagaactagtttcagtaatacggcaggctttggcatctgaaggagcggtgtctccaagggttgatgccaaaccagtggacatggaaaatagcggcaaaaaagtgataataactgtgcctgaacaacaatttgaacagttgcggaggatagtgatccaaggtgcagaaaacactcgagcagaatttattcgaggtattatgcgccccccagacagtcaaaccactgaccaagagcgaatgtggtttggtagacctcttgttctttcccgaattactgctaccagggctgaattaggtagctttggcatctttcgaagtgtagatgtagtgacactaagagaagctctggatggctcagatcccagtcgctggcaaccaggcgacatgatgttcaggctgtctgaaaggccagtgtggaactttagtaattcatttagctacgacagatccgttggctaccaatttggtcttggagcacaaaagataaatatgttggggaaagcccgaacaatggatttcaacatcagggcgggtgacggcaccatcaacagctcaaccctgagacggattttttctacaggtgatccaagccgttctttagatacatacagcatgggatatactgacccttggcttccaacgggaatagttggaaaaagactaggaaacagagcactatggaggggcgaagtcgcctttatcaaagaacgtcaaaacgtctacctaatctttcaccgaagatatacaacgagtctggaatggcatttgagagataaaaaaaatgatcaccgaacattcaggtttggatacagatttgaaaatgttggagttaatgggccggatgccagcgagatgcaggatcaagtaaggtcgcctaatcgttcaatattatcaatcccatttattcaattcgttagagacaccagagataacccattcgatccaaggcggggtagcatagctgtcattcaatttgatgttgctctacaaactcttggcacgagtgcaaatagcagttttattaaagcagacctaagatacgcttggaactatccaattgggctaggtgccaagtacggtgtattaagtttggctaccaggctgggggccgcccgtccgacagcgagttcatcgctagagatgccactttcagaacgtttttttggaggggggccaaattctcatcgtggaattgaaccggatcaactaggacccttcagtgcaatttttgaaagagaaaagacctttccctacaacccaataaccgatgatgagggtagccaaagatatcgcatggctcctattggaggacagggtattgccatagttaatctggactacagatttcctttaccggtaattggtgagtggatatggggagaattgtttgttgattcgggcgaggtatacaacagaattagagaagtatctcaatccagttcatttctttcaccattcccacactggagaacctcagcaggcactggtttgattctccgattaggtggatttccgataaaaatggaatacgcttgggatgtcaggcaagtgcttggcaaaactgatggagatatatataccaattatacaaagaggactagattaacaaacttccttgtttcggctgggatacagttctagggcacaagacaatagttgtttatgggtatctccgtatcatcgatgtttctgaagcagagtcctctctagctaactttgtccacctacctcctgcgaccccaagaggcgaatacttaagcgtaacgccaaaatttacatccttaaatttatctccaaggccaacataaacgccagggctccaagcactcctgccaaatattactccagggtggacattcagcctaactgcaagattatctgtcccattaaacactaaggaagcaagtaagctgtcatttctgtcccaaaaaataccccccgaaagccttatttcttcaggcttggcctgtagcatagctccgcccaagccccaagaaatactatcagttgagcttgctttgtgtgaaaatccaaacaggtttgtcattccaaaaaacacaaacggcctaatgccctcagttctaaacaagttggggcgaactataaaattttctccgacatttacaatccttcccttacgcccactttcccgctcccaatcaaaggcatacataggctggtagccccatgattgaagccgaagtgtatctgcggcaaagcgcgcaaaagggtcccaagcgtagagaaggatgcctgctggcctaaacaaatacacatcagcgatttcgtcatcatgccaggtggattttttttctacaacctcctgaaacagttctgcggcagaaataattaaaaaagaagtcagtctaggcatagggaaattatggctttcaaaccactcagcgttttttcgccaagtcatgccaccgcctaataaatgaagcgtatagtttggaatccagtccttttcggtaaagcggtacgggaaaatctgacggttgataaaccgagaccagccgccctccatttcgattgccgctctggggtgccccaaattccatctaacttctctccaacgcgaagctaaatcctcgtcatcaaagctcttcggcacctgtagtgtgtccagagtgtaattgagaaacgaatagagcgggttaaactgggattcagatccataggtttgacccttataaaaaaatggctgtgtttgggcacctagggaggcactcaacagggaacaaataactattagtgggagtttactcattggtaataaagatgtgagtggatagcaaaacgaaccagattatcgaaaatatatgcgcaacggggcgaggtgcaaaaacacagaatttaattatattccaattgagctggtttcaaaaccttcattgaattttaatgtttcgaggcaattgatccaagcagaaccgggcactccatggcttttggaaattgctacaactggtatagaatattcagaatcaaggaggtactcacatgtcattttcaattaagtattccagtatggctattgcaattttgctggctggcattccttgtttttcgcagagcaaaagggcggttgcaattgaagacctctaccgtttgaaaggcctatcggggttatccctaagccctgatggcacaaaaatgctcctccaagtatcgactcaggacctcaaggcatcaaaacggagtgtgaatatctggttggtaaacacagtcaatggtgaatgtaggcagataacccattcggacagatccaatttttcgccattttggtcgagcgatggaaaaacaatgtactttagttctaaccgagaagcagggttacaactgtggtctatagacctaagtggtggggaagcaaaacgacttacatcttttgcaccaggaattggatcgcccgtgcttctgccctctggcaaccaagctatatttacagcttcggttttcccagaggctggagcggacggtgctaaaaactcagaatatcttaataaattatctagcggtccggtgcaggctcacttggcagacgggctactagagcgacattgggattcatggcgtgattttcaatatacccacatgttccgcgtcacctttggtggaggcgtagaagcactcacatccggaaagatggactaccccgcctatgggcaaacttttagcgtcagtcctgatggtaaggaaatatgtgtcgtcaccaacgcagattccgtaactgctacatcgacaaatcaggatctctttttggttaatgtagacggcgaccgcaaaccacgccagattaccagcaacaaagcctttgatggcgatccaatctatagccctgatgggaagtggatagcgtacaggcttcaaaagcgcccaggagcagagagcgataggtttaggcttgcggttattaatcgacaaacgatggtggaaaaaatcctgacagagtcgatagataactgggtggaaaatccaaagtgggcatctgattccaagtcaatattttttaccgtgcatgaaaaaggacgcacaccactgtgcaatgtagatgtagccagcgggagaatatcacggataattgaagggaagacaatcagagaatatcaagtcagtcccgaccaaacgacaatctactacacatccactaccgttggtgagccagttgaactctattcgttcagcacaacatcaaaggcaatcaagcaggtgacaagttttaattctgcactgacaaatgaagttgactttaggccagcagaagaaatatgggtaaggggtgccgcaggcaaggacatacatgtatttatagtcaaaccccacggatttgattccagcaaaaaatatccattgataatgaatgttcacggcggcccccaaatgcagtggacagatagctttaggggcgactggcaggtttatccaggtgcaggttatgtagtagcttttccaaatccgcatggatcaactggatatggccaggcgtttacagacgctattagcggtgattggaatggaaaagtaatgacagatattattagcgtggcaaaccatttgtccaaattgtcgtatgttgatgaagagcgaatgggagcaatgggctggagttggggcggctatgcgatgatgtggctagaaggccagaaaactcccttcaaagcacttgcggcgatgatgggcgtttacgatctgaggtcaatgcacggaacgacagaagaactttggtttccacaagaagatattcctggtacaccatggaataatccaaaagtttacgaggaaagaagcccatcaagtaatgtcaaaaactacaaaactccatgcctggttatcacaggtgagcgcgactaccgcgtgccatatacccagagtctccagttttttaccgaccttcagttgatgaatgtacctagtcgcctgattctgttcaaaaatgatggtcattggccagatgatcttaaatcaatgccagtttactacaactcgcatctggagtggtttcatcagtggctaggaggcggaaaggctccatggaaaactgaggacatgataaaaaaccaagcctattgatgtagcttaaaagcaattaccatcttgattagctttattccagaaggccaacaatgctgacggacggaaatattctgcttcgaccatacagtctgggcgacagagaggccttggtagaactggccaataattttaatgtcagcaaatatctccaaaaccgctttccatatccctatactcttgattcggcagacagttggatagcaatggtcgggatggatttagagccacacaattttgccattgagtggcaaggcaaattcattggaggcatcggtttgaacccacttgcagacatccactaccaaacagcagaaattggatattggctgggggaacctttttggggaaagggattggctaccattgctactggtatttttatttgccatgtattttcgaacctaaaatttttgcgcctacaggcgatgacgatagaggaaaacaaaccttcggctaggatattagaaaaaaatggctttattttggagggcaagctcaacaagcacgttaccaaatatgggcgcgtatataacgccttactgtacgcaaaaacaagggataatggcatgtaggttgttgtcacgtttcgtagcaactctcgctgactaatggcataaatactgctattctaattgcatgactattctatttcgtttccttatcgcctcatcaatatttctgcaggctaataccctcgtagcgcagaaaaatcccaacataaaggttggtctcagcctcactgcaattgagcatgttataagtctagaaggcgggggggcagtctgtaacaaggctggaaagacgcttatccaacttcgcagtggtgaacgacttagaatatggctggatacaaggggaaacattacttccacagatgaatatcgcatccagataggcccaccgctaattaagcaggaggcagacggactggttcagaaaatcaaaaggctgggggaatcaccagagtgtttacggtggccagatggagatacatggcgtgtgttattgggttcattccctacagtagaggatgcagacgtattattgcaaaagctcatagatgctggcttttacgagctgtgggttacatccgaaaaaaaagcactaaacgcaaaaaatagcagaggcgggctgtatggaatcacagaaaaatatgagcgaatagccctaccatctgatggagtgatgctaaagcccaatcagggaatatcaacaatagagggcaagggaggctacagaggcaggatagatatatatcccaatgcacaaaatcgcttgagcctaataaatactctggatatggaatcctatctacggggcgtggtgcctaaagaaatgggggcttgggcttttccttctattgaagctctcaaagcccaggcagtagcggcaaggacttatgcctatgcaaatctaggaaaacgctcaaaggacggctttgacttgctggatacgccattagatcaggtatatggtggcaaggatggcgaacagagcctcaccgaccgcgcagtggaagaaactaggggacttattgccacgctgaatgggagaccaatccaagcactctttatggccacaggaggcggtgcaacagttgacaatacatacgtctttgggggggctttctcatatctaaaaggcgtatcaaattatcctgacaagcccaaaacactatcctataaaggcatttcggctcctgcagacgaccagtcatggctatcttgggaaatcgcccgaatgctggcagaaggactactaacagcaaacagcttggaaccaggcaggatgtcagccagctacaaggccgaagactttcggcaatttttgacattccttacaaaaagatttaagctacctgcccccaactccccgcctacagatggtattcagatatatatttggatggcaaagattcttcagttcgacagagtaataagtggtattgagcggccactagatgcaacctactttcttcaaaacgcaacagtgccggcgcaagatcaaatcttggcaggctttttaacaaggcggggtattatcacccccatgcagtggagagctgtcaaagtatctaccttagatgccttgcaagcattgggcagaatgtggcatgagctagagccattcgacccccaggaaggcacgttgttattggatggccaggtgaggccacagaggatggggccaactccgttaaagttgggaacgccattactaatactggaggaatatccaggtgggtttttacgcatggtaagccaagtagatgtgcaggttggagacagagtgaaatggattaaccaagatggaggctctcggctttttgtgaggcgactagaccctgatggtgcgagctacgaccgctacaacgtaactgcccattggaaggtagaaatgaccgaagccgaagtgctagcttcgttgcgctcaagaacagccgtgcgaagcctgcgaaccatcgagctaaagcacaatgaaaatgggagagtggtagaaatgatagtcagggatcgggataacaagtctcatcggtttacaggtatgaggattaggggtgcgctaaatctgagggacaacgtattcaggtatataaccacgggcgaggctccaaatcgcaagtttattttttatggacgaggttgggggcatggggtaggcatggatcagaccggggcctacggcatggcactggagggctatacctttgatcaaatcctaaagcattactacaaaggtatatcaatacaagcaattcaaaattgagttcaccagcaaaccttttttttccttttgccaaaactatagctttgcccatctatcgcctatccaacacactcatttttcctgaccctcgggaatcagatacaaatggtctacttgccatcggcggagacctgtgcattgagcgactgttgcttgcatattcccaaggactctttccttggtttggccatagcgaccctatcatgtggtggtcaccaatagaaagggctttattattgccgggggaggtgcatttttcaaagagaaccttgcgagcgataaatcgaattccctttcaagtaactatggatacagaatttgagcaaataatgtttcagtgttcagaagtccctcgaaaaggccagagtggaacttggataacaaagagcatgatcagtgcttataaagaccttcatcgggcaggttatgcacattctgtggaagtatggcttgataaagagcttgtaggcggcctctacggggtttcgcttggcgcggcattttttggcgagagcatgtttagcttggtggactatgcttccagagccgcgctaaatgcactttgtagtcaagtttggaaatggggttttcactttatagatggacaattcccaaacgaaaacctagacgcacttggcgcagtcacagtgccacgcgatacatttttagacaagctggctattgccctgaaattgccgacggttcggggaaaatgggattttaggtgatagaaataacctcagccaaaaatcaaaacactggaatgtaacactccaacaggtcatcatagagctatgtctcacaaattcaccatactaggtcgggggagggcagggcgagccttggcagatgcccttgggggtattgtccagctagaatcccatgaggcagagcccgaaggcttggtattgctggccattccggatagggcaataaaaaaatacgcaaaaaaatttgctggccggtgcgctcatctaagtggttccctgcatattgatgacattccatcgttgcatccactgaccagttttgatggggtggctaatgactggcatggcatctccctggcagtcactggggagccaccaaaaccgatacttactgcttttatttcgctgggctttgttccctttgagctattacccaacctaaagcccctctaccatgcatgcgctgtaatggcttcaggccatgtggcgacactatggatggcggcggaggaaattcttgcatcaaacggtataatacttcaaggcaagggcatcatgggtttggcagaatcaacactcaacgcttttaagcagaatggcaaaaacggaataacaggcccctttgtcaggggagaccaagagaccatccagcgcgacatagccgccttgccagaaaaatggaggagtttgtttgaagggttggggggaatggccacaacaaataaaaaaggctccgatgaaggagcctaaaagaccgttaaggtaagggtgcccgtatgaggggcagagcctacagacgcaaaaaattgagcccttactgtgacacacaaaaagcgcctgcccaagtacaatagaagtactatatcattgaaataagttggagtgcaagatggaaaatgaaaaacattatcctggagaggtagcctatagggttggccttgacttaggaagtgcctctattggctggagtgttgttcaatttgcctgggatggcgaagattggcaaccaaacggaatcgaagggcttggggttcgcatttttactgctgggaccgaaggcaatgtcgaaaaagggcaggacgaaagccgggcagtggcaagaaggatggcaaggggggcaaggcgcaccctcgcacggcgcgctggcagaatgcacgacttatttcttgccttggtaaagtccggactacttccgatgcctgtcgacctcaacaaaggtgcattggctccaataattgaccaaacaatcaaagatttagacagagaattggttcagcagggtggcgattcggcgttgcttccatattatttgcgcacaaaggcacttgatcatcaattatcaccacacgaattggggcgtgctctctatcacctaggccagagaaggggcttcaaaagtaacaagagggcagacgcaaaaacagccagcgacgagcgtggaaaagtaaaggatggcatcaaacaggaacaactggccatggaaggggcaaatgtccggactaggggcgagctgttgagccgtgaaaacccagaaacaaagcgcatccggggcaggtatcacgcaagggacatggtagagcatgaatttaatgcaatatggactgcccaaaaggcataccatcaagacctattgactgaagagttaagggaagtaatacatgaatgtattttttaccagcgtccattaaaacccgtagaccatctggttggctattgtagccttgaacctggccggtggatacaggtaaagcgaaacaagcggcgggatggcagaatgctggacacacctagaaccgtgtcaatttttaaggctccgcgtcgccttgcattggcagacccgttggcgcaacgcattcggctactccagagattaaatgacctaaagatcgaccatgcagatggtaaaactagtagcttgaatagcgaacagagaaccctccttttggaaaacttacaaaacggagatatatcttttaaggaaattcgcaaattgctgggcttagcaaagcaggaaaagctaaacctcgaaaatgtttcaaaaaatatgattggtgacaggacagcagaaaaaatgagggctgttctgggcactagatgggattcatttactgatatagaaaaaaccaaattggtatacctagtgctaaaggccataaatatcagcgagttagtgacaacgctagaaacccaatggaatatgaaaccggaaatagcaacgagtgtagcagatgtcgacctagaagacggttacttaaatttcagccgcaccgcctgcgaaaaattaagaccggggcttgaagcagggatgagccttaacacaatacgagaagaaatttacggggcttcaaaacccaaagatgcaatagatgagctaccaatagttgctgaggcctttcccgacctaaaaaatccagttgtcagtcgcgttttgacagagttacgaaaagttgtaaaagcaatcatcaaagagtggggactgccccaatcatttacactcgaattgacgcgagacctcaaaaagagtcgtgaagcccgcaaggaaataacaaagaatatcggtgagcgcacaaaagaaagagaaaaagcaaggaaagcgttgattgatgcaggtctggtagtaaatccaaaagccagagacatagaaaaatacctactttgggcagagtgtggaggccccaaggccgtatgtccatacactgggcgaccaattacgctgagtgagttgtttgcaggtgccagcccttgggatatagagcacataatcccatacagccgatccctggatgactcctttgccaacaaaacactgtgctgggcagagtttaaccgcaccattaagcacaacaaattgccaatggagttaggctcggagatgatggaaggttttattgcccgtatcaaacagtggccgagtgcttctaaagaagtaaagctaaggcggtttagaaaaacagagatagacggcgactttataacctcccagctaaacgacacggcctatgcaacccgattggcaggtgactttctggcaatgctatatggtgggcggtacgacagcgaacagatgcggatcaaggcaaccaaggggcaagcgacagcaaagctacgtggccaatggggtatgaataaactacttggaggccacgaaaaaaatcgtggcgaccataggcaccatgcggtagacgcgctggtaatagccctttctacacccagtgccctcaaaaggcttgccaatgcttcaaaaaattcttatgacatttatcgcctaacctttgatgacatccccatgccttggcctaatttctttgtagatgctggccaagccctggaaaacattgtcattagtaggcaattaaagggcaagctatctggtaggctacacgaagaaacaaattatgggctggataaaaacgatgaggcgattaaaacagcacgggtcggagttgaatcactgaccaaaaaagacctcgaaaagcaatacgaaaaagatggggttggagttgtcaatccagtgatacacagccgtattttggcacagcttgaatccttgggtgtggacgacccggcaaaggctttcaaagaccccaataaccatccattttttgtaacaaaggatggtaggcaaatacccatccataaggtcaaactggccttcaaagccacaacaatgccagttggccaaaaatatcgcacaaggcatgttatttcagattcaaatcatcacatggcagtttatgaaactgtggatgccaagggcaacactaagtggacgtatgaaattgtatcgctattagaggcgacccgcagacatgccaggggcgagcctgtagtaaacaaaaaacccggctttgtaatgacactgcgggcgggcgatactatcatgtatgaaaaagaagggaaattaataaatgcttgggtcaggtcagttgcggcagatggtgaggtcggtttggccgtgcatactgacgcgcgtgagaaaactgagcagatcaaagataagacttttttaaggttcaagataaatcctttaggcaagatgaatttgagaaaaacccagattgacccactgggaaatctccggatatgtcgtgactgatagggtgttggagatatcagaaactccggctaagctacagttgcacctggactgcctgcgcgtagaagtccaagatagggagccttttcgcatacctatggaagaagttggcctgctactccttgcaaacccacaaattcaaatcagctctgcggcactacaggcactggccagggctggtagctcagttttgatatgcgatgataagcacttgcctatagcagaattactgccccttcaaaaccacaacctgcactccgaaaggctacgaaaacaaatagccgccaaagagcctctaaaaaaaaggctgtggcaacagatagttcaggcaaagcttgggtcgcaggggctattattaaagcgtttgaggggagcagaccatggcctgatagccatggttcgtctagtgcgtagtggagatacagacaactatgagggccaaggggcgcgcaggtactgggcgcatctatttagtgacgcaaattttgtacgagacagggatgcccccgatcaaaaccgatacctaaactatggctatgctgtactccgcgcccaagtggcaagggcaatctgtagcactggtctcaatccagccctagggttacaccaccacaaccgctatgatatttttcccctagcagatgatttaatcgagccattcagggcctttgtagacgataacgttgttgggatagtcaataaatatggctcttctgccgaattgtcaccagaaatccgtagaaccttgatagaggtgttgcatcagcgagtaatctatgagggcgaatcgcttcagttgtccaaggtgatatttaagtgcgcccagcgactatgtagccttttgttgggcgaaaagactggcagattggttttccctgagccatgacggacatatcggggtaccgtgcggtgtggctacttgtaatgtttgatctgccggtagacgacgcagatgcgcgcaaacgctataccaagtttcgcacagaactcctcaaggacgggttcttgatgctccaattttctgtttatggtaggttttgcccctcagaagaggcatcagatgttcaccgcaaaaaagtgcgacgggcagttcccgaatttggtgaggtgcgaataatccacgtaacagatcgccaatttgcaaagatggaagtactgagaggaaaacggcccgcgccccccgaagaagcccctccattgctccttttgatgtgactcaaaaaggcgacatccccactcaaatcaagcatttgagtggggatgtattgtacttgagcaggcgcttgctgtaaaccacagccagcacgttgaacggtgtgcttgcggcattattgtacttgagcaggcgcttgctgtaaaccacagcgggttattcgatgggcggtcgatgctacttattgtacttgagcaggcgcttgctgtaaaccacagcattcctaaatacccttcgccgcgaggccaaattgtacttgagcaggcgcttgctgtaaaccacagcccaatcgctggccaaagtctttgagggaactattgtacttgagcaggcgcttgctgtaaaccacagcgtggcctctgttttcctttggggtaggtttattgtacttgagcaggcgcttgctgtaaaccacagcactacatcatagtcgtcgttcatatcttgattgtacttgagcaggcgcttgctgtaaaccacagctaatatttccagtcgcattcaatatctctgattgtacttgagcaggcgcttgctgtaaaccacagccccactgtccggcggctatgaagtcagttattgtacttgagcaggcgcttgctgtaaaccacagcgggtagctctcaaggtagcatggcaagccgattgtacttgagcaggcgcttgctgtaaaccacagccaaggctatggcagaaaaaatagaggccgcattgtacttgagcaggcgcttgctgtaaaccacagcctcagtatccttgccgagtctagagggataattgtacttgagcaggcgcttgctgtaaaccacagcaggttgcgctcttcgctagtggttaggcctattgtacttgagcaggcgcttgctgtaaaccacagcgaatgaggtgccggaatgatactagccataattgtacttgagcaggcgcttgctgtaaaccacagctaaatggccagcaggtaacactgacaatacattgtacttgagcaggcgcttgctgtaaaccacagcatacgatgcaacccattgcataaccagataattgtacttgagcaggcgcttgctgtaaaccacagctccacttgccccgatctcaattctgagacattgtacttgagcaggcgcttgctgtaaaccacagcatgctcgccagccgctactagggcaagtagattgtacttgagcaggcgcttgctgtaaaccacagccggcttggcgaatagtggcgcatattggatattgtacttgagcaggcgcttgctgtaaaccacagcgcttgctacatcctgagttgtttttgattcattgtacttgagcaggcgcttgctgtaaaccacagcatattgagattaactcccgtgccctctttgattgtacttgagcaggcgcttgctgtaaaccacagctgaaaccactgaggacatgttcgagatagcattgtacttgagcaggcgcttgctgtaaaccacagctccattctgatacccttgcgcccgtgagtaattgtacttgagcaggcgcttgctgtaaaccacagcgcgatctggacaatctcggtactttttttttattgtacttgagcaggcgcttgctgtaaaccacagccgacagggttcaacatagctgaaaaaatggattgtacttgagcaggcgcttgctgtaaaccacagctatagtgccagacgaaactggagcgtatcgattgtacttgagcaggcgcttgctgtaaaccacagccaatcgctaccccacagatggtagaagataattgtacttgagcaggcgcttgctgtaaaccacagcaactcaagtctgaacttgctgcactaggtaattgtacttgagcaggcgcttgctgtaaaccacagcgaagcccgtgcaatgctctccaaggcgatgattgtacttgagcaggcgcttgctgtaaaccacagcaaggcttctattgcctgttcaaaatctctgattgtacttgagcaggcgcttgctgtaaaccacagcttttaatagctcttgccggtgaactatgaattgtacttgagcaggcgcttgctttaaaccacagcttttaatagctcttgccggtgaactatgaattgtacttgagcaggcgcttgctgtaaaccacagcttttaatagctcttgccggtgaactatgaattgtacttga

SEQ ID NO: 272 - DNA, 23033 bp, synthetic construct
  source 1..23033: mol_type = other DNA
  misc_feature 1..23033: note = Synthetic
tcggcgtgcgcgagttcctccagttcaaggagcgactggtcgaaccccgcgaggaagaggatcagtgggcccttgaactcgacctgtcccccttcgaacgcggatttccccgcatgaaggaagtctcgtcgatcgggcacggcgtggagtttctcaaccgccagctctccttcagcctgttcaaggaacaccgcgaacggctgctcgatttcctgaagcttcaccagtacagcggcgttcagctcatgctcaaccagcaggtctcttcgctggagcagctccagaaggccgtccggcagacccgccgtttccttaaatgggagcacgacgatgccgagtgggctgattttgtcgaccggcttccggtgaaagtctttgaacccggctggggccgtacggcgaagcaggtccacgagatgatgggactgctgctcgaaatcctcgaatcgccggcgccggacacgctggcggagtttctcagccgggtgccgatggtctcgcgcctcgcgatcctcagcccccacggctatttcggccagtccggcgtactggggctgcccgatacgggcgggcaggtggtgtatattctggaccaggtgcgcgcgctcgaaaaacagatgcgccacgatctccatgagcaggggctggacgtggaaccccgcattctcgtgatcacgcgcctcatccctgaggccggcgataccacctgcgatcagcggctcgagccgatcatcgggaccgagaacgcggcgatcctccgcgtcccgttccggacttcgaacggggagatcgtgcaggagtggatctcgcggttcgatatctggccgtacctcgagcggttcgccaccgacgccgggcgcgaaatggcttcggagttcggcgggaaaccggacctgatcatcggcaactactccgacggaaacctggtcgcctcactcctgagccggcggctgggcgttacccagtgcaacatcgcccacgcgctggagaagacgaaatacctctattccgcgctccactggcgcgaacacgaggagaactaccacttctcctgccagttcaccgcggacctgatcgcgatgaacaccgccgacttcatcatcacgtcgacgtttcaggaaatcgccggcacggaggagggtacgggccagtacgagagctatcacgcgttcccgatgcccggcctctaccgcgtgctgagcggggtcaacgtcttcgatccgcgcttcaatatcgtgtcgcccggcgccgatgaggacgtctactttccctatacggaaaagaagcgccggctgacccggcttcacgatgagatcgaaaccctgatctacggggaatccggaaacggcgcgcgcggcgagctggccgaccgcgataagccgatcatcttcgccatggcccggctggaccggatcaaaaatgtgccgggactcgtcgagtggtatgcccgcaacgaggacctgcagaaggaggccaacctcttcctcgtgtcgggcaatgtggaccccggtcacacgccggatcgcgaacagggcgatgagagccggcatatgcaccggctgttcgacgagttcgagctggatgaccgcgtacggtgggtcaacgcgatgtcggacaagaatttcaacggtgaactgtaccgctacgtcgccgaccggcgcggagtcttcgtccagccggcgcgcttcgaggcgttcggcctgaccgtgatcgaggcgatgacgtccggcctgcccgtgttcgcgacctgctacggcggcccgctcgagatcatcgaacacggacactcgggattccatatcgatcccaaccacggcgaggcgtcgtcgcacctcatggcggatttcttccgtaaatgccgcgaagagcccgggcactgggacacgctctcaaaaggcgccatcaagcgggtggaggaggcctacacctggtcgctctacgcctcgaagatgctctcgttcgcgcgcatctacgggttctggaagtacatcacccacctcgagcacgaggagacgtgccgctacctggagatgttctacggcctgatgtaccgccggctcgcagaacagatcgagccgcacccgccggaagaggtgcccgacacggcctgaccgcctgaattatcgaacctcgccggtggccgcccactcggtaccgcgccggagcagccggccgaagccttcgttgcgcatggggtgcgcgttgtggccgagcagcaggacgaagttccggcctgcgccgaagtcgttgaccatcgccgagggttcccattcgcccgtgccgcgctgatcctttgaggaataggcctcggtcagcaccgtcacgccgggctggacgccgggccggtgccacagctcgtcctttgtggtgaacccctccatcccgcgggtgacggggtggtccgggttggcgatcctgacctcgaattcatgcaccggaccgtgcccggtctggccgcgcttccaggtggcgccgtagagcttctggaattcggggtcgtcgtagaaactggacgatccggcatgcaccaccacatgcccgccgccctcgcgcacgaaatcgaggtaggcccgttgggtcggcccgggccagtccgtgaccttcgcgcgcggtccccagccgttccagtgactgatcagtacgtcgtacggctcgaagtcgccgggctcgagatcctgcggccggagggtcacgtcgacagcgaagatcccgccggacttcaggatgtcgagcagcaccggcagggaggcttcccactggtgattgttctgaccgctcaccagcaggaccttcacgcgtgcgccgtcgggcgcgaacgccgtctcaacgaccggtccggggtcgccgccgccgatcagccgggcgatgaacgaccagcgccccccgatctgcaccaccttgacccgcagctcgttcgcccctttcttcagcgccagcgggacttcgtcctgtccgaaacggcaggcgcgcgacacgtcgacctcgtgcaccagctccccgttcagccagaccttcaccccgtcgtcgctgcccagcgaaagcgtggcggccccggcctcatcgcgctcgatgacggttctgagatacacggcgcggttatggccgggcatggagttcatgaagttgatcatgtaggggttggcgcggtccatgtcccggtcggtcacggggcgccactgcgtgttgcccgcttccttctcaggggcgaaggccgtatcgaactcgtcgccgccggcctcgtagggtcccgacagctcccagtcgagccatcgcccgcgccgcttcccttcgatctcctccacggcgagggtggcctcggggatctcgagttttttcagcgcggcctgcagcatctgtttctcctgttcgcgttcgaccgcttcgagggccttcatcgcggcgtcgacggccatgcgcttctcggcgcccgtctcgcaccgtcccatcagacgggtcatggcgcgtacggccgggacctggtcgcggagctccgagtacggggcggtcacgatctcgctcagcaccggcagggcattgggccgcggccaggcgtgcagcaccttcagcgccggttcgcggacctcggcttcggcggagcgggcggcttcggcgacgggcttcagggccgcgtccgtgccggtacgcatcagtgcctggaacaggagcgccttgcggcggggtgtggaggcgtcggagagcagcggcgtgagcatctccgcgaagcggttcttgtcgtgtgcggcgtcgatcacggcaatcagggcccgaagcgcgtcctgcgcggcggaggcatgatccgtcccgaccatgaatccggcgatgcgggagacatcttttgaggtcgccgcctgcttgagggcgtcggccgccgcgcgcgcgatggcgtcatcgccgtcggcggcgtagtcgagcagggcggggacatcgagttgccgacgtccggccagtacggtgatcgcgcgggcgcgctcgtccggagttccgtcctccagcttgcgcttcagggcggcgtcgacgccgggggcgtccatgcgcatcagggcctcgttcagttccgcgccgtccggcagggccaggagccgatcgaggtgcccggcgccgccgatggcgcacagggtgacggccgcggcgttacgcagtttttcgtcgtccgtggaaagcagctttgccacggccccggcttcttcggcggtcccttcgtcgcgaagggctgtgagggcctggatctgcagggtgggggcgaggcggtcgagcgcattaccgacccgcgagatcagttcggcgtctccggtctgcgcggcggcctcaatcaccgccatgcgcagtgcgtcgggaccggacgccagcgccttgcgtgcctcgccgcccatggccgcggggcgggtacggagggcgccgagcagggcgatcgcccgcacgtgttcgggttcatccgcgccgtaaagcccggtatagactcgcgccgcaacgcgggtttcgccggcagcctccatgcgccctgcgccgtcgaacagcgcgtcggtcagggttgcccggcgcgtttccccggcggttttccgggcttttaaaagtgcatggagcgcatccatggtgccggttcgcgccagccccttagccgcggcctcgaacacgcgcgggtctttatggcggaggtatggcgcgaggacgcccgtcgtgcccggttccgcgcggcatccgatcgcgaagacgagtcccgcgacccggcgcgcgtccccgccctccttcagagcctcgcgcaaggctcgatccgcctccggcgagggattgacggcgagcgcctggcgcgcggcctcgcggaggtgccggtccgagtgatccatcagggcggcgagggtcgataccgattccccgcgcccgaagcgcgccagcgtccgcaccagttcggttgcggcgggtaccgggggacgctgctggagcgccgcgcagatattctcgcaataggcttcgcgctccgcctccgctccgggccgcgcggcatgcgcggcctcttccagcagggtgtggcgggcctgctgccgggtgtcgaggtcctccgacgcgagttgcgggagcagttcgttcaccgaggcctcgagaggggcaaggccgagggcgaatgacaggacaaacaggatggcgggaatcaggcgggttttcacagtcgagtcctccggttcataattaaatcctcagaagttcgaagttcagagcgtgtacggcgcgcgccgcggacgggccatccatcgcgaggcctcgcggttgccgagaatcgcctcccggtccgggtcccacttcagcgtgcggccgagccgctcgctgatcgcgctcaggtgacagatcgtcgccgtgcggtgtccgatctccacgtcggcgatcggatggcggcggctccgtacgcactcgaggaaattctcccggtggttatcggagacgtacaggtgttcatccgagggggacagcgggagcgtggccaggtgcgccggttcggtgatcaggacgtcccggcggctgacggccacgacgccgtcctcgccgatgaagtggatcatctggccggagggggcgggatgatcgcgcagcaccgtcgttccgtcggcgtaccggaatccctggtgctcggagccttcatgcccgaccgggaagaagaattcgggtccggagtactgcatgcccagcgcccactgaatgatgtcgtaatgatgcgcgccccagtcgccgttcttgcggctgccgtagtcccagaaccgccgccagccacggctgaagctgccgctgacccgttcgggatggtaagggtgccacggggcgcggcccagccagcggtcgtagtcgaatccctcgggcacgggttgttcgggcagggcgagggggggcgggaacgttcccagccgcgcgtagatggtgtggactttgccgatccaaccgttgcgcacgatctccgccgccctgcggaaggccgtattcgaccgttgctgactgccgacctgcagcacgcgcccgtagcggcgcacggcgtcggagagcatgcggccttcgcggatggtcagcgacatcggcttctcgcagtacacgtcctggcccgatcgcacagcggccatggcgatgggtacatgccagtgatcgggggtcatcacgaaacaggcgtcgatgtcgtcccgctccacgatccgctcgtattcgttgtacgcatccacgccgcgccaggtgcctgagggccggttctgcgcgtaacggctttccgccgcggtttttttgtcctcgcgctttgtacggtcgacgtcgcatacggccgcgatctgcacgccgggatggttcaacatgctgccgaagtggccgcgggagatcttgcccagcccgatcaggccgagcacgattcgctcgcttggcggaacgatgccgttcaggcccagggcggacgacgggatgacgtagggtgcggcggcggtcgaggcggcggcgagggtggatcggcgcagaaatccgcgccgcgaaacgcttgaaggtcgatcattcatcgctggccttctcctgtgtacagttagtatccgaagatgatgccacgatagtttcgcaatatccgctccgtcttgtatgagatgccttttttcttgtaaaaaatcggcaggggttgctttgggaaaatagcgggatatcgcgcccctcctatttggtggaacgactggaatcttagtggctggaccggaaatccgctcgcgtcccatcgtacccgatttcttgaattgcaaaaagggaactaccgggaccctggtggctggaacggtccggcaggatatcctttaagggcgcgattgctccttccaggaagtgtcccgttgactgttgaaacttgaaggcggtctcctgagcgtccatgttggacgctcggggcaaaccaacccgaaaggagaccgccatgagtgacaatagcgtccttgaagcccttggacaagttgaaccgtctgcagcaggagatgttttccgtgactggctgcgtggtgaaatgcgaaccctgatcgccgatattctggctgaagaggtcacagaactgtgtggtccggcctacaagccggcaggggacagaggctgccgacgtgccggcggaacccgcgtaggacttcgaattgacggtattgatgaggagatccgcaagccgcgtgtacgtcgccatgaggcagacacatcgaaggaggtcaggcttaaaagttacgacgcggtcaacagggccgacgaccttcgtgaccgtatcttgcgtgccacagctgccggagtcagttcacgtgatcagaaaaccttgtatcccgattcagcgcccggacgcagcagggtttcccgcgcctggattgtcgagggccgacagcgcatacagaagctccgtgaccgcgacctgaagtccgagaggttcttctgcatgctgctggacggcattgtactgtccgaggatctcagcgccattgtggggctgggcattacgctggacggccgcaaagttatgctggattttgaaataggcgcacaggaatcgacagaagtgtgtgacgcattgctcgaccgcagccgttctcattatggccgcattccgaccgcggacggcgtggcagccgtccctcccgagtcgatatccgacgcattttcgggcactgggagggtcgggtgccaccccgaccgaaaagggtgaagccataatgagaatcgctggctcgaccggcttgtccaccgcggtcttgagttcgagggcgatccgttggcggttctcgacggttctcgggcacttcataacagcgtcttgaagcattttccgcgagcgcgcattcaacgatgcctggtgcataaggaacgaaatattaagcgttgtctctccaggcgtcatcacggcagcgtgagcgacgttttcaagcgtctccgctccgtggaaggcgaagaagccggacgtgaagcactcgccgatctggaacgctttctgagccggcacagccacaaggccctggaatccctgcacgaggccggtgaggagctcattacggttcacaagctgaatgcgccgtccactctacacaccacgttgacgaacacaaactgcatcgagaacccgttccgaaacacacgcgcaaaaatcgggcgggtgaagcgttggcgcgcagagacggatcaggcggaacgctggctggcctattcgcttctgagggccgagaaagggttccgtcgaatcaaaggctatcgtcagatcccggtgcttttgaaatccctgggctggccatcggaagctgttgaggcgtcgctccgctccgcccttggccctccgggccatcccgcctccggcgggaacgggctccactccacgacgcctcacccccaggcagagagcgaagcgaactgccgaacagggactggacaagagaatgacaaggaactacatcgaaatgaagaccgagaccgccaacgagtttcaacaggattcgggacatccccgtcggaatacgcggcatgctttacgaacctcgacgtcctgctgcaggtgctcggcacggggcgtcggataggtgcctttgaactcgggttctttcgttccgaaggagacggactgtatcgcataggccagacgggagtacgggcgtccaaagagagcaggctctatatctacccggacgaggagaaccgcatcgtctacatcctgaggattggcaccaaagaaacgcaacagaacgacatcaacgaggcaaaaaagaccatcgggagaatcagggcctctgaatagttaagaggaagcacaatgagcacgaagtaccaatcggcgtctgaggcggcggccttcctggctgatgaccccgaagcgaaggagcggatcgacctggagaccgcacgtcgcacgcttgtaacagcgctcgtccgtgagcgagtgcggaaggggctgtcccagaaagatatcgcacaggcgatgcgctgtgattcgagcaagatctcaaggatcgaggcggggaacgatctgtcgctgaagtggggcgatatcatcgggtatctcgccgcgatgaagatgaatgtgagtcttgtgatggacgacgcgacgctgcccgcggcggcgcgaatcaagcagtgtgtgttccgcacccatgagttgcttgaggacctcgttcaactggccagggaggtcgatggcgacaccgagatcacggacaagatccatcagttctacggcgaggtgctcttcaatttcgcgattaagtttggcagcagctacgagcagttgaaatcggttctggcgattccggaatcggagactcttcaggcgcttttcgctgacgaccaggaatcgaggcaacggaacaaaagggcgaaagcggccggcgagaagaatctgaaggcctgctcctgacgcgccccgcgtgcctgcgatggcatcctgtcgcctttgcggaggttcctctgtactctccccctccacaaatctcttcgataatccgacccgttcggagccgcgggggacgtggggtgatctgacggcgcagcagcagtaagttgtgtccgagtccgggggcccgtttcgcggcggtctgcccccgcaaggcgtgattcgggctaattcggctgccgtgagttcagcactcgcttccccttgtgtacccgtccggggctgcgatgaatcggggcgtgccggcacggtcgtgagatacgagccgaccaaaagggtggatccgaatcaacgtgtaccatgtcggccgccgccccaccctgaaacagctccgtgcccagaaggttggcgaaagaaccaaaataactgtgaatcagcacagcgaaaagactgcttatccccaaaggaccgattgatgccggccggaaaataagacgcccccttcgatgaagagggcgtcatggaggcccgcaggcctttaccttccggactaaagtccttgctgtaattaagcaaaatcaatagccgatcagatacgttgacagtctgtatatctttgctatgatacgaggtcaactcgaaaatataggatatgtcatgagtgattcgtcatatgttcttggtctggacctcggaaccaattcaattggctgggcatgcgtccgattaaacaagggaaaacctgatgggctgctcgcgcaaggagttcgcatctttgaagccggtctggaaattgatgcgtatggccggggcaccccgctgaatacagaacgacgaaatgcccggcaacgtcgccgcctgcatgaccggcgcaaacgcagaattcttaaagtgcgccgcatccttcaagaggctggaatgcttccggccaacaaacccgatcataaagatgccgaatggaaaatgctgcttgccagaaatccttatcgtcttcgtgcgaaagcactggatgaacaaatagatcttaaggagatcggcctatgcatttatcagtttgctcatcgcagggggttcctttcaaacagcaaaatactcaagaaagatgatgaccgcggcaaactgaaagatgcgacaaaggcttttgcagaagatatggagcaaaaaggagcccggacgtggggcgaatacctaagccatcttgacccgcacgagcagagaatccgcaccaactacacattaagggaatggtatacctccgaattcgacctcatttgggaaaaacagcaaagcttctaccctcatgtgttgaccgatgacctttacaaacgtgtcaaagaggccctgttttatcagcgcccgctcaaatcgcaggcgcatctgctcgggcaatgcgagctggaacccggtcggaaacgtgctccctttgcgctgcttatggcgcaggaattccgcctgcttcaatcgctcaaccatttgagagtggtttcttccaccggagacgagcgcctattaacagacgaagagcgaaagcaggcacttgccctgctccgcagccgtggcaaccagaagttcacaacgttgcgcaaggtactgaatctgagaggaaccaaatttaacctggaacgcggcggcgaaaaaaccattcaagggaataataccgcagccgctctcggcaacctgttcggggaggcctgggatcatttttcttctgaacagaaaaatcaaattgttgaggaccgtctgaccatcggcgacacagatgccctcattcgacgcatgaaaaaaacatggggtctggacagtgtaacggctgaaatgttcagcgagactgaacttgaagacggatattgcgggttttcacgaaaagcactcgaaaaactgctgcctctgctggaacgggggcatgccctcatggaagccgttcaagcggcttatccggattatcagaagaatcttccgcgtacagacaccctgcctccactggaaaatctgcgtaatccgattgtccagcgaaccctttctgaacttcgcagggttgtaaacgccatcatcaaggaatacgggaaatcagacaaaatccgtattgaacttgcccgcgacatgaaacaaaccgctaaaaaccgcgagaaatcatgggacagaatgcgcgtacgtgaacgccagcgcaaagaggcggcaaaaaaaattctggaagaaaccggaaatcctgcgccccgccgtcacgaaattgaaaaagtgttgctagcggaagaatgcaattgggaatgtccgtataccggcaaacgcatctgcatgaatacgttgcttggcgacgccccgcaattcgatattgagcacatcatcccgttcagcaggtcgtttgataactcgttttcaaacaaaacgctttgtgatgtgaactataaccgcaatgtgaagggaaacaaaacgccgtatgaatcggcatccgagacggaacacgaagaaatggtctgtcgggtcaaacgcttcactggcgattacaaagaaatcaagctggatcgtttcaatacgcgcgaaaccgattccagagccgattttattgaggaattctctacatctcaactcaacgacacccgttatgcctcccggctggctggagaatatctgggtaaactatacggctcagagtggcgcaaacacattcagattgcaaaaggtggaacaaccaaatatctgcgcgatgcatgggacttaaaccgaattctgtcagacggcggcaccaaaagccgtgatgaccatcggcaccatgcggtagatgctgtcgtcgttgcgctgaccacgccgcaaacggtcaaagcgttaagcgatgccaatcagcgggcccctgaacatcggcgatacgctttttctgacatgcctttgccttgggaaacgttccggcaggatgttgagcaggcaatcaactcaattacggtgtcacataaagtatgccgcaaagccaacggacagctgcacaaagaaacattctacggcctcattaaagaccggaaaacgggcgacacccgcaccgtactcagaaagccgctgcacgaactgaccgacaaagagattaaaagagccgagatcgtcgattcttcaatccgcaaactcattgagcaaaagctcaaagatctggaccagccgcccaaaaccgcattcaaagaccgaaacaaccatccctttataatcgataaaaacggcaacaagcgcttcattcataaagttcgggtttatcaggatgcaaaaccggttaagattgcagaaaaccgccatgtcaaactgggtggcaaccatcatttggaaatttttgaagtaatcgacaaaaaaggcaaccctacttggaaatgcgaagtaatctccttgtttgacacccggcagcgggtaaaagaaaaacgaccggtcatcgtccggcaggatcagaacggcaaccccttgaaattctccctatccatcggcgaagcggtccaactggactggaacggagggcgagaaactgctgttgttcaaaaaatgtcaaaaactccaaataccgtagagtatgtattccgcaaacataacgatgcacgcaaagctgccgacataccctataaagaaaccataacggtaaaatcagattcagctttattcgcaagcaacctccaaaaaatcgtcatcacaccgaccggtctaatacggagagccaatgactaaccggattctagatgtctcgaaagagggaacgtcattgagtatccgccatgaacagctggttatccggcagcggggtcaagacaaagaaaaaacggttcctctggaagacatcgccattctggttgtttcaaacgctcaaaccacctacacgcaccctgttttaaccggtctgtcaaaacacggagcgggactgattgtatgtgatgacaaacaccagccttccggcatgtgtctacccctgggcgggcactcacttcaggcggaacgggcagcaatacaagcgggggcatcccagcctgcaaagaaacaactgtggaaacagattgtctgcgcaaaaatccgcgaacagtccacccttctgaaaaagctgcacaacagggactacggccttgaccgccttcagaaagaagtccgctccggcgattccgacaaccgggaagcgcgcgccgccaaaatatattggcgacatcttttcggccgcccgtttcaccgtaaccggtacggtgagcctcccaataacctgctcaactatggatacgccgtccttcgcgcaataatcagccgaggtatttgcggagcggggctttatccggctctggggattttccatcacaatcggcaaaacagtttttgtctggcggacgacttgatggaaccgttccgacccattgtggaccgggccgccgaaacgatcgttaaaagcttcggccaagcaccgccggaattaacacctgaaaccaagggcgagctgatcagaccgctgttggaacggtatcgattcaaaggagaatttcgaactctttttgatctcgcaaccatatctgcaaactctctgatcgatgttttccagggcagacagaaaaaacttcttttgccgatgttccttgaaagagaagaaggcgtctgaacctatcggaatatcgcggcgtgtggatgatcgcactttttgacttgccggttgttaccaaacggcaacgtcaaaaagccacgcgctttcgcatccttctgctgaaagacggtttttgtatgttgcaatactcggtctatgcccgttattgcgccagtgaagacgtggcaaaagttcaccgcaagagaatcagttcgcatcttccggatgaaggacaaatccgcatcctttcgttaaccgacaaacaattcggaaaaatggaggtctactgcgggaaaaaacgcgaaaaaaccgaacccgcccctgcacagcttgagtttttatagcaatcttatcatagaaaaacccctttaagctcaacaacttaaaggggcttccaacgtatctgatcggccattggaggtcaattacagccgttccagcgcattccgtcgctgttgccgtaacgtatctgatcggccattggaggtcaattacagcggccgcacttgtacccgtgacggtcgggctaacgtatctgatcggccattggaggtcaattacagccatgtgttggactcactgcaacgccctacaaacgtatctgatcggccattggaggtcaattacagcgacttgccggtaggcgtgcacaagcggttcaacgtatctgatcggccattggaggtcaattacagcgcgtacataatccatccgtcaccatagtccaacgtatctgatcggccattggaggtcaattacagcgacttgtcagccaccaccgatttgacttgaacgtatctgatcggccattggaggtcaattacagcgtggcacctgaaacgcgccgccatcgccaaaacgtatctgatcggccattggaggtcaattacagccccgaccgatgtcagattcctcggcgttgaacgtatctgatcggccattggaggtcaattacagcattgtgatactcatctctgttcctccgtttaacgtatctgatcggccattggaggtcaattacagcggactgtgcgacttgtccccggctacgctcaacgtatctgatcggccattggaggtcaattacagctcatcctccgcaacaaaaaacccggtacccaacgtatctgatcggccattggaggtcaattacagctcacacgccgcgtcatggacgagccgatctaacgtatctgatcggccattggaggtcaattacagcataaatgcaatcgcctatgccatacataccaacgtatctgatcggccattggaggtcaattacagcaatcactcacggtcacgtcgtcaactcctcaacgtatctgatcggccattggaggtcaattacagctgtcggagttgtcagtatatatatatattgaacgtatctgatcggccattggaggtcaattacagcactcacccatggtggccttggtagggtcgaacgtatctgatcggccattggaggtcaattacagcgagcctgtcggaactgtcggagtgcgcagcgacaattacacttccccagtgacgacaattagacttccccactaaccgggggtgctggaggctctctttttggaaagaaaggagggccgatggtcaccccggaccggaaagtgaggaagctgatggaagaatacgaaaggacagggaacgtgtccaaggctgcgttgcgggccgatctggaccgtaagacggcgcagaagtacctgaggtgcgggaaactgccctcagagatgccggttgagcgcaggtggcgtacccgggaggacccgttcgcggaggactgggaagagtgccgactgatgttcgagggctgcccggagctggaggccaagacggtgttcgagtggctgtgccgggagcgggcgggtaagtatcaggagggtcaactgcggacgtttcagcggcgggtacgtgaatggcgagcgctttcggggcccgagcaggaggtgtacttcgcgcaggagcaccggccgggcgtgcggatgtccacagacttcacgcacatggaccggctggggatcacgatcgccggggaaccgttcgaccaccagttgtgtcacaacgtgctgacctactcgaactgggaatgggccagcatctgccatagcgaaagcctggtggcgctgcgtacggggattcagaacgcgctgacgcggctgggccgtgtgccggcggagcactggatggatcattcgagcgcagcgacccaccggccggcggaggccagcggagaaccgcgggcgtacaaccgcgcctacctggagctgatggatcacttcgagatggttccccgtctgatccaagtggacagtccccatgagaacggggatgtggagtcgctgaacggcgccctgaagcgtcggatcgagcaacacctgttgttgcgcgggtcgcgggacttcgccagccgggcggcgtatgagcagttccttcatggcgtgcttcagcgggtgaacgagacgcggcgcgtccgcctggccgaagagttcaaacacatgcgggcgctcgacgtggaccggctgccggaatacacggagtatcggtgcgttgtacgcagttggggcactatcaacgtgaagcgccggatctactcggtacccagccggctgatcgggtacacggtgacggtgcatcgctacgcggaacacatcgaggtgttctacgggggcgtgcgccagctcactgcgccatggctgcgggatgaacacgcgcaccacatcaactatcgccatgtgatcggttcattggtgcgcaagcccggggcgttccggaactaccggttccgtgctgacctgtttccgtcctccgcgttccagtgggcgtacgagacactgtgcgcggcggtcaacgatcggactgcggaacgggaatacctgcagatcctcaagcacgcggccaccacgatggaatgtgaggtggaagcggcactgtgcggcttgcgcgaccgcggggagatcccgcgcctggacgtggtgctttcggcgtgtccgcgtccgatgccgacgttgtcggagcatgcgccgttgccggtggatctggccgcctatgacgaactgctggcgccggaggaggtgtgcgcatgaccacgcccgcctctctggccatgacattgcgtgccctccggttgccggacgtgttgaacgaatacgagcgactggctgcggaggccacgcaggaacagtggacgtacgagcgctacctggccgcggtgatggagagcgaactgcatgcgcggggcgaacggcgcacgcagcggctgctgaaacgctccggcctgcccgacggcaagtcgctggacacgctgaacctgaagctgcttccgaccaaggtgcagcgtcagatcccggcgctggtggacggcggtttcgtcgaacgggccgagaacgtcctggcgttcggcttacccggccgcggcaagacgcatctgctgaccgcgatcgggcgcgaactggtgctgcgacacggcacgacggtgttgtttaccacggcgttccacctggtgcagaagctactcaccgccaagcgcgacttggcgatcgaagcgctgctgaagaagctcgaccgcttcgaggtggtcatcctcgatgacatcggttacgtgcagcagagccgtgaggaaatggaggtgttgttcaccttcctgtccgagagatacgagcggcgcagcctgatgatctcatccaacttggtcttcagtgagtgggacaagatcttcaaggacccgatgactactgcggcggccattgatcgggtggtgcatcattccactatcctggaactcaacggcgaaagttaccgcgcccggaaggcgggcgaacggaatcgaaaacgatgaaaatcgcaattgtgagaatcgcgcaccccccatggggggtgcccctgcggggtgggagggggaaggctcgggcctatcggcccatcgccctcaaaccccggaaacccggggcccaccagccccgtcaacatggggaagtgtagttgtcgccgacggggccatgtagttgtcgttgacgagtcggagcctgtcagaacgtatctgatcaaccattggaggtcaattacagcccctagaagcacggcaaaaccggagggaagaacgtatctgatcggccattggaggtcaattacagcaaagggctgctcaatgttgtcgaagcagagaacgtatctgatcggccattggaggtcaattacagcggtaagtcaacccccgaacgcaacttttttaacgtatctgatcggccattggaggtcaattacagccttggcgtcgcgtcgctcacaccgtttgcaaacgtatctgatcggccattggaggtcaattacagcaggtgctccatcacgtactcaaacgactcaacgtatctgatcggccattggaggtcaattacagcattggttcgcggtgccatgacccttgcaaaacgtatctgatcggccattggaggtcaattacagcgtcccggcacaactggcatggatcgtatgaaacgtatctgatcggccattggaggtcaattacagccagttgcccgtgttccggtcgcccgtgttcaacgtatctgatcggccattggaggtcaattacagctcgctgatacagcgacgttatggaaacgtgaacgtatctgatcggccattggaggtcaattacagcgcattatcggcggggcgtgaccgatcccgtaacgtatctgatcggccattggaggtcaattacagcttgcaccttccggcacgttggtgctgatcaacgtatctgatcggccattggaggtcaattacagcttcttgcttcacctatcgcagaaggactaaacgtatctgatcggccattggaggtcaattatttgaggcggggtctgacccccgtaagcggttcaaagagaatgagtaagcgtgcgttgaaatcgcttgttttgtcttagggggtcagttatggccccaaaaacggagttttaagcgcgaatttctgtttaaatgaagaattagaaagggttatcagacccgctgcctcacccgccgccttgcgtccaagtccggtgaggcgtaacactgtaacgtgcccgtaggatgggttgccatagagaggtattgaccgcatgtcgaacgaccgtttcacagcaaaccgaacctttctcaaggactccattcggctagagatcgatttctctcgtacggaccagaaccagcgcttgcctgccccgcctctacaaaagccttgccctccggatgcgacgcgcatcgatgtgccggacggggcaacggcattggctcggttgagctgcctgtcgatgggcgaagccatcctccgccgagaaagcgtgcgcaagtactcatctgacgttctgacgctcgaggaactggccgccctcctgtgggcgacacaaggcgtccgaacggtgttgagcccggagtgcgcattgcgtgtcgtgccctccgcgggctcgagacatgccttcgaaacctacttggcggtggatcgggttgaaggcctgactcccggcatttaccgctatttacccttcgacggccaattggcacaactggcttccgacccgcagatcggtcgcagcgcagcatcctcttgcctgaaccaaggcttcgtcgcaaatgccgccgtgacgttcttctggacagctgttcctgcacgcatggaatggcgctacggcctggcagcccacaaggtgatcgctctcgatgccgggcacgtctgccagaacctctacctagcttgcgtgagcctgggtgccggaacctgtgccatcgccgcgtatgaccaacacgcgtgcgactaactcctgggagtcgacggagaggaagagttcaccatctacattgcgcctgtcggaaagcggaaacaagcggatcagtgagagagtcgccaacaagccgggtggcgatatcggtgctgttgctcctgtgctggggtgcgggtcgggttgctctgaaagaacccctgacgaagatactgaaaccaatggatcagacatgacgaccccgagacatgacggtacgggagaggcggggtctgacccccgtaagcggttcaaagagaatgagtaagcgtgcgttgaaatcgcttgttttgtcttagggggtcagttatggccccaaaaacggagttttaagcgcgaatttctgtttaaatgaagaattagaaagggttatcagacccgctgcctcacccgccgccttgcgtccaagtccggtgaggcgtaacactgtaacgtgcccgtaggatgggttgccatagagaggtattgaccgcatgtcgaacgaccgtttcacagcaaaccgaacctttctcaaggactccattcggctagagatcgatttctctcgtacggaccagaaccagcgcttgcctgccccgcctctacaaaagccttgccctccggatgcgacgcgcatcgatgtgccggacggggcaacggcattggctcggttgagctgcctgtcgatgggcgaagccatcctccgccgagaaagcgtgcgcaagtactcatctgacgttctgacgctcgaggaactggccgccctcctgtgggcgacacaaggcgtccgaacggtgttgagcccggagtgcgcattgcgtgtcgtgccctccgcgggctcgagacatgccttcgaaacctacttggcggtggatcgggttgaaggcctgactcccggcatttaccgctatttacccttcgacggccaattggcacaactggcttccgacccgcagatcggtcgcagcgcagcatcctcttgcctgaaccaaggcttcgtcgcaaatgccgccgtgacgttcttctggacagctgttcctgcacgcatggaatggcgctacggcctggcagcccacaaggtgatcgctctcgatgccgggcacgtctgccagaacctctacctagcttgcgtgagcctgggtgccggaacctgtgccatcgccgcgtatgaccaacacgcgtgcgaccaactcctgggagtcgacggagaggaagagttcaccatctacattgcgcctgtcggaaagcggaaacaagcggatcagtgagagagtcgccaacaagccgggtggcgatatcggtgctgttgctcctgtgctggggtgcgggtcgggttgctctgaaagaacccctgacgaagatactgaaaccaatggatcagacatgacgaccccgagacatgacggtacgcggacactgccaactcccgaggagcgcgcggcgctccctcctgacggaggacagggattcaaccgcctcatccacgagcatagtccctacctccttcagcacgcccgcaacccggttgactggtatccatggggagaggaagcgttcgcgaaggcgcattcggaagacaagccggttttcctgtcgatcgggtacgccacgtgccactggtgccacgtcatggagcacgagtcgttcgagaacgccgaggtggctgacctcatgaacaaggccttcatctgcatcaaggtagatcgcgaggaaaggccggacatcgacggcgtatacatgaccgtctgccagatgctcacgggctccggaggatggccattgaccgtcgtaatgactcccgacaagaagccgttcttcgccggaacctatttcccgcgcgagggccggttcgggcgcataggaatgctggaattggtaccgcgactgagcgacgcctggtcctcacaacgccagaaactgggtgcatcggccgacgaaataacgaccggccttcagcgaataggacagcccgaacccggggaggacctggagaccgcacagttgtcggtggcattccagtcttttgtttcccgcttcgataccgaatacggtgggttcggccgcgctcccaaattccccgctccgcacaacctgatgtttcttctgcggcattggcaccgcaccggtgaagaacaggcattgcggatggtcgaggagacactacaagccatgcgtcgcggcggaatatgggatcatatcggctttggcttccatcgctactcaaccgaccgcgaatggctggttccacatttcgagaaaatgctctacgaccaggccctgctcgtcatggcctatacggaggcgtggcaggctacaggtaagagcgagtacgaaacgacggcccgggagatcctgacctacgtcctgcgcgacatgacggatcctgcgggtggcttttactcggccgaagacgcggacagcgagggagaagaagggaagttctacgtctggaccctggcggaactggagagcgtgctcggcgcccgggagtccgcctttgtggcggacgtgtacaacgtacaggcgggtgggaacttcaccgacgagatctccggacatcgcaccggcgccagcattcttcatctgcggctgccactggcccggatcgccggccacactcaacagacggagcaggagctccggcaacgacttgaaagctcccgcaccaagctcttagaggcccgggagaaacgcgtccagccgttgcgggatgacaagatcatgaccgactggaacgggcttgtgatggccgcactcgccaaggcggggagcgcattcgaggatcagcactacactgaggccgcccgacagtgtgcccacttcatcctgaacgagatgcggacagacggtcggctactgcacaggtttcggaaaggggaggcagcaatcggaggtcatctcgacgactacgctttcctggtctggggtctgctggaactgtacgaggcaacctttgaccctggatggctgcgggaagctcaggatctgcacgcagtccaggtcgagcatttcctggacaaggagtcgggtggattcttcttcacggccaacgacgccgagaaactgctcgcacgacgtaaggagatctacgacggcgcaattccgtcaggaaattccgtttgcatgctgaacatgttgcgactcggccgccttacgggcgaaccggagtacgaagcacatgccgcggcacttggacgcgcattctccggttccgtggaacagccgtctgcacacaccatgttaatgtgcgctctggatttcgcgactggaccgacgttcgaagtcgtcatcgccggagacccggctgccccggacacga

SEQ ID NO: 273 - DNA, 23915 bp, synthetic construct
  misc_feature 1..23915: note = Synthetic
  source 1..23915: mol_type = other DNA
ctttgtattctctcagtattaacatttctttatcgcccgttactattgtatcggctttaccaaataaagcacattcaaggattctgttgtcgagatcgtctttaaagacacgaattcttttagttggatttatcacctgagcaatatccgaaaggtaaactgctacatgactgattgcctctctatcacggtggaattttgtggatagcacttctaagacctctttaatgatttccctggaaattaagagcgtatcatcgccttcaattattcttaagattgccttctctgccttactaccagggataacaaagacagaaatgaagatatttgagtcaaatacgagtttcactttttaagatatttctcaaggtccttctcagtgagaatacccttttcctttgctttgtgactccaataaccctgaatttgatagaattcctttttcaacctttctttccttgtaatccttaaggcgtcttgaattactgcgctcagggtcttcccttcttcttcggctatcatttccgcctctcttgccagtttctctggaagggaaatagtctttttaattgttgtggctgtcataaatacacctcctattatggtatgaaataatcataccataagtaattttgtaaaagcaactacttcttgttatacataaaactatcagtactatacgcaaattttttagtttattaagcctttttaaaaattttttgcgctaccacgaagagacttgatggattaaaacgacacgcacgccttgatagggggtgggggtatagtttcctatgctccaaataattcctaacaccttaaatgtaagggataacatgttgatttaaagttagttagattgttcctaacagtcgtaacactttttcaaggtataccatggcgtggcgggaatcgtcttaattgtgtgtgtttatctattgcacttcgacacttccttatctttcgtgacaatcgtctagataaagattccggcaacatctagtgatatttttctcagtgtttagagtcatctaggacaaagaacctgacttttttctcatattggcgtgaaattacatgacgtggttttcctttaagcctgctattatatcagctatatcataagccccgaatcttttctacaaaactatgaattccttccttttttttctggtaatttttcatccttttgttagagttttttaattaaaaaacaggttttcttcattgtatactttttgtatatctaataagaaaaaacaaggggtaacaccatataaaatgctaccccttaaaattaatattttccaacaatatcaattattagagaccaacggacaaaaaaatgaataccccctaaaaagaatggcattcaaaaggtcaggggttcgaatcccctcagctccaccaataaaatcaatgatttcaagcatttagcacttcacactttttctcaactgtagtcagattgtggtcggcacagcagcccgtttcgaaaattcacccccttgaaaattaacgatttcctggcaatgtatgcctgaaaaatgacttttttaagcgcaaattgcaaaagccgggggatgctactggaccacaatttccagatttttccaaaaactatggaaatggaaagtgaaaattttggtataaaaaagtcgattttgtttctgaatgggtatggaacttgttaaaagtcagactgcttggcccggtctgcatcagtcttctctgaaggccagtaataagcatccggcgtattacgggcgccaaaaatcgctgtgccgatgcgcaccatgtttgcgccttcttcaattgcgatctgataatcacccgacatacccatagaaagatatttcatgtgtacccggtcgataccttctttgacaaccactccatagatttcttttaacaccttaaaacatttacggatttttacctcgtccttggtaaagaggccgatggtcatgagtccgtgtatttttaatgtatcgtatctggaggcctgtttgattaaggaaatcgcctcttccggtgcaacgccatatttgctctcctcatgtgaggtgttgacctgaaccaaaatatccagggaacggccttcctgctgcagtcgctggtctaatttttcggcgagagacaaccggtccacagaatggatcatgtctgcaaatttcaggacgtccttaaccttgttggtctgcaggtgcccgataaaatgccattctgcatcttcgtcttttaagacctcgtatttttttagcgcctcctgcaccttattttccccgataatgcgtccaccggacttaatggcttctcgtattcgctccggatccaccgtctttgtggccatgaccagaataatttcttcgggctttttgccaactcttgcggcagcgtttgcaatgttttttttcacctgttccaggttttctttgattgacatatgttctcctcaaatatggaatgtctctgacgactgtcagtcgcataacctaaaatttataaaaacaccttttcgataaatgaaaatgaacatatcatattctacctctaagaatcaaaaaagaaagtcttaaaactggcatttgatcaatgcaaacgggtgaacatcccaaacaaaagaaaaagggacaataaacaattggggcatttctcctttgcatatgaaatcatatccttttcggatttttgcaaaatccctgttgcatttggcgctcaaaccatgtaccttgtcagtgatatactacgttaagaatggcagatggacagccaaccatttttaggaagaacctttatgggaaaaatacagcagagtgttatttcatctacaaacctgaaattcacgactccttcccgttgtttcatgggagttttgtttgccgtggctttcattttttgccagcccgcatacggttcgcaaccgcatcatacggaaaagtcatcattctttttacccggaaaatctttccatgttaaagcctgtgaccgtttagacggaaagggagaagcaggcgaaaaaactcatatggaaccggaagatagtcaaaatccgcctgcggttgcccaggttcaagagtccggagcatgggacagaatgtactgccaaaatacgccccccggagattatgatccacaaactactgcctacggtctgcaatccgtcgctaccgccccgactgtagcaaccagtcccgcttcgaatgtaacacataattcagcatcattgcatggcacggtaaatgcaaatggattgtcaacgaccgcatggtttcagtaccggattgccaacggaccatccaaaagcacctttgcaacacaaacggtaattgggacgatagacgcggaaataggtatcaggataattatgctgcttccgggaacgacctattactacagacttgttgcaaagaacgacgccggaactacgtatggaagtgaggtgtcatttactacggcagatatcaatacatctgtcaccactgaaataaccccacccattggtgcgataagcattaacagcggagcttactgcaccaactctttcaccgttaccgcaaacctttccgctactgataataccggtgttacgggttattatctctctacaaatgccacgcccccttctcaatataccactggctggatgtctacaacaccggctaccacttataaagaagacgtcacctatactataagtaacggtgatggcagaaatatggtgtatgtttggtataaggatgcttccggaaatatatcagacgcagccgctgcttctattgttgtggatacaacccctccaataataactattaccgacccaacgtccgatcaaacctatacaaccaaaagtaacgtggtaagcatcagtggcagcgcttcagacgatatcaatgagataagcagcgtggtgtggattcatgataaggatacgagcgggacagaaagaaagaccattggctggactgtgccaaatattggcttagtaaagggagagaatgtaataaccataaaggctacagatagtgttggtaataccggaacggctacgataacaataacgtatgccgaagtcgatgccacaccgaaggtgataacgggacatgcaacaagtataacaactgacctggctaccttaagcgggactgttaatgcaatgggattgccggcaacggcctggtttcaatacggcacgagcagcgaacattacagcggcacttcatcaatacaaagtatagaaaatggcttgcatgaggtacccgtaagcaaccggataagcggtttgcaggcaggaacggcatactattaccgtcttgttgcacaaaatagcgccggcgctacgtacgggaatgaaataacattcaacacgttgccgccaaaaggtaacatttacggaaatgtcgtgtcctttctgaaggaagggcctgttgaatctgcgaaattacagctcaaaggaacaaaggcaaggaaaaaatctttcaaggtaacattttctgatgcacatggatttttcgaatttaaagatttagatgcagatacgtatgatatcacagtaacaaaaactgattttaagagtatgagtcagacggttgagattgaagaaggcgagagaaaaaagattggaattatcttgcaaaaaacaaaggaggaagacaaaggtccaccaaaagatgtcaaaagtgatcaacagaagacaaacgaaacttcacaaatgcacgattagaaagtatacaccctgttaatcaccgtgttttcaacggatgcgaagcagcttcgctttttttgccctatttcagacacttctttctccgctcattatatccttttttatttgtttgcgaattatgggtaatagcaatggtggctgaaaaaaaattcgactaaagacattatctgatttataggaaattctcggaaagaaaataaatttttcttgacaatatatattttattttgtttacaataacagttatacacgtccacatccaaaaatcgcagcaatacgaaacgaaaaaacattacgataaaggtaaaccctgagtgatcaggggacgcaaagtaacagggtcttgaaactcacaaggatgtagtttgcaaagacttgcttgcaataaaaaagatagccttactgccgaagatgtttaaaaaaatatctttgcagtaaggctttttttgttcaaaaatcaaaaaattgtcattcctgcgaaacatgctctcacaagggggggaagtatgggttcattcctttcataaattacaccacttttttaaaaaggagcagtaaaatgaaaaggagaagcaaaatttttgcactatctgccatgcttttattaacagtgttgttcggaaatattcttttggcagaagatgaggttgtaaacaaaccatcacaggaggaagtaaggcagaaaaccatgaaacttcagatgccatttatcgccaacaaggggcaaacggatgaaggggtggcatattatgccaatacctttggagggacggtgtttgtcacgaaagagggcgagattgtctatgttctgcccatgagagatggaagcgctccaggttatggaaacaaaggggaattagtggaggaaggcgctcaggaaccaacgtcagatgggcagcaagaaggagaatcagtcatacatgaggataccgtcaacgaacaatcgggaggagtggcgctgaaagaagtgattgtcgggggaatggcaggcaaggtgaggggggtgatgaggtcaaggacaagggtgagtgatttccggggaaatgacccatcgaaatggaagaaaaaccttgccacatacgagattgtaaatcttggggaggtatatccagggatagaggttaagttgagggcatacgggaataatgtggagaagttattctatctcagccctggggctgatcctggtgtaataaggataaagctccacggggcacagtccttgcgggtagatgaggaaggccggcttgaggcagatacggcgttgggtccggtgaaattcacccgacctgtggtctatcaactggaagacgcttcatctcgtccgggcaaaggcaatttttctccattcctgtcgtcacgagaaggtgacgacatggcgaaggcgatagagggagagtatgaagtaaacggggacgagtacagcttcagactgggagattacgacagatcaaaggggcttatcatagacccactccttgcatctacatttttgggagggcttcctagcgatgatattggtaagattttagctgtagactcgagcgggaatgtctatgtaagcggagaaactagttcttcaaactttcccactactgtgggcgcttatgatactttgtatggttatacagatgtctttatctcccggttcagcagtggtttaacgagccttctcgcctccacctatttgggagggtctgctgctgactatggcaggtctttagccatagactctggcggaaatgtctatgtgactgggtatacgtactcatcaaactttcccaccactgcgggcgcttatgatacttcgtataatagtaatacagatgtctttatctcccggttcaacagcagtttgacaagcctccttgcctccacctatttgggagggtctggttatgactatggcaattctttagccatagactctggcgggaatgtctatgtggcggggtatactccctatactacctattcaaactttcccaccactgtgggcgcttatgatactttgcttagtggtcctagagatgcctttatctcccggctcaacagcggtttgacgagccttctcgcctccacctatttgggagggactaattctgactatggcaattctttagccatagactctggcggaaatgtctatgtaaccggggatacttggtcaccagactttcccaccactgtgggcgcttatgatattttgcttggtggtaatagagatgtctttgtctcccgactcaacagcggtttaacgaacctccttgcctccacctatttgggagggactaattatgactatggcaattctttagccatagactctggcgggaatgtctatgtaaccggggatacttggtcttcaaactttcccaccaccaggggcacttttagaggtgcagtagatgtctttatctcccggctcaacagcggtttgacgagcctccttgcctctacctatttgggagggtccggttctgactatggcaattctttagccatagactctggcgggaatgtctatgtaaccgggtatactagatcgtcagactttcccaccactgtaggcgcttatgatactttgcttggtggtggtgaagatgtctttgtctcccgattcaatagcgattttagtctcttcctcgcctccacctttatcggaggaaatagtactgactctggctattctttagctatagactcaggcgggaatgtctatgtgaccggagatactacctcttcaaactttcccactactgggtttgcttatgatacttcacataatggtggtaaagatgtctttatctcccggctcaacagtggtttgacgagccttcttgcctctacctttttgggagggtctggttctgactatggcaattctttagccatagactctggcggaaatgtctatgtaaccgggtatacttcgtcaccaggctttcccaccacttcaggtgtgtatgatcgttcgtataatagtaatactgatatctttgtctcccggctcaacagtggtttgacgagcctccttgcctccacctatttgggagggtctgctgctgactatggcaggtctttagccatagactctggcgggaatctctatgtaactggggatactaactcatcagactttcctatcgctgggggcattgtttatgatacttcgcataatggtggcagagatgtctttatctcccggctcaacagtggtttgacgagccttcttgcttctagctatttggggggcgctggtactgaatatggcaattctttagccatagactcaggcgggaatctctatgtgaccggagatactacctcttcaaactttcccactactgggtttgcttatgatacttcacataatggtggtaaagatgtctttatctcccggctcaacagtggtttgacgagccttcttgcctccacctatttgggagggtccggtactgattctggcaattctttagccataggctcaggcgggaatgtctacgtgaccgggtatacttactcaatgaactttcccacgactgtgggcgcttatgatacttcgtataatagtggtaaaactgatgtctttatctcccggctcaacagtggtttgacgagcctccttgcctccacctttttgggagggtctgatattgactatggcaggtctttagccatagaaccatttagcggagatgtctatgtgaccgggtatacttactcaacgaactttcccaccactgtgggcgcttatgatacttcgtataatagtaatactgatgtctttgtctcccggctcaacagtggtttgacgagtctccttgcttctacctatttgggagggtctggttctgactctggctattctttagcaatagactcaagctgggttgtctatgtaaccgggtatacttcgtcaacagactttcccaccacctcaaatgcatatgaccgtttttataatggtaaaactgatgtctttgtctccgggctctacggtgatttgacaagcctcatcgactccacctatttaggtggttctggtgatgatcgtggcagttccttagccataagatcctacggggatgtctatgtgaccggatatactacctcttcaaactttccatccactacaggggtgtatgatactacgtataatggtgatagtgacgcctttgtgtcaagagtaataggtagtggtttttaatatgttcttttaaggtgtggaagggattccaaagttgccaggcagcgctgaggcacgaaatattttcttcgtgcctcagtaactttaatgaatgattttaccctctttcaagacgtttcttccccactttaatggttaaaacagtttaaaacgagaaaaaagtgggcaacattcaagggtgcttatccattttaaaaatcaaaaggttcatttgacccactctgttcgcttcatccaccctacctaaataaggcagacaaagatcaagtacgggatggcaaaaatggcctaccgaagacaaacgaaacttcacaaattgttaatcactttgtttcaacagatgcgaatcggttctgctttttgttctatttcaaatacttctttctccactcatcatatcgcttcttcatttgattgatatgtgccggtatatgttcctcatacactttcaaccaatcgtccagggtaacggtttcgttctccattgagccaactgagtttaaccaaaccggctcaggcaatgtcttaataaggttgtacgacgacagacgaagtctcctgaataattccaatgcatcttcagcgctttgatcctgataatgaaacgccgcagaccatttgtcctgatcataggctgcaatggatttcccgggttcagcaatcaattttctgcacttgatatatgcattcgcctcgctgtcggcaatatgcatgataacttcatggatactccagcggtcaggcgaaggtttgaatgaccacatctccttcggaaactgttttaaagcctcagtaagctggacgtaccccttgccatacgattcgattttttgcatccgttcttctctcgtcattaccatcacccttaagttgttttatgataagaaatatagtattgatattttctccaaaaagtctatgataaccataaaaaaagcccctcgtttccgagaggcttaattaggtgccccgacgggtgcggggacatggttttttgcagagccagaaacctggatgcatatcccgcaatactttattatggaaaagcagtgcaggcatttgtgtggtacacactatgggagtattatacctatccattagaatacatgtcaataaaaatggaggtgtttgtggaaaatttcattctcggtcttgatctgggcactaactcaataggctgggcgataatcggatgcgacgaaaatgctaacccttcgcgtctgattgacgcaaactctcgcatcttcctctccatgatggaggcggacggcaaagccccgaagaacaaacagcgccgtgacaagcgactcacacgcaggcaaatcagacgacataaagaacgtagggacaaactacttgagatactcgttgaccaacaccttctccctggagaatttcaccagccatcagactggccgtgtcttctcaaccaaaagggcaaacttcccaatggcgaactgaaagacttccttgccagcaacccctttctccttcgctcagaggcgttagaacgcaacttaacaagacacgagtttggacgcgtattgatgcaccttgccaaacggcgcggatacaaaagcaaccggggtatcaaatatcacgcactgttccgctatattgaagaaaacaaaattggcatccgctatgccgtccaaggagatgaagaacagacagaaacatctgaatatgccaatcagcacggcgacaaaaaagaagccgaagaaaccggaaaggtatgggaaggcatccgtgtgcttaagaggcaaatgaggtcagatgaaactatcggacagtttgccgtcagggttgcacataatgaaaaatggaaaattccccgccgcttgcacaccataagtatggatgaaaccaaaattcccacaaaaggcaaaagtaagggacaggggaaaactaccgcctatcatttgcacgccactcgtgagttatacgaggatgaattttcgcgcatctgggatcgtcaggctgaaaacttttgccacttgctgagccaaacaccggcgcaaattaaaacactcagagaaaaaatcgagcatgccattttccaccagcgtccaccacaactgcaaaagggtaaggtcggcatgtgcactatcagactcaagaaaaaacgtgcggcaactgccctgcttgaatcgcaggaatatttgttgttgcaagatattaataatctcaaatatggcgaagttcgtggcagaggcaaacgtattcagatggatacccaccaacctttgtccgccggacaacggcagcaattattaaatgcattatccgaccacaagcaagttaatgagcaaaatacgctaacatgggatagggttagagaaatacttgaactggatgcatcaatcaaattcaacctcgaaatctccagcaataaagataaaagcggtgaacaaatcaagagcggtaaaaagggtatcaccggtaaccgcaccgctttggcgattgcgcgtgtaataccagaagaatggaaagtctttaccgcagcgcaaaagaagtcgttggtaaatgacctactcaatatccacgacaaagtagctctgtttaaccgcttgcgtaaccactaccggctgccacatcaacgctgcccctggcaattcagcgaccaacaggccttcgagttagcaacgctggaattacctgccggctatatgaaacattgctttgaggttattactgagttgttaaggcattttagacaaggcatgatttacagcgaagctaaaaaagaacttgaaaaagaccctaaattcaaaaatcaatcagaatccggtcaacccaggcacttgggggaaccacccgacatcgccaacccgattgtacaaaaagcattgtatgaaatacgccgtgtggtaaacgccatcatagagaaacagggatgcaagcccaaaataattcgtattgaaatggcgcgcgatatgaaggcatctaaggtacaccgcgcagaaatggaaagccgtaatattgaaaaccgcaagctcaacgaaaaagctaaggaagctatccgcgactggaatcagcacaacccgcatcaaaccatggggctagagccagctaatattgagaaaatcaaattatggatcgaacaacgggcaaagccggataaagaaagcaccacaaaaatcaaactttggcaggagcaaaatcatagatgcctctacagcggcagatatatttctttcccacagattgccgatggagaggtggatatagaccacatctatcctcgcagcctttccggcatgaataattacctgaacaaagtgctggtgttcaagtctgaaaatctcgccaaagaacaaaaaactccctggcaaaagtggggcaatagcgaaaaatacaatcaaattgttaaacgcgcccaggaatggtatggtgggagtgactctcctcttaaagccaaactatacaaagttaaaaacacattagacgaaacctcattcaaggaagaaatgcgtaagttcaccgaatctcagttgaacgacacccgctacatttgtgttgctgttaaaaattatttgaaaacactgggctacaccgaccaggaaatccaggtttcacgtgggcgtgcaactgctgatatacgccgtttgtgggaactgggcaacatattgcccagggcgaaaagagatcaagaaagcaaaaatgaggataaagagactgatgataacgagattgatgaagccgagggcgataagacaaagaaggggaagaaaaaagaccgtggcgaccatcgccaccatgcgattgacgccatcatcaccgccctgaccgatagaaggacttttgcagatttacagcgccgttatcgttattacgaactcaacagcagttggcctaatgctccacttgaaaaaccaatgcgcgcagacggcaaaccttgggagtcacttcgtcatgatgtcgagcaaatcgtgatgaaccgggtagtcagctttagcgccacccgcaaggcaagcggcggactgcatgatgagcaaccttacgggttgggtcactataaggaaaaaatgccaatcaagaaactgctcaagtctccggacattatccgtaccttgcctgataaaacacctggcaagaaactggaggatagtaatacctggattgccgacgcctttttccgccaaaagctcctggaatggcttgtcaattgggaacgcgcaaagtgtgtgaaaaattttcctccacctctcctgcctgacggcaaacctcttgatactgttgccgtggcccatcgttgctatgtcaaacgcgcaccggttgtcgaagcattgaaacggattgaaaacaaccccggtaagaaaacgtgggttgccaatgacgaattgcgaaatattttacgcaattggctaaggcaaccaggcaatagtgttaaatcagcccaagttaatccacccaccatgccttccaaaaacggcaatggcaacccgatccatacagttcgactggcatcagtctctaccgctatggttcaattcaaaggcaaaccgcagatttttgcaaaggccagtaatcatcacgtcgccattttcaaacgtatcggtacggttgtcgaacgcaaaggtatttttgtggatatgttggaagcagcgaaacgcatcagaaaaccgcccgtcgtgcgaaagtcgccacaggaattgctggcgcttgatccggctgtcaatccagccgaatggcagtttgaaatgttcctatgcaataacgatatggtattgtgggatgttgatgatccggactggcaacaaagagataaaatatatttggatgagaagaatcaccatttgccaatttaccgcttgcagaaaatgacgaaaggaacacttacttttcgtcatttttcggttacgtccactgctgatacggacaatcggggagttcttagacgatcaccaaccaagctgcgctgcaagaaaatacggattaacgaattaggcaattacaatatttgccatgattaaacgaattgtagaaatcagcaatcctgcgcggctttccctgaaaaaccagcaaatggtggttgaccgtgaaggattcgacttagccgcagttcctatagaggatattggcgttcttattctggaccatcctcagatcacccatacacaagggcttcttgcagcttgttctgaaaataatgtcgcgttgttagtctgtagtgagaaacatttgccaagcgctatcctcttaccacttgaaggaaacagcctccacagcaaaattatcgcgcagcaggcacaagttaccgaacccacttgtaagcgtttgtggcaggcaatcgttcgggcaaagattcgtgaacaggcaaaggcgcttctcctttccaccggagatgacagtccccttcctgcttatgctaagagggtaaaaagcggcgatacagagaacatcgaggggcaggcggctcgcatctactggcaaaaactctttggacaagacttccgccgcgaccccaatacccccggtattaacaccctgcttaattacgggtacgccgtgatgcgcgctgcagttgcccgtgcaatcgtcagcacgggactgcatccctccctgggcctgcaccaccataaccagtacaacagcttttgccttgccgatgacttggttgaaccgctccggcctgtggtagaccttaaggtgtatgaactttgtaaaaaacttccggaagaaccggcgctgacaaccgaaaacaaacgggtgttattggaaaccttgagcgcagattgtgtcatgaatggtcaacggctccctttaatgacttcgttgcatcattacgccgcaagtgtgcgaaaggtaatctgcggcgagcataagcgtatggagatccctgcattatgagctttggaggctaccggagcatgtggataatcgtcatgtttgacctgcccactgatacgaagcatgcacgcaaggcttatcatgaatttcgggaggaattattaaatgacggttttaccatgttgcaattttccgtttacgcacgccacacaccaagcgaggaaaatgccgtggttcacgaaaaccgggtaaaaacgtttctaccggaagacggagaagtgaggctgttaaaaatcacagacaaacaatttgaacgtatgaagattttcaatggaaaaacgcgtaaggaaacagaaaaagcgcccaaacaactcagttttttctgaattgttcgggcgcatcacgaagaaatacaataggttacagaaagtctattgtaccacacaaatgcctgcccgcaagccacaacgggtgaattgtccattgctgtcaattgcgctattgtaccacacaaatgcctgcccgcaagccacaacgtatgggggtgtgtttatgatgttcttgatattgtaccacacaaatgcctgcccgcaagccacaacatacaactcattcttgtttgtccttgccatattgtaccacacaaatgcctgcccgcaagccacaacgggtcgattgggggattgtttacacgtgggattgtaccacacaaatgcctgcccgcaagccacaacgaaatggttatccaattcaatcagcagttcattgtaccacacaaatgcctgcccgcaagccacaacttttggcctttgctacgtattatgctattgattgtaccacacaaatgcctgcccgcaagccacaacgaaggtagttagaggtgagtttgagtctgaattgtaccacacaaatgcctgcccgcaagccacaactcctcctctttgcgggtagtttttctctgcattgtaccacacaaatgcctgcccgcaagccacaacatacagaggaagaagccaaaaatgcggcatattgtaccacacaaatgcctgcccgcaagccacaactcgatttcttccctagtgtttctccctgtcattgtaccacacaaatgcctgcccgcaagccacaacctgaccaagtaggcaaatacatcgtttttgattgtaccacacaaatgcctgcccgcaagccacaacgattccttaatgatcgagtctatttcctctattgtaccacacaaatgcctgcccgcaagccacaacaacctccaataagttccgttcgtgattgatattgtaccacacaaatgcctgcccgcaagccacaacttaccgggttggagattgagtttccccagcattgtaccacacaaatgcctgcccgcaagccacaaccggtcttgatgtgatatacatttgtctttgattgtaccacacaaatgcctgcccgcaagccacaacaccttctgcgcatctttaccgaaacgcccaatctctgttgcccagacaagccttgctgcattaacggcatccttgaatcccctctgcatgccaaagagcatggcctttgcctcgccatctactacgccgggagtgttgccgtagtgtgtcttagctgccaggtaccgttccgggatgctggcaaaggcggtgtagaggttagaaaggaagttggtggtatgggtttgtgggttcgagagcaacccgttgatccacgcctccaggaagatgtcctggaggcgccgggttacgggctttgccatttccctggttgtctcatcaatttgctcttgtgactgcaaagaatcctttaataattttaattgctccggtgatatctctccactttttaagatttctaaagcacgtaaaaattcttccgttgcaggcgccgctccgatttgtatcttcccagattcagtcatcctcgccgcttccgtacttgacgctcccatcttactaccaaacattgcggctcttaccattagtattggcgcaatttctttgaggcttttgtttttgggatttaaagcgctagcatcgatcacacttgatgcttcaagaaataattggtttcgcatcattcgtgcagctacttgcttagctgcgctcggcagaatggttccatgctccaaccccataacttcattatagattgttcttaattctttagatgcatcctggagtaattgttcatgagatacttctgttttttccgtgccagttatctcccttacggcttctatcgccgataccataagcgtcttcacgtcaacaccggcatctattttcacaagattcaacccttgctcatctaatgctttttgtattaactcttctggttttaactcgccatattcctttagtttttgctttacaagattgtcgatgtcttctattttactaggtgcgccgccttcgatcttgagatgcctggagagtcgttcgatctgtgcctctgtctcggcgatctcctgtttgtacttttctgcgttttgtttatagacggcctctttgatcttggcggtgacaagcatttgttctatggatgccgtgtctttgttctggatgcctagcttttctacggcgtttttgtagaattgcttgacggtatcctctgaccaattattttgcgttgcgatgtcgttgatttctaaggcgtctgacagtgaaagcttgttggtatctgtgagtgtcttgaggaatggcggtagttctatggcggattgttgcaattcacgcgcatacagttgtgcgttcttcctcgcatcgtcaacgcttatgccttctccggccctgaattgtaccttctgtgcaagcgaatggttgtagagtgcagctccttcgggggttgtgacatatttccacccgataggttttctgtcaacgcctcgtatatcaggcgcatttttggcgctgataagttctgaattagaggcggtttctagttgtggttgctgtggtgtggttacttcctgggagattcctgtttttgttgttgtcgctctttgatcctccgaagcccttccttcacccccctgagcattccctcctcctgataatcgtagggatcgtccggcatcggtggataattctcctccttgttcaatgaggactggaggctgccctctttcgacgtctgttgagtatttttcataacttgcccatcctttctcttgtttaaggatatcataatttttacctggcgtcaagccaagatttaatacataatttgggtcaacaaatcttcctgtcttctggaatctctctacagccctctgggctgcctttccaggcggtaaatctatatagtgcagatttacctgataaccatcactaacaagccaatccctccatcttcttacacgttcaatgtttttcccaacaatcggaagtaccatattcatattttgtttgattgcctctggcgttacgatactatcgacaatatcgccagattctttatgtgtagcccctgaatgtcgaatatctccaagatatggttttgcctcatcggcatcgataacaagggatttcttttctttcgataaggtatggacaaaagaagattttccggaagcaggaagtccgataacaatatcggctgttttgttgttttctacaggccctccaaaaacatcctttccttcctggtctttttcaataaatgacccccggtttaacaaggtgtcggccacctgtttccttaatgtttgtctttccggtgtattaattaagtgtgtctccggaatagtcttttgttcttctcgggccttaatgatttcaggtgtatcgaatgaccctggcggtgatatctctcccttcggttgctcctgggcttgttgggtttgctcacccttgggttggtgggcagtgcctaccctactttgctctgacgtttgttgtgtttcctgcgttacccccctggtaaagggatgaatgatggcgccggttgcagggcctgctatggccgtctggatgatggttcgtttcctggattgagaaaggtcgttataaaattgtttgaaggttttttggggatattgccgggcataggtaatggcgctctggacgatggtgttgatatcctcaccaaatatgtcctgggctgtggatagaaatatccgcttggcgaaagatatccctggttttaacagggtgctcatgggcatgagttcggtgcctatttccgatatggtatgccctgctgccgataaccccgcctttagcgttgatgcgccttctgcttttgcctctccgtattcctgaccacccgatagagcccccatgatgccaagcccaacaaagggattgcccgtagcagccgacaggaaaacggcagggatgttttgccctaccgatactcctgccccaagcaggttttctttgaatgagccagggggaattccttcgtagattctggcgagttctatgtttgacccctggaagacgtcctgaccatattgttttattgattccgatccggtgacgtcgccaatgatctgggcgataccacctattgagcgcgtggcagcaaatgtggtggcttcagggattttctgaaaaacggcaaagaggctgtcggtgggatcgatttctgattttggatttttttccccttgttccccatcgctgagggatttcctccccccgccctctccagagggggacaaatcactgtccccctctggagggggttggggggaggaggtttcttcctgccctgccacctgataatccttcctgatcttctccacggcatccaggggttccatcttcttgtcgatgatgtaggaatggaataccctgagccattttgccttttcttcctcttccaatatcccggcgaattgctgtttgaaatcgaggtcgaagagttcacgggcggccttgtagttggggcgattggtgatctcctggtttctttgcagttcatccatggccttgtttttatccgcaagggagatgccttctgcggagatgatgtcttcttgttttaaactgtatgggtcggagttgatacgatacatgagtttgttgtaaatatccgggtcgctgatttctggctggttgcgtgcccggacgaattgtaccacacaaatgcctgcccgcaagccacaacggaatgggtaaacgagaattgtaaaaatttaacaaaaaaacatccatgagtcaacgaacagaattcatcattaaagcgccgtccactccttgtgaataatgatacgtgtgaaatggagagaagccgtacaggtaatttggttgcgactatgcagcgccatgttataataactgagcaaataagttttggacaatcatcttattgacacggacttatggggaggaagaggtacatgaagggaattttgtcatttgttggggtatcaatactttttggtgttttgggcggcgtaatacaggctcaaaaactggacaaaggggtagggccgtacggtgaattctggaaaccaatacccacacagagatactgggcgccggactatttttattcaccgccggaagaaccaaaagggatttataccgccgatgagtgcacgctctgccataaggcattaaatccaggcctggtaaaagcatgggcagaaagtagccatgccaatctggacaaacttcagggttatcaaaaagaaaaattagccgagatagaaaaaaatcttggaagaaagcttaccaaagtgggttgcatcgattgtcatggaaaggttggggcagaaaaactggatcatgcgaaagaattagtaatgaccagttccaccctttgcggtgaatgtcataaacaagaatatgaagagtttgaatctgaaaaacagtatggtattccggactggaaaccgggcagggaaagccacgcaaagtcatacgatgccaatctggacgtagatgtatgggcagcaacagataaaaatgtcgttcaaggctgcgacatgtgtcataacatccagcacaagtgtgacagctgccataccaggcatgccttcaaggcttctgaatccaggagaccggaggcatgtcaaacctgtcataacggaccagaccacccggacatcgaatattacagggattccaaacacggttctatctattttattgaagggcatacctgggattggagcaaacaactcaaggatgcaaattacatctctcccacctgccaatcctgccatatgtattataaagggcagtattcccacaatatggtcagaaaggccattatgggtgagggcgatgtattgttttatgacaacatctttaaaggaatcaaaccaacggattatattaagaatagcaaggaattaatgtcacggcgagaggcatggattgaagtctgtgtaaagtgccattcaccgagattctcccgggattatctggactccatggataaggcctcggattcgatttttcaatacgtgagcgatgcctatgctacgataaaatccctctatgaagaaggggcgctttatcccatgcccgaaaacaggcccagggcgcctgcgccggtaaccgaaaagtatcctgatctcctgggtggtttctacggtgaattttgggcaaaggacggcaatccaagcaggattgaaaaggactttttgtatatgtgggaaaacgacgcatttcttgtccgaaagggtttggctcacatgaatcccaacggctttacctatatttcatggtcaaacttgctcaagaaatacgtggatatcaagagtgaggcaaataccctgcggcggttggctgcactggaaaagaagagagtgcgggctcggatcaaaacgaaaaacaaatagtatctgtgtatattttgttataaatcactgatatggaaaatcttacacaatggcacctcactttcgccggcattgaaaatctctggctgcgtgtgcttgtcttatttctggcgattgctgcgctctacttttcctggcttggcgtcaaaacgatctctccccttgccagacgattgttcctcttcactctccgttttgctgctacaacacttatagtcatcctcctcctccagccgcaaatagaacagaaagaagttcttaaactaaaaaataaagtcgtatgcctgctggataattctgcaagcatgactctgaaaggaggcgataccggcatcacccgattccagcttgtgaataaattcttcaaagacaatgcgccttttatcgaagagctgcagaataactttgatgtcgattacctatccttttccgatatcatcaaagagatctcttataacgatatcgaaaggggtcttggtctcgacggcaagaataccgatatcatccagacgctcaagctcctgaaaaaacgctatgagggtaaatccgtcaggggatacctggtcttttctgacggcgccgacacgaccgaacttccttcaggcgtaaacaaactcgatatcatttccagtcttacaagggatctttcagccccattctttacgttttcaccggccggcaatatggaggccagagatatcgctatcagcaatgtctcttacgacagcttcacctttgtgcgaagtccgtggaaggcagatgttgccataaagatttttgggtacaaagacctcaaattccctgttacgctcaaacaaggtaacgacatcatctcgtcgaaggtcttagatacgaggaacgaaagggaactgcacatagatctgtcatttacacctcacactacaggaacattcctctatacaatatcacttcccatccagccccatgaagccattacggaaaacaatcaggtcagttttctggtaaaggtggtacgcgataaaatcaggattatgcatgtctgtggccgcccgtcctgggatgaacgttttctgagacgggtattaaaaagcgaccccaatattgatctcatatccttctttatcctgcggacgccaaccgacgtctccgaggcaagaaatgaggaactcagccttataccttttcccgtagacgaactgtttacccaggtactcagcagttttgatctgatcattttccagaactttgattatcggccctacgatacctcgttcttccgattttcccattacctgggtaacatccaaaaatttgtaacggaaatgggcggaggctttctgatgattggcggggacatttcgttttcacaaggtggatacgatggcactcctatcgatgaaatcctccccgtaaacctcaccacgggaaaagataccattgatacaacccggttaaaggcaaccctgaccaatgatgggctgaaacatccggtaaccgcccttggcgctgacacagacagaaatgtcgctatttggaaagacctccccgaacttgacggatgcaatgtaaccgacgggttgaagtcagatgccgtaccactggcaacctttccggtaaaaggaaatccaccccttatttctgttcgtgatgcaggacagggcagatgcatggccattgccactgattctttatggcgatggaatttcctttccgttgggaaaggcggaagcaacaggcattatataaaattttggcagaattccataaaatggctcatcaaggaccctaccttaaaccctattcatatcatggcaaacaaagaaacgttttccccgggtgaagaaatacaaattaaaatcgatgttgtgggtggaaactaccagccgctgagcggcgtacaattaggaatagacatcgcaaatgaattttccgggaaaagcatattctccgcaaccggagtcaccgggagtgatggtcaatacagattcaccgtcaaacacgacggagaaggctactatattgtgaaagtgctggcaaagaaagaaaatgatgaaatcggacaggattatgccgtcttctgcatagctttagaaaacaaggaattcaaagacccttccatcagaagagatatccttgcaaaacttgccgaggtttccggtggaaagcactttgaccttcccgcaacaaatatcagagaaaagttttcaattgaaaatcctcctattgtaaaactcgtaggcaaacggcaaatctctctgtgggataatggttacgtttttatgatgatactaacaatcgtttctctcgaatggtggatacgaaaacgccgtgggttaagttgagacaaaaaacacttgcaataaaatgcctcatttagtatagtttattttttgttt

SEQ ID NO: 274 - DNA, 22661 bp, synthetic construct
  source 1..22661: mol_type = other DNA
  misc_feature 1..22661: note = Synthetic
acattcaaggattctgttgtcgagatcgtctttaaagacacgaattcttttagttggatttatcacctgagcaatatccgaaaggtaaactgctacatgactgattgcctctctatcacggtggaattttgtggatagcacttctaagacctctttaatgatttccctggaaattaagagcgtatcatcgccttcaattattcttaagattgccttctctgccttactaccagggataacaaagacagaaatgaagatatttgagtcaaatacgagtttcactttttaagatatttctcaaggtccttctcagtgagaatacccttttcctttgctttgtgactccaataaccctgaatttgatagaattcctttttcaacctttctttccttgtaatccttaaggcgtcttgaattactgcgctcagggtcttcccttcttcttcggctatcatttccgcctctcttgccagtttctctggaagggaaatagtctttttaattgttgtggctgtcataaatacacctcctattatggtatgaaataatcataccataagtaattttgtaaaagcaactacttcttgttatacataaaactatcagtactatacgcaaattttttagtttattaagcctttttaaaaattttttgcgctaccacgaagagacttgatggattaaaacgacacgcacgccttgatagggggtgggggtatagtttcctatgctccaaataattcctaacaccttaaatgtaagggataacatgttgatttaaagttagttagattgttcctaacagtcgtaacactttttcaaggtataccatggcgtggcgggaatcgtcttaattgtgtgtgtttatctattgcacttcgacacttccttatctttcgtgacaatcgtctagataaagattccggcaacatctagtgatatttttctcagtgtttagagtcatctaggacaaagaacctgacttttttctcatattggcgtgaaattacatgacgtggttttcctttaagcctgctattatatcagctatatcataagccccgaatcttttctacaaaactatgaattccttccttttttttctggtaatttttcatccttttgttagagttttttaattaaaaaacaggttttcttcattgtatactttttgtatatctaataagaaaaaacaaggggtaacaccatataaaatgctaccccttaaaattaatattttccaacaatatcaattattagagaccaacggacaaaaaaatgaataccccctaaaaagaatggcattcaaaaggtcaggggttcgaatcccctcagctccaccaataaaatcaatgatttcaagcatttagcacttcacactttttctcaactgtagtcagattgtggtcggcacagcagccccgtttcgaaaattcacccccttgaaaattaacgatttcctggcaatgtatgcctgaaaaatgacttttttaagcgcaaattgcaaaagccgggggatgctactggaccacaatttccagatttttccaaaaactatggaaatggaaagtgaaaattttggtataaaaaagtcgattttgtttctgaatgggtatggaacttgttaaaagtcagactgcttggcccggtctgcatcagtcttctctgaaggccagtaataagcatccggcgtattacgggcgccaaaaatcgctgtgccgatgcgcaccatgtttgcgccttcttcaattgcgatctgataatcacccgacatacccatagaaagatatttcatgtgtacccggtcgataccttctttgacaaccactccatagatttcttttaacaccttaaaacatttacggatttttacctcgtccttggtaaagaggccgatggtcatgagtccgtgtatttttaatgtatcgtatctggaggcctgtttgattaaggaaatcgcctcttccggtgcaacgccatatttgctctcctcatgtgaggtgttgacctgaaccaaaatatccagggaacggccttcctgctgcagtcgctggtctaatttttcggcgagagacaaccggtccacagaatggatcatgtctgcaaatttcaggacgtccttaaccttgttggtctgcaggtgcccgataaaatgccattctgcatcttcgtcttttaagacctcgtatttttttagcgcctcctgcaccttattttccccgataatgcgtccaccggacttaatggcttctcgtattcgctccggatccaccgtctttgtggccatgaccagaataatttcttcgggctttttgccaactcttgcggcagcgtttgcaatgttttttttcacctgttccaggttttctttgattgacatatgttctcctcaaatatggaatgtctctgacgactgtcagtcgcataacctaaaatttataaaaacaccttttcgataaatgaaaatgaacatatcatattctacctctaagaatcaaaaaagaaagtcttaaaactggcatttgatcaatgcaaacgggtgaacatcccaaacaaaagaaaaagggacaataaacaattggggcatttctcctttgcatatgaaatcatatccttttcggatttttgcaaaatccctgttgcatttggcgctcaaaccatgtaccttgtcagtgatatactacgttaagaatggcagatggacagccaaccatttttaggaagaacctttatgggaaaaatacagcagagtgttatttcatctacaaacctgaaattcacgactccttcccgttgtttcatgggagttttgtttgccgtggctttcattttttgccagcccgcatacggttcgcaaccgcatcatacggaaaagtcatcattctttttacccggaaaatctttccatgttaaagcctgtgaccgtttagacggaaagggagaagcaggcgaaaaaactcatatggaaccggaagatagtcaaaatccgcctgcggttgcccaggttcaagagtccggagcatgggacagaatgtactgccaaaatacgccccccggagattatgatccacaaactactgcctacggtctgcaatccgtcgctaccgccccgactgtagcaaccagtcccgcttcgaatgtaacacataattcagcatcattgcatggcacggtaaatgcaaatggattgtcaacgaccgcatggtttcagtaccggattgccaacggaccatccaaaagcacctttgcaacacaaacggtaattgggacgatagacgcggaaataggtatcaggataattatgctgcttccgggaacgacctattactacagacttgttgcaaagaacgacgccggaactacgtatggaagtgaggtgtcatttactacggcagatatcaatacatctgtcaccactgaaataaccccacccattggtgcgataagcattaacagcggagcttactgcaccaactctttcaccgttaccgcaaacctttccgctactgataataccggtgttacgggttattatctctctacaaatgccacgcccccttctcaatataccactggctggatgtctacaacaccggctaccacttataaagaagacgtcacctatactataagtaacggtgatggcagaaatatggtgtatgtttggtataaggatgcttccggaaatatatcagacgcagccgctgcttctattgttgtggatacaacccctccaataataactattaccgacccaacgtccgatcaaacctatacaaccaaaagtaacgtggtaagcatcagtggcagcgcttcagacgatatcaatgagataagcagcgtggtgtggattcatgataaggatacgagcgggacagaaagaaagaccattggctggactgtgccaaatattggcttagtaaagggagagaatgtaataaccataaaggctacagatagtgttggtaataccggaacggctacgataacaataacgtatgccgaagtcgatgccacaccgaaggtgataacgggacatgcaacaagtataacaactgacctggctaccttaagcgggactgttaatgcaatgggattgccggcaacggcctggtttcaatacggcacgagcagcgaacattacagcggcacttcatcaatacaaagtatagaaaatggcttgcatgaggtacccgtaagcaaccggataagcggtttgcaggcaggaacggcatactattaccgtcttgttgcacaaaatagcgccggcgctacgtacgggaatgaaataacattcaacacgttgccgccaaaaggtaacatttacggaaatgtcgtgtcctttctgaaggaagggcctgttgaatctgcgaaattacagctcaaaggaacaaaggcaaggaaaaaatctttcaaggtaacattttctgatgcacatggatttttcgaatttaaagatttagatgcagatacgtatgatatcacagtaacaaaaactgattttaagagtatgagtcagacggttgagattgaagaaggcgagagaaaaaagattggaattatcttgcaaaaaacaaaggaggaagacaaaggtccaccaaaagatgtcaaaagtgatcaacagaagacaaacgaaacttcacaaatgcacgattagaaagtatacaccctgttaatcaccgtgttttcaacggatgcgaagcagcttcgctttttttgccctatttcagacacttctttctccgctcattatatccttttttatttgtttgcgaattatgggtaatagcaatggtggctgaaaaaaaattcgactaaagacattatctgatttataggaaattctcggaaagaaaataaatttttcttgacaatatatattttattttgtttacaataacagttatacacgtccacatccaaaaatcgcagcaatacgaaacgaaaaaacattacgataaaggtaaaccctgagtgatcaggggacgcaaagtaacagggtcttgaaactcacaaggatgtagtttgcaaagacttgcttgcaataaaaaagatagccttactgccgaagatgtttaaaaaaatatctttgcagtaaggctttttttgttcaaaaatcaaaaaattgtcattcctgcgaaacatgctctcacaagggggggaagtatgggttcattcctttcataaattacaccacttttttaaaaaggagcagtaaaatgaaaaggagaagcaaaatttttgcactatctgccatgcttttattaacagtgttgttcggaaatattcttttggcagaagatgaggttgtaaacaaaccatcacaggaggaagtaaggcagaaaaccatgaaacttcagatgccatttatcgccaacaaggggcaaacggatgaaggggtggcatattatgccaatacctttggagggacggtgtttgtcacgaaagagggcgagattgtctatgttctgcccatgagagatggaagcgctccaggttatggaaacaaaggggaattagtggaggaaggcgctcaggaaccaacgtcagatgggcagcaagaaggagaatcagtcatacatgaggataccgtcaacgaacaatcgggaggagtggcgctgaaagaagtgattgtcgggggaatggcaggcaaggtgaggggggtgatgaggtcaaggacaagggtgagtgatttccggggaaatgacccatcgaaatggaagaaaaaccttgccacatacgagattgtaaatcttggggaggtatatccagggatagaggttaagttgagggcatacgggaataatgtggagaagttattctatctcagccctggggctgatcctggtgtaataaggataaagctccacggggcacagtccttgcgggtagatgaggaaggccggcttgaggcagatacggcgttgggtccggtgaaattcacccgacctgtggtctatcaactggaagacgcttcatctcgtccgggcaaaggcaatttttctccattcctgtcgtcacgagaaggtgacgacatggcgaaggcgatagagggagagtatgaagtaaacggggacgagtacagcttcagactgggagattacgacagatcaaaggggcttatcatagacccactccttgcatctacatttttgggagggcttcctagcgatgatattggtaagattttagctgtagactcgagcgggaatgtctatgtaagcggagaaactagttcttcaaactttcccactactgtgggcgcttatgatactttgtatggttatacagatgtctttatctcccggttcagcagtggtttaacgagccttctcgcctccacctatttgggagggtctgctgctgactatggcaggtctttagccatagactctggcggaaatgtctatgtgactgggtatacgtactcatcaaactttcccaccactgcgggcgcttatgatacttcgtataatagtaatacagatgtctttatctcccggttcaacagcagtttgacaagcctccttgcctccacctatttgggagggtctggttatgactatggcaattctttagccatagactctggcgggaatgtctatgtggcggggtatactccctatactacctattcaaactttcccaccactgtgggcgcttatgatactttgcttagtggtcctagagatgcctttatctcccggctcaacagcggtttgacgagccttctcgcctccacctatttgggagggactaattctgactatggcaattctttagccatagactctggcggaaatgtctatgtaaccggggatacttggtcaccagactttcccaccactgtgggcgcttatgatattttgcttggtggtaatagagatgtctttgtctcccgactcaacagcggtttaacgaacctccttgcctccacctatttgggagggactaattatgactatggcaattctttagccatagactctggcgggaatgtctatgtaaccggggatacttggtcttcaaactttcccaccaccaggggcacttttagaggtgcagtagatgtctttatctcccggctcaacagcggtttgacgagcctccttgcctctacctatttgggagggtccggttctgactatggcaattctttagccatagactctggcgggaatgtctatgtaaccgggtatactagatcgtcagactttcccaccactgtaggcgcttatgatactttgcttggtggtggtgaagatgtctttgtctcccgattcaatagcgattttagtctcttcctcgcctccacctttatcggaggaaatagtactgactctggctattctttagctatagactcaggcgggaatgtctatgtgaccggagatactacctcttcaaactttcccactactgggtttgcttatgatacttcacataatggtggtaaagatgtctttatctcccggctcaacagtggtttgacgagccttcttgcctctacctttttgggagggtctggttctgactatggcaattctttagccatagactctggcggaaatgtctatgtaaccgggtatacttcgtcaccaggctttcccaccacttcaggtgtgtatgatcgttcgtataatagtaatactgatatctttgtctcccggctcaacagtggtttgacgagcctccttgcctccacctatttgggagggtctgctgctgactatggcaggtctttagccatagactctggcgggaatctctatgtaactggggatactaactcatcagactttcctatcgctgggggcattgtttatgatacttcgcataatggtggcagagatgtctttatctcccggctcaacagtggtttgacgagccttcttgcttctagctatttggggggcgctggtactgaatatggcaattctttagccatagactcaggcgggaatctctatgtgaccggagatactacctcttcaaactttcccactactgggtttgcttatgatacttcacataatggtggtaaagatgtctttatctcccggctcaacagtggtttgacgagccttcttgcctccacctatttgggagggtccggtactgattctggcaattctttagccataggctcaggcgggaatgtctacgtgaccgggtatacttactcaatgaactttcccacgactgtgggcgcttatgatacttcgtataatagtggtaaaactgatgtctttatctcccggctcaacagtggtttgacgagcctccttgcctccacctttttgggagggtctgatattgactatggcaggtctttagccatagaaccatttagcggagatgtctatgtgaccgggtatacttactcaacgaactttcccaccactgtgggcgcttatgatacttcgtataatagtaatactgatgtctttgtctcccggctcaacagtggtttgacgagtctccttgcttctacctatttgggagggtctggttctgactctggctattctttagcaatagactcaagctgggttgtctatgtaaccgggtatacttcgtcaacagactttcccaccacctcaaatgcatatgaccgtttttataatggtaaaactgatgtctttgtctccgggctctacggtgatttgacaagcctcatcgactccacctatttaggtggttctggtgatgatcgtggcagttccttagccataagatcctacggggatgtctatgtgaccggatatactacctcttcaaactttccatccactacaggggtgtatgatactacgtataatggtgatagtgacgcctttgtgtcaagagtaataggtagtggtttttaatatgttcttttaaggtgtggaagggattccaaagttgccaggcagcgctgaggcacgaaatattttcttcgtgcctcagtaactttaatgaatgattttaccctctttcaagacgtttcttccccactttaatggttaaaacagtttaaaacgagaaaaaagtgggcaacattcaagggtgcttatccattttaaaaatcaaaaggttcatttgacccactctgttcgcttcatccaccctacctaaataaggcagacaaagatcaagtacgggatggcaaaaatggcctaccgaagacaaacgaaacttcacaaattgttaatcactttgtttcaacagatgcgaatcggttctgctttttgttctatttcaaatacttctttctccactcatcatatcgcttcttcatttgattgatatgtgccggtatatgttcctcatacactttcaaccaatcgtccagggtaacggtttcgttctccattgagccaactgagtttaaccaaaccggctcaggcaatgtcttaataaggttgtacgacgacagacgaagtctcctgaataattccaatgcatcttcagcgctttgatcctgataatgaaacgccgcagaccatttgtcctgatcataggctgcaatggatttcccgggttcagcaatcaattttctgcacttgatatatgcattcgcctcgctgtcggcaatatgcatgataacttcatggatactccagcggtcaggcgaaggtttgaatgaccacatctccttcggaaactgttttaaagcctcagtaagctggacgtaccccttgccatacgattcgattttttgcatccgttcttctctcgtcattaccatcacccttaagttgttttatgataagaaatatagtattgatattttctccaaaaagtctatgataaccataaaaaaagcccctcgtttccgagaggcttaattaggtgccccgacgggtgcggggacatggttttttgcagagccagaaacctggatgcatatcccgcaatactttattatggaaaagcagtgcaggcatttgtgtggtacacactatgggagtattatacctatccattagaatacatgtcaataaaaatggaggtgtttgtggaaaatttcattctcggtcttgatctgggcactaactcaataggctgggcgataatcggatgcgacgaaaatgctaacccttcgcgtctgattgacgcaaactctcgcatcttcctctccatgatggaggcggacggcaaagccccgaagaacaaacagcgccgtgacaagcgactcacacgcaggcaaatcagacgacataaagaacgtagggacaaactacttgagatactcgttgaccaacaccttctccctggagaatttcaccagccatcagactggccgtgtcttctcaaccaaaagggcaaacttcccaatggcgaactgaaagacttccttgccagcaacccctttctccttcgctcagaggcgttagaacgcaacttaacaagacacgagtttggacgcgtattgatgcaccttgccaaacggcgcggatacaaaagcaaccggggtatcaaatatcacgcactgttccgctatattgaagaaaacaaaattggcatccgctatgccgtccaaggagatgaagaacagacagaaacatctgaatatgccaatcagcacggcgacaaaaaagaagccgaagaaaccggaaaggtatgggaaggcatccgtgtgcttaagaggcaaatgaggtcagatgaaactatcggacagtttgccgtcagggttgcacataatgaaaaatggaaaattccccgccgcttgcacaccataagtatggatgaaaccaaaattcccacaaaaggcaaaagtaagggacaggggaaaactaccgcctatcatttgcacgccactcgtgagttatacgaggatgaattttcgcgcatctgggatcgtcaggctgaaaacttttgccacttgctgagccaaacaccggcgcaaattaaaacactcagagaaaaaatcgagcatgccattttccaccagcgtccaccacaactgcaaaagggtaaggtcggcatgtgcactatcagactcaagaaaaaacgtgcggcaactgccctgcttgaatcgcaggaatatttgttgttgcaagatattaataatctcaaatatggcgaagttcgtggcagaggcaaacgtattcagatggatacccaccaacctttgtccgccggacaacggcagcaattattaaatgcattatccgaccacaagcaagttaatgagcaaaatacgctaacatgggatagggttagagaaatacttgaactggatgcatcaatcaaattcaacctcgaaatctccagcaataaagataaaagcggtgaacaaatcaagagcggtaaaaagggtatcaccggtaaccgcaccgctttggcgattgcgcgtgtaataccagaagaatggaaagtctttaccgcagcgcaaaagaagtcgttggtaaatgacctactcaatatccacgacaaagtagctctgtttaaccgcttgcgtaaccactaccggctgccacatcaacgctgcccctggcaattcagcgaccaacaggccttcgagttagcaacgctggaattacctgccggctatatgaaacattgctttgaggttattactgagttgttaaggcattttagacaaggcatgatttacagcgaagctaaaaaagaacttgaaaaagaccctaaattcaaaaatcaatcagaatccggtcaacccaggcacttgggggaaccacccgacatcgccaacccgattgtacaaaaagcattgtatgaaatacgccgtgtggtaaacgccatcatagagaaacagggatgcaagcccaaaataattcgtattgaaatggcgcgcgatatgaaggcatctaaggtacaccgcgcagaaatggaaagccgtaatattgaaaaccgcaagctcaacgaaaaagctaaggaagctatccgcgactggaatcagcacaacccgcatcaaaccatggggctagagccagctaatattgagaaaatcaaattatggatcgaacaacgggcaaagccggataaagaaagcaccacaaaaatcaaactttggcaggagcaaaatcatagatgcctctacagcggcagatatatttctttcccacagattgccgatggagaggtggatatagaccacatctatcctcgcagcctttccggcatgaataattacctgaacaaagtgctggtgttcaagtctgaaaatctcgccaaagaacaaaaaactccctggcaaaagtggggcaatagcgaaaaatacaatcaaattgttaaacgcgcccaggaatggtatggtgggagtgactctcctcttaaagccaaactatacaaagttaaaaacacattagacgaaacctcattcaaggaagaaatgcgtaagttcaccgaatctcagttgaacgacacccgctacatttgtgttgctgttaaaaattatttgaaaacactgggggctacaccgaccaggaaatccaggtttcacgtgggcgtgcaactgctgatatacgccgtttgtgggaactgggcaacatattgcccagggcgaaaagagatcaagaaagcaaaaatgaggataaagagactgatgataacgagattgatgaagccgagggcgataagacaaagaaggggaagaaaaaagaccgtggcgaccatcgccaccatgcgattgacgccatcatcaccgccctgaccgatagaaggacttttgcagatttacagcgccgttatcgttattacgaactcaacagcagttggcctaatgctccacttgaaaaaccaatgcgcgcagacggcaaaccttgggagtcacttcgtcatgatgtcgagcaaatcgtgatgaaccgggtagtcagctttagcgccacccgcaaggcaagcggcggactgcatgatgagcaaccttacgggttgggtcactataaggaaaaaatgccaatcaagaaactgctcaagtctccggacattatccgtaccttgcctgataaaacacctggcaagaaactggaggatagtaatacctggattgccgacgcctttttccgccaaaagctcctggaatggcttgtcaattgggaacgcgcaaagtgtgtgaaaaattttcctccacctctcctgcctgacggcaaacctcttgatactgttgccgtggcccatcgttgctatgtcaaacgcgcaccggttgtcgaagcattgaaacggattgaaaacaaccccggtaagaaaacgtgggttgccaatgacgaattgcgaaatattttacgcaattggctaaggcaaccaggcaatagtgttaaatcagcccaagttaatccacccaccatgccttccaaaaacggcaatggcaacccgatccatacagttcgactggcatcagtctctaccgctatggttcaattcaaaggcaaaccgcagatttttgcaaaggccagtaatcatcacgtcgccattttcaaacgtatcggtacggttgtcgaacgcaaaggtatttttgtggatatgttggaagcagcgaaacgcatcagaaaaccgcccgtcgtgcgaaagtcgccacaggaattgctggcgcttgatccggctgtcaatccagccgaatggcagtttgaaatgttcctatgcaataacgatatggtattgtgggatgttgatgatccggactggcaacaaagagataaaatatatttggatgagaagaatcaccatttgccaatttaccgcttgcagaaaatgacgaaaggaacacttacttttcgtcatttttcggttacgtccactgctgatacggacaatcggggagttcttagacgatcaccaaccaagctgcgctgcaagaaaatacggattaacgaattaggcaattacaatatttgccatgattaaacgaattgtagaaatcagcaatcctgcgcggctttccctgaaaaaccagcaaatggtggttgaccgtgaaggattcgacttagccgcagttcctatagaggatattggcgttcttattctggaccatcctcagatcacccatacacaagggcttcttgcagcttgttctgaaaataatgtcgcgttgttagtctgtagtgagaaacatttgccaagcgctatcctcttaccacttgaaggaaacagcctccacagcaaaattatcgcgcagcaggcacaagttaccgaacccacttgtaagcgtttgtggcaggcaatcgttcgggcaaagattcgtgaacaggcaaaggcgcttctcctttccaccggagatgacagtccccttcctgcttatgctaagagggtaaaaagcggcgatacagagaacatcgaggggcaggcggctcgcatctactggcaaaaactctttggacaagacttccgccgcgaccccaatacccccggtattaacaccctgcttaattacgggtacgccgtgatgcgcgctgcagttgcccgtgcaatcgtcagcacgggactgcatccctccctgggcctgcaccaccataaccagtacaacagcttttgccttgccgatgacttggttgaaccgctccggcctgtggtagaccttaaggtgtatgaactttgtaaaaaacttccggaagaaccggcgctgacaaccgaaaacaaacgggtgttattggaaaccttgagcgcagattgtgtcatgaatggtcaacggctccctttaatgacttcgttgcatcattacgccgcaagtgtgcgaaaggtaatctgcggcgagcataagcgtatggagatccctgcattatgagctttggaggctaccggagcatgtggataatcgtcatgtttgacctgcccactgatacgaagcatgcacgcaaggcttatcatgaatttcgggaggaattattaaatgacggttttaccatgttgcaattttccgtttacgcacgccacacaccaagcgaggaaaatgccgtggttcacgaaaaccgggtaaaaacgtttctaccggaagacggagaagtgaggctgttaaaaatcacagacaaacaatttgaacgtatgaagattttcaatggaaaaacgcgtaaggaaacagaaaaagcgcccaaacaactcagttttttctgaattgttcgggcgcatcacgaagaaatacaataggttacagaaagtctattgtaccacacaaatgcctgcccgcaagccacaacgggtgaattgtccattgctgtcaattgcgctattgtaccacacaaatgcctgcccgcaagccacaacgtatgggggtgtgtttatgatgttcttgatattgtaccacacaaatgcctgcccgcaagccacaacatacaactcattcttgtttgtccttgccatattgtaccacacaaatgcctgcccgcaagccacaacgggtcgattgggggattgtttacacgtgggattgtaccacacaaatgcctgcccgcaagccacaacgaaatggttatccaattcaatcagcagttcattgtaccacacaaatgcctgcccgcaagccacaacttttggcctttgctacgtattatgctattgattgtaccacacaaatgcctgcccgcaagccacaacgaaggtagttagaggtgagtttgagtctgaattgtaccacacaaatgcctgcccgcaagccacaactcctcctctttgcgggtagtttttctctgcattgtaccacacaaatgcctgcccgcaagccacaacatacagaggaagaagccaaaaatgcggcatattgtaccacacaaatgcctgcccgcaagccacaactcgatttcttccctagtgtttctccctgtcattgtaccacacaaatgcctgcccgcaagccacaacctgaccaagtaggcaaatacatcgtttttgattgtaccacacaaatgcctgcccgcaagccacaacgattccttaatgatcgagtctatttcctctattgtaccacacaaatgcctgcccgcaagccacaacaacctccaataagttccgttcgtgattgatattgtaccacacaaatgcctgcccgcaagccacaacttaccgggttggagattgagtttccccagcattgtaccacacaaatgcctgcccgcaagccacaaccggtcttgatgtgatatacatttgtctttgattgtaccacacaaatgcctgcccgcaagccacaacaccttctgcgcatctttaccgaaacgcccaatctctgttgcccagacaagccttgctgcattaacggcatccttgaatcccctctgcatgccaaagagcatggcctttgcctcgccatctactacgccgggagtgttgccgtagtgtgtcttagctgccaggtaccgttccgggatgctggcaaaggcggtgtagaggttagaaaggaagttggtggtatgggtttgtgggttcgagagcaacccgttgatccacgcctccaggaagatgtcctggaggcgccgggttacgggctttgccatttccctggttgtctcatcaatttgctcttgtgactgcaaagaatcctttaataattttaattgctccggtgatatctctccactttttaagatttctaaagcacgtaaaaattcttccgttgcaggcgccgctccgatttgtatcttcccagattcagtcatcctcgccgcttccgtacttgacgctcccatcttactaccaaacattgcggctcttaccattagtattggcgcaatttctttgaggcttttgtttttgggatttaaagcgctagcatcgatcacacttgatgcttcaagaaataattggtttcgcatcattcgtgcagctacttgcttagctgcgctcggcagaatggttccatgctccaaccccataacttcattatagattgttcttaattctttagatgcatcctggagtaattgttcatgagatacttctgttttttccgtgccagttatctcccttacggcttctatcgccgataccataagcgtcttcacgtcaacaccggcatctattttcacaagattcaacccttgctcatctaatgctttttgtattaactcttctggttttaactcgccatattcctttagtttttgctttacaagattgtcgatgtcttctattttactaggtgcgccgccttcgatcttgagatgcctggagagtcgttcgatctgtgcctctgtctcggcgatctcctgtttgtacttttctgcgttttgtttatagacggcctctttgatcttggcggtgacaagcatttgttctatggatgccgtgtctttgttctggatgcctagcttttctacggcgtttttgtagaattgcttgacggtatcctctgaccaattattttgcgttgcgatgtcgttgatttctaaggcgtctgacagtgaaagcttgttggtatctgtgagtgtcttgaggaatggcggtagttctatggcggattgttgcaattcacgcgcatacagttgtgcgttcttcctcgcatcgtcaacgcttatgccttctccggccctgaattgtaccttctgtgcaagcgaatggttgtagagtgcagctccttcgggggttgtgacatatttccacccgataggttttctgtcaacgcctcgtatatcaggcgcatttttggcgctgataagttctgaattagaggcggtttctagttgtggttgctgtggtgtggttacttcctgggagattcctgtttttgttgttgtcgctctttgatcctccgaagcccttccttcacccccctgagcattccctcctcctgataatcgtagggatcgtccggcatcggtggataattctcctccttgttcaatgaggactggaggctgccctctttcgacgtctgttgagtatttttcataacttgcccatcctttctcttgtttaaggatatcataatttttacttggcgtcaagccaagatttaatacataatttgggtcaacaaatcttcctgtcttctggaatctctctacagccctctgggctgcctttccaggcggtaaatctatatagtgcagatttacctgataaccatcactaacaagccaatccctccatcttcttacacgttcaatgtttttcccaacaatcggaagtaccatattcatattttgtttgattgcctctggcgttacgatactatcgacaatatcgccagattctttatgtgtagcccctgaatgtcgaatatctccaaggtaaggtttcgcctcatccgcatcgataacaagggattttgtttctttcgatatggttgtagagtgtagctccttcgggggttgtgacatatttccacccgataggttttccgtcaacgcctcgtataccaggcgcatttttggcgctgataagttctgaattagaggcggtttctagttgtggttgctgtggtgtggttacttcttgggaggttcctgtttctgctgtgcttcccttgctttgaatctcttgagaccttctttcgccccccgtagtaagccctcttcctgataatcgtagggatcgtccggcattggcggatagttctcctccttgttcaacgagaactggaggctgtcctctttcgacgtctgttgagtatttttcataacttgcccatcctttctcttgcttaaggatatcataatttttacctggcgtcaagccaaggtttaatacataattcggatcaacaaatcttcctgttttttggaatctctctacagccctttgggccgcctttccaggcggcaagtctataaaatggagattaacttcataacctctgtctaccaacacatccctcaggcctcttacacgatcaatatttttccctacaataggcagaattatattcttgccttgatccattgcttccggcattacgatattatcggcaatatcgccagactctttatgtgtagcccccgcatgccggatgtcgccaagatatggttttgcctcatccgcatcgataacaagggattttgtttctttcgatatggttgtagagtgtagctccttcgggggttgtgacatatttccacccgataggttttctgtcaacgcctcgtatatcaggcgcatttttggcgctgataagttctgaattagaggcggtttctagttgtggttgctgtggtgtggttacttcctgggaggttcctgtttctgctgtgactgattcttctgtttttccctgactgctctctctattgccctggccaagccctcttcctgatagtcgattggatcgtccggcattggcggatagttctcctcctcgttcaatgaggacgggaggctgtcccctttcgacgtctgttgagtatttttcataacttgcccatcctttctcttgtttaaggatatcataatttttacctggcgtcaagccaagatttaatacataatttgggtcaacaaatcttcctgtcttctggaatctctctacagccctctgggctgcctttccaggcggtaaatctatatagtgcagatttacctgataaccatcactaacaagccaatccctccatcttcttacacgttcaatgtttttcccaacaatcggaagtaccatattcatattttgtttgattgcctctggcgttacgatactatcgacaatatcgccagattctttatgtgtagcccctgaatgtcgaatatctccaagatatggttttgcctcatcggcatcgataacaagggatttcttttctttcgataaggtatggacaaaagaagattttccggaagcaggaagtccgataacaatatcggctgttttgttgttttctacaggccctccaaaaacatcctttccttcctggtctttttcaataaatgacccccggtttaacaaggtgtcggccacctgtttccttaatgtttgtctttccggtgtattaattaagtgtgtctccggaatagtcttttgttcttctcgggccttaatgatttcaggtgtatcgaatgaccctggcggtgatatctctcccttcggttgctcctgggcttgttgggtttgctcacccttgggttggtgggcagtgcctaccctactttgctctgacgtttgttgtgtttcctgcgttacccccctggtaaagggatgaatgatggcgccggttgcagggcctgctatggccgtctggatgatggttcgtttcctggattgagaaaggtcgttataaaattgtttgaaggttttttggggatattgccgggcataggtaatggcgctctggacgatggtgttgatatcctcaccaaatatgtcctgggctgtggatagaaatatccgcttggcgaaagatatccctggttttaacagggtgctcatgggcatgagttcggtgcctatttccgatatggtatgccctgctgccgataaccccgcctttagcgttgatgcgccttctgcttttgcctctccgtattcctgaccacccgatagagcccccatgatgccaagcccaacaaagggattgcccgtagcagccgacaggaaaacggcagggatgttttgccctaccgatactcctgccccaagcaggttttctttgaatgagccagggggaattccttcgtagattctggcgagttctatgtttgacccctggaagacgtcctgaccatattgttttattgattccgatccggtgacgtcgccaatgatctgggcgataccacctattgagcgcgtggcagcaaatgtggtggcttcagggattttctgaaaaacggcaaagaggctgtcggtgggatcgatttctgattttggatttttttccccttgttccccatcgctgagggatttcctccccccgccctctccagagggggacaaatcactgtccccctctggagggggttggggggaggaggtttcttcctgccctgccacctgataatccttcctgatcttctccacggcatccaggggttccatcttcttgtcgatgatgtaggaatggaataccctgagccattttgccttttcttcctcttccaatatcccggcgaattgctgtttgaaatcgaggtcgaagagttcacgggcggccttgtagttggggcgattggtgatctcctggtttctttgcagttcatccatggccttgtttttatccgcaagggagatgccttctgcggagatgatgtcttcttgttttaaactgtatgggtcggagttgatacgatacatgagtttgttgtaaatatccgggtcgctgatttctggctggttgcgtgcccggacgaattgtaccacacaaatgcctgcccgcaagccacaacggaatgggtaaacgagaattgtaaaaatttaacaaaaaaacatccatgagtcaacgaacagaattcatcattaaagcgccgtccactccttgtgaataatgatacgtgtgaaatggagagaagccgtacaggtaatttggttgcgactatgcagcgccatgttataataactgagcaaataagttttggacaatcatcttattgacacggacttatggggaggaagaggtacatgaagggaattttgtcatttgttggggtatcaatactttttggtgttttgggcggcgtaatacaggctcaaaaactggacaaaggggtagggccgtacggtgaattctggaaaccaatacccacacagagatactgggcgccggactatttttattcaccgccggaagaaccaaaagggatttataccgccgatgagtgcacgctctgccataaggcattaaatccaggcctggtaaaagcatgggcagaaagtagccatgccaatctggacaaacttcagggttatcaaaaagaaaaattagccgagatagaaaaaaatcttggaagaaagcttaccaaagtgggttgcatcgattgtcatggaaaggttggggcagaaaaactggatcatgcgaaagaattagtaatgaccagttccaccctttgcggtgaatgtcataaacaagaatatgaagagtttgaatctgaaaaacagtatggtattccggactggaaaccgggcagggaaagccacgcaaagtcatacgatgccaatctggacgtagatgtatgggcagcaacagataaaaatgtcgttcaaggctgcgacatgtgtcataacatccagcacaagtgtgacagctgccataccaggcatgccttcaaggcttctgaatccaggagaccggaggcatgtcaaacctgtcataacggaccagaccacccggacatcgaatattacagggattccaaacacggttctatctattttattgaagggcatacctgggattggagcaaacaactcaaggatgcaaattacatctctcccacctgccaatcctgccatatgtattataaagggcagtattcccacaatatggtcagaaaggccattatgggtgagggcgatgtattgttttatgacaacatctttaaaggaatcaaaccaacggattatattaagaatagcaaggaattaatgtcacggcgagaggcatggattgaagtctgtgtaaagtgccattcaccgagattctcccgggattatctggactccatggataaggcctcggattcgatttttcaatacgtgagcgatgcctatgctacgataaaatccctctatgaagaaggggcgctttatcccatgcccgaaaacaggcccagggcgcctgcgccggtaaccgaaaagtatcctg

SEQ ID NO: 275 - DNA, 19459 bp, synthetic construct
  misc_feature 1..19459: note = Synthetic
  source 1..19459: mol_type = other DNA
  variation 15545..15571: note = n is a, c, g, or t
catatgttataaaatagccggcgggaagtttgactagcttatcaatcttctgttttatctcatccacaatactttccacatctctgttcctcacattgaaaccaatggtaatccttcgttttgtgtcatccctctgaatctgattaggcccttccttaaaagagacatctgctacctgatccagtgggatttgattgccgaaaggtgtatttataaaaagatttttaacatcatcaagacccttgcggttagctttatccaaacggactaccaagtcaaaccttctctctccttcaaataccagccctgccaactctccggcaaaggcggttctaatggtcctgttaatttcagcaatatttaacccgaactttgctattctatctctatcaaattttaccatgatctgcggcaaccctgttaccttttccacgtaaagatcactggtcccttttacggtatttacgatgtttccaacttttgcagcctgttcactcagggcgtccagatcttctccataaattttaagcaccacatcctgcctggccccggtcatcaattcgttaaatcgcatttgtatcggttgctggaaaccaaaagaaactcccggtattacggataatgcctcgctcatcttattggcaagctcttccctggtcttaccgctggtccactctttcttatctttgagaataaccattagatcgcaggcttcaatgggcataggatctgtgggaatttcacctgaacctatttttgccactacctcttttacttcagggaaattttccagcaaaatagcagaagctttgttagaagcttctatggtttcaaagagcgaacttccggtcattacacgggtttcgaccgcgaaatcgccttcctccagagtaggaataaattcacctcccatatttgaaaaaaccacaaggcttgcggcgaaaagagagagagccgataacaacacaatatattttcttcttagggcaaaatggataagcggattgtatagttttcggataaagtttattatcttgtctgaaatattctctttgtgttctgtctttctgctcaggaacaaaaacgacaccacagggacataagttagagataggataagcgcacccagtattgcgaaactaactgtttgcgccattggcctgaacatcttaccctctatacctaccaacgcaagaatcggcaaatagacaatgagtatgataatttgcccgaaaaccgccgagttcatcattctcttagaagcctcatgtacctggctgtccatttgtacttttgatagtctttctattcctccataaatatttttactcatcacaatcctctgaactacaccttcaacaataataaccgctccatccacaattaatccaaaatcgatcgctcccaggctcatcaggttagccgatacgccgaagaggttcatcatagaaaatgcgaaaagcatcgacagaggtattacagacgccactataaagcccgccctgaaattacccagtaacagcaccagtactaaaaccacaattaatgcgccttcagtcaaattcttagtaacagtgccgatggccttattcactaatttggtacggtctaaaaaaggctcgattacgacaccttcgggcagtgttttttcaatctgcctgatacgttctttcacatcttttatgactttagcagagttctcgcccttaagcatcattactatggcgctcaccacttcttttccaccgcgtgtcgaagccccgtaacgcacggcatggccaaattgcactttcgccacatctcttattaacacaggcgtgccatcatcaacagttttaactacaatattaccgatatcatcaagactgcttaccataccctcacttcgaatgaaataagcattgggtcttttatcaatataagcgccccctgtattttgattattttgctctaatgcagtaaaaacatcgctgatagttaaacccatactccgcaacagttcaggtttgattgatacttcgtattgctttaaataacctccaaaactacttacatccgccacacccggcgttccaattaattgcctgcgtataatccaatcctgaatagtacgcagatccatagccgaatactgatcttcgtaaccctcttttgcatgtataacgtattgatagatttctcctaatccggtggtaacaggacccatttcaggtgtgccgataccttcgggaatttgtttttctgcttctgccaggcgttcacttatttgctgccttgcccagtaaatatcagttttttctttaaacactaccgttactaaagacaacccaaagcgggaaaaggagcggatttcctctatatcaggaatggtcgccatagtaatttctattggaaaagttattaatcgctctacttcctgggcagcaagggcaggggtaatcgtaataatctgcacctgattgtctgtaatatccggaacggcatcaacagggaggcgtgcaacagaatagccgccccatacaatcagccccaataccattaaaactattatgagtttgttgtttatcgaaaaagatattattttatcaatcatttgatatcaacttctttcctgatactgtttcaaggtttataatggccatgttataagcaagcaaggtatttaaatatgcaaccctggtttctataagatttttctgcatcgtaagaaattcaataaagctggtattaccctcttgatatgagatttcattcaacttcaggctttcatcaacctgtggcataatttcatcagtatagatggctataccaccttttgccgccataaaggtttgatatgcagtctccacttccttttgaatctccagatacctgttctttatgtttatgttagctacatctttagcggttctggcctttttaagttcagattgtttcctgtcccatattggaattgatatagatatctctccgcctaaaatatcatctgttccggattcccttgtaaagaatcctgaaaggtcaggatttggaataatctcaaccttccgtagtaatatttcctgagaagctctttccttctcaaactcttctgcccttaagtcaggtctttctttgtaagcagaagtcagaatatcttccatgtttatctgtaacttttcgaagcgcatctctccctcaatatttaatacttcatccgctggttttccgagcaggagtttcaggttcaggagactgttttgatagttactctttgcgacaaggagttgttgctttgcctgcccataacctatttttatagagttgagttccagtgcggctattgctcctgctttatatctttccatcgttgcactccatagcttttcaaatatgccttcgacaaagctccgaagttttacaatttctaaagaagttaaaacctcataaaaactactcttgacgttagcgataacttctctttctacgtcagcaacttcaaattttaccctctctatattcttctcagctacgcgtattcgtttgcgcctttggccaaaaacctcaaattcttgagataatgcgatggtatagtctgtatccctccctgtagatgatgactctctagcgccagtttcgctttccagttttggatttgtaggtaaaagtaatgatgccttaatacgttcagcctcggctaaatctaatctctttcgtgtagcggcgagctgtaaattattttcaaacgctattgtaatacattctttgaggttgacagttttagtattttccactccccgcagggccggatcagtgacctgagccgttaatttattagaagtcaaaaagagtacggatgctattaatgtgacgacagtcacatatttaatgtgatgtaccggatatatcattattacctcttgttaaaattgcatacgattgatgcacttaatctccacaaaacagctaaaatttatgtataggaatttcaatgctgtaacaaaatgtaggggcgtacccgcctgcccgcccggcaatgccgttcgccagcccgacaatcattctggcggggacgggtacctacccgcctgtacctattcgggcaggttcgggcaggtataggtcaggcatcttgcctgaccgcaagctgcaccgaggcaggatgcctcggctattttatattttaaacaggaaaccacttgaatgagaatggaatggttaaagagttgattgtggagggcgaaagagggtttttgcgaacagttctttgtaaagaacgtcttcagttgttgaagacagttgagatgtattgttgaaatgaagaataactccggttgactgatttgtaaaaaaatgtgaaacagtacaacagacagcacaatggtgaaaaggtttatcgggaaggataggacagttatgttcatcacaagagttcgttccttctgaagaagcagaacctattcttacactatcagaagtatcttcaaatgaaaaaacaacctctggaaagattgaaaagattaaaactaataccaaacatatccttaataaacgtattttcatttttataaacaccggattaagatatatacttcaaattactgaatgtcaaggccatttattatctgttcgggattatggcagacaagtgccctggcctctttttccccaacaatattggcggcacattctactgccttagacaggattggaggcctgcctgcaagtgaatgaacatcagaagcaataaaatgcacaagtctatttcttaaaagccactcggcacattttctttccctgggacctgcctgacctgtcacactcggtgcgttcacctggacacgggcgccaatattgaccaattgactcacaagttccggatttttttggaatgttgatattctttctgcgtgtgcaatgattggaataataccattgaccttgagattgaatataaatttatcggtcccgggaggtacgaagacaaagggaagttcaaaaaggatgaactttccaccattattgattgtaagcacctcaccgctttttacactttctaccagtccttcatgaatatgtatctctgcaccgggaagtatttcaatatcaatttggttttctttcaacttaaggttaagcgcatcaaccgttttcagaatctcatcgctttttgcctcgtacactccgtcctttgaatgaggtgttgccacaatcttcttaatcccatcattcgcagcaattttgcaaagttcaaccgcctcctcaattgtttgcgggccatcatcgaggaaaggaagtacgtgtgcgtgtgtatctatcataaaagagaccttttttataatttctgtaagtgtctgattttgtgtttgttataacattgctattttataacataatgagttataaatccaatcaaattatgacgactcggcttcccactaccttgaatcaggatggttctggtacagataccgtctacagtaccagttctttcaacttatctacaatccatatcatgccttctgtgtccaggcggcaatatttttctaaatctttcctgactttcatcctttctctttctgaaacattgccataaacaaacactcataaaaatatttattttacacccaaattgagcgattttgtagccgcaaccttgaggttgcgaaacttacgtagctacatcaagtgatgaaaaacgcaggctaaagagccattggctacaacggcatgtaatataaaatcgctcaatttgggttacattttctgaaattatcttgtcttacaaagttataagttaaaaggctaaagccttaactccttcccggatttaacccttcccgcccgtaccgaacggtacctattcgggcaggaagccattccgctacatttgtaaatcgtagttcgccagtagggcgctaaatttaatgacaatatgaaatataaatgttttgggtaataattgtggaatattacctataaccactattatttttttattactctttctaagtgtaccagaattgtcttcggtatcacattgataaacttacacttaaggatagtttgaaggataatttttttagtatgtgtatttggcacgtagtgtgcgattttaaaaaggagacaccttgtggaagatagaaaggtttgatcaaaaacaatattagaaaaggagggatatgaatcaagaaatagatgtagcgcaattttaactttatccatggatttaaggataaagggggataaaagccaaggggggagtgttggggtcacgtttccccttggctgaatatcctttttagctttgcatattgttttcaggtcacagggagcatccttgtctgcataagcgctgctaccttatagtatgaatcactgcaaaacccactataagtagaaatccggatcattattccatgtaatgaatagaagagtattcagtaactactcaccaaccatctgtgtaaccagatttagcctcctcgggcggttatcaaaatctatcaccactacctgctgccatgttcccaacatgagcttgccgttatcaaaaggcaccggggggtgaaggaagaaaccagcaaggctgcccggaataggtacgggcgggcgatgtgcattctggcggggatggaaatctaaaacattattttgacgacattctcatctctttgaaggcatttattaatccatttgtggaagaatcgtgggaatcaacctgtttactatctcctaactccggcagtatcttctttgccagttgtttgccaagctcaacaccccattgatcaaaactgaaaatattcaaaattactccctggacaaatatcttgtgttcatacattgctatcagactgcctaagactccgggggttaattttctgaacaggattgaattcgttggcctgttgccttcaaagactttgtgagggcataatttctgaatctcatcatcgcccttgccgtctctttttaattcttcgataacatcttctctggtttttccattcagaagggcttcagtctgtgcaaaaaagtttgataataaaatgttatgatgctctccaattgggttttggctgattacgggcgccaggaaatctgccggaatcatctttgtcccctgatggattaactgataaaaggcgtgctggccatttgttccgggttctccccaaataacagggcctgtctgataattaacttttctcccgtttctgtccaccgattttccgttactctccatattaccctgctgaaaatatgcagggaacctgtgcatatactggtcgtagggcaagatagcttctgtctgtgctccgaagaaattgttgtaccagattcctattaaggccagaacaacaggaatgttcttatcaaatggggcgtctctaaaatggttgtccatttcaaaggcgccctgcagcaattcggtgaagttttcatatccgatataacacgctatagacaggccaattgccgaccagagggaatagcggccgccaacccagtcccagaacacaaacatgttatctttgtcaataccgaattcttcaactttttctatattggtagaaattgccacaaaatggtttgaaacacgtttctggtttattgcgcattttagaaaccactctctggcggtaaacgcatttgtcattgtctcctgagttgtaaaggtctttgaagcaatcagaaacagagtggtttcgggatccagttgtttcagggtttctgttatgtgagttccatcaacgtttgagacaaaatgaactgccaggccatcttttgcataaggccgcagacattccgttgccattacgggacccagatcggaacccccgattccaatatttacaatatccgtaatctttttaccggtaaaccccttccactctcctgaaacgattttatttgagaaatctttcatcttatttaagacggcgttcacttccggcattatgtctttgccattaacacaaatggggttattttctctgtttcgtaaagcaatgtgcaaaactgccctatcttccgtctcatttatcctgtcaccggaaaacatcttatcaatcgcatctctcaaaccgacattatcagataattcaagtaatagctttagtgtttcccctgtaattatgttcttggaataatcgacaagtatatcattaaacctgatggcatatttgacaaacctgtccgggtcatcagcaaaaagatctttcatgtgaatattcttcatctctttgaaatgaccgatgagattcttccagctttgagtttccgtaggattaatttttttcaacatgtcaaattccttgtgtaaatagtaagggatgcttgatactcaatattccttttaatgctggttcaatcttgcccgccagaatgctagtcggactggcagattgaaccgaaatatttaggttcagactacccgacaggcaacgtccttcaggtgggcaagcctgaaccagcggcagattgattggttgcttatcacagcagcaatagaatgagaaataagaaaaattattactcattaagtgacggcattatgaaatattgagacgttaaaagcaagtgataaattggcaagacggaagtgataaaaatcgaagccgaccgcttttcctatgagctaacaggagatagccagagcatgatcagcgcccttgtaaaactttcaaaagacaacctctgtaatagttcagctacctcagactggatgaacaggattaaccccgttagataaaggaatgccgagttcctgtttaaagctttacgtggtctatctaacggggtctatcctgttatcttgtcaaatctttttcctccggtgaactattaccaatctctcttgccccttcttcactggttcaatcgtcctcgattgaaccaggacatttggcatgatcacgtttcatagcacgagtttaaaatctggggtaccttcaaaatatgtggttcaatctgccagtccgactagcattctggcgggcaagattgaactggcctagaaatgaacgctatcagagcatatgcaagaaataatacaaattcggcttgaaatatagtatatatattcataaaatatatatgcttataaatacaataattttgtggagcaaatacatgtcaagaactaccataacactgcccaattctttgttagacgaattgatgtcagagattgaggcaaaaagcaaaacggaagctgtcataaaggccattaaagatgagatacggacgaaaaagatggaaaaaataaagactatggcaggcaagatggaattcataaaatcagcagatatacttaggcatgaagatgaaagacttagataggattttagtcgatacatcagcatggatcgggttttttaggaaaaaagacccttactacaaggttattctggaattaatcgataccagcaaggtctgttgtctgggaattatacttgcagagttgttacagggggcaaagtcccaaaaggaacttgatgttttaaaggaatttttgcatgtgtttgattttctccaggaatctaccgaaatgtggagaaaagcaggcgaattatcttatctattgcgccaaaaggggaagtctgtcggactctcagattgctacatttcagtagtggctaacacaaacgatgcaacactcttaacactggataaacattttgaggtcattgaaaaagaaacaggattaattttatatggcttcacataataaacgcttttgatgcaatggccattctaaaattaaaccaacctaagaaaaacacgccacttgattttttaacaaagtaatagtaataaaaaaagccccccgtttccgggaggcttagtaggtatccccgacgggtgcggggacatggttttttgcagccagaaacctggatgcgtatcccgcaatactttattatggaaaagcagtgcaggcatttgtgtggtacaatattgtgagtattatacctgtccattagaatatatgtcaacaaaaatggaggtatttatggaaaatttcattctcggtctggatctgggcactaactcgataggctgggcggtaatcagatgcgaccaaaataccaatcctacgcatctgattgacgcaaactcgcgcatcttcctttccatgatggaggcggacggcaaagcttcaaagaacaaacagcgccgtgacaagcgactcgcacgcaggcaaatcagacgacataaagaacgtcgggacgaactgcttaagatactaattgtccaccacctgcttccctgtgaatttcaacaaccatcggactggccgtgtctcctcaaccaaaagggcaaacttcccaatggcgaactaaaagacttccttgccagcaatccatttctccttcgcgcagaggcgctagaacgcaacttaacaaaacacgagtttgggcgcgtgctgatgcaccttgccaagcggcgcggttacaaaagcaaccaaggtatcaaatacaacgcactattccgttatatcgaggaaaacaacattgacatccgctataccgatcaagaagatgtagaacaggcagaagtatccggcaataccaatcagcacggcaacaaaaaagaagccgaagaaaccgggaaggtgttgggcggcatccgtaaactgaagagtaaaatggagacaaacgaaactatcggacagtttgccgtcaggattgcacaaaatgaacactgggaaacaccccaccgtttgcacaccataagtatggatgaaaccaaaactctcacaaaagggaaaagcaagggacaggagaaaaccaccacctatcatttgcacgccacccgtgagttatacgaggatgaattttcacgtatctggaatcgtcaggctgataacctttgccgcttgttgaaccaaacgccggaacaagtcaaaacactcatagagaaaatcgagcatgccatcttcgatcagagtcccccacaattgcaaaagggcaaggtcggcatgtgttccatccggctcaagaaaaaacgcgcggcaaccgccctgcttgaatcacaggcatacttgctgttacaggacattaacaatctcgaatacggcaaagtctctggcaagggaaaacgtgtacaatcggctaccatgcaacctttgtcagccgaacagcggcagcaattattaaatgcattatccgaccacgggcaagttgataaagaagacaggctaacatgggatacgattagaaaaatactcagactggatgatgatataaaattcaacctcgaaatctccagcaataaagataaaagcggagaacaaatcaagagcagtaaaaagggcatcatcggcaaccgcaccgctttagcaattgcgcgcataataccagaagagtggaaaggtatttccgacgcgcaaaaacacccttgtaaattcacttatccacaaaaggcgttggtaaatgacctcctcaatatccacgacaaagtcgctttgtttaatcgcttgcgcaaccactaccgtttgccacctcaacgctgcccctggcaattcagcgaccaacaggcatttgagttagcaacgctggaattgcctgctggctatatgggacattgctttgaggtcattactgagttgttaaaacattttagagacgggcttaattacagtgaagctaaaaaagaagccaaattaactaatcaattagaatccagccaacccaagcacttgggagaaccgcccaacatcgccaacccgattgtgcaaaaggcgctgtatgaaatacgccgtgtggtgaacgccatcatagagaaacaaggatgcaagcccaaaataattcgcatcgagatggcgcgagacatgaaggcgtccaagacacatcgtgccgagatgggaaaacgcaatgaagccaatcgtaaacttaatgagaaagccgccgatgctatccgcgaatggaatcaacacaacccgcatcaaaccattgggctagaacatgccaatattgaaaaaatcaaactatggattgaacaacgggcaaaaccagataaagaaagcacaactaaaataaaactttggcaggagcaaaatcaccaatgtctctatagtggcagatatatttctttcccacagattgccgatggagaggtggatatagaccacatctatcctcgcagcctttccggcatgaacgattatctgaacaaggcgcttgctttcaaatctgaaaatctatccaaagggcaaagaactccctggcaggcgtggggcgatagcgagaaatacgatttaattgtcaggcgcacacaagattggtatggcggcaacgacaccccgctcaaagcaaaactcaacaaagtcatggacaaatcagacgaggccgccttcaaagataaaatgcgcgaatttaccgaggcgcaattgaatgacacccgctatatttgcgtcgctgtgaaaaattatctgaaaaaactgggctacaccgaccaggaaatacaggtttcacgcgggcgtgcaactgctgagattcgccatttgtggagtctggataccatattgcccaagacgaaaagagatcaagaaagcaaagacacggataaagagcctgataataacgaggttgatgaaacagagagcgataagacagagaaggggaagaaaaaaggccgcggcgaccatcgccaccatgcaattgatgccatcataaccgcactgaccgacagaagaacttttgcaaacttgcagcgccgctattgccactacgaactcaatggcacatggcctaatgctccccttgagaaaccatgggagacgctccgtcgcgatgtagagagaatcgtgatgaaccgggtagtcagctttagcgccacccgtaaagtaagcggcggactgcacgatgagcagccttacgggttggggcactatgaggaaaaaatgccattcaagaaactgctcaagtccctggacattatccgtaccttgcctgataaaacaccgggtaaaaaactggaggatggtgatacctggatagccgaccatcttctccgccagaaactccaggaatggcttgtcaattgggaatgcgcaaagtatgtaaaaggctatcctccacctctcctgcctgacggcaaatctctcgatactgtcaccgtagcccgtcgttgctatgtcaaacgtgcatcggttgtggaaggattgaaacggattgaaaacagccccggcaagaaaacgtggattgccaatgacgaattgcgaaagattttacgcatttggctgaagcaaccaggcaatagtgttaaatcagctaaagttaatccacccaccatgccttccaaaaatggcaatggcaacccgatccgcacagttcgattggcctctgtctttacctccatggttcaattcaaaggcaagccacagatttttgcaaaggccagcaatcatcacgtagtcattttcaagcgtgtattgaatggtacgattgtcgaacgaaaagggattctcgtggataggttggaagccgcaaagcgcatcaggaaaccgcccgtcgtgcgaaaatcgccacaggaattactgtcgcttgttccggcgatcaatccatctgaatggcagtttgaaatgttcttatgcaacaacgatatggtattgtgggatgttgatgatcctgactggcaacaaagagataaaatatatttggacgagaagaatcaacatttgccgatttaccgtttgcagaaaatgacggaaggaacacttacatttcgccatttctcggtcacgtctactgctgatactggcaatcgtggagtcctcaggagatcgccaaccaagctgtgctgcaagaaaatccgaattgacgagttaggcgactacaatatttgcaatgattaaacgaatcgtagaaatcagtaatcctgcgctactttccctgaaaaaccagcaaatggtggttgaccgggaaggatttgagtcagccacagttcctatagaggacattggcgttcttatcttagaccatcctcaaatcagccatacacaagggcttcttgcggcatgttctgaaaacaatgttgcggtgttaatctgcaatatgaaacatctgccgggcggcatccttttgccgctcgaaggcaatagtctccacagcaggactatcgcacagcaggcgcaaattacagaacccacccgtaagcgcctgtggcaggcaatcgtccgggcaaagattcgtgaacaggcaaaggtcctgcttcacgccacaggcgatagcagcccgctccctgccttcgccacaagggtcaaaagcggagatcctgataatattgaggcacaggctgcgcgcatctattggcaaaggctctttggctcaacattccgccgtgattatgaagcgcctggcattaacagtctgctcaattatggttatgcagtgatgcgggcggcagtagcccgcgcaattgtaagcacaggcttacatccctcgatgggactgcaccaccacaaccagtacaacagcttttgccttgccgacgacctgcttgaaccgcttcggcctgcagttgaccttaaggtgtatgaacttttcaaaatgcttccggaagagattgtattgtcgcttgagaataaacgagcgttactggaaatcttgagcgcagactgtattattaacgaccaacggctgccattaatgacttcgttacatcattacgccgcgagcgtacggaaggcgatctgcggtgagcataagagtgtggagatccctgcgttatgagctttggaggctaccgaagcatgtggataatcgtcatgttcgacctgcccaccgacactaaggcggcgcgcaaggcttatcatgaatttcgggagaaattattgaataacggctttaccatgcttcaattctctgtttatgcacgccacagcccaagcgaggaaaacgctgtggttcatgaaaaccgggtgaaggtgtttctgccggaagatggggaagtgaggctgttaaaaatcacagacaaacaatttgaacgtatgaaagttttcaatggaaaaacacggaaagcaacagaaaaagcgcccgaacaactcacttttttctgaactgttcgggcgtaacaactggaaatacaacaacttataaaaggcatattgtaccacacaaatgcctgcccgcaagccacaactccggattacgcgggcgttttgaaatcaatgtaatttccagagatgccagcaactataacgaagtttataagatttttgaaagtttatggaaagaatcagttttaatagttaataaagataatattgatgattttctatacaatgtaatcgagcgtatatggtttgataaacttccaaatccgtttttactttatgtgcgtgttttggaagaatatttttcggaaagaggtcgtgaattcatacgcctgcccggagagattacaaggaataagtatatcaatttgaaataccagattgatgctataaagaaagccattgatatcttaaccagacataacggtgtcattatcgctgatgttgttggccttgggaaaagtataatttcttccgcagttgcgcataatttaaatcnnnnnnnnnnnnnnnnnnnnnnnnnnnatttagtagatcagtgggatgattatcggtacgattttgagttcaatgccagggtttatagtagcggaaagattgaacaagtcttaaaagaaagtgagagcgaggaagaaagattaattattattgacgaggctcataagtatcgtaatgagcttacaatcgattatgcaaatcttcacaagctatgtcagcgtaataaagtcatattactcactgccacgccttttaacaacagaccgcaggatattttttcaatggttaaattatttcagttgcctacacgctctactattcaaacggtagagaacctttcttatcaattcaaaaaattagttgcagaatatcaggagattaaaagaattcagaaagatagaaaggaaagcgatagctctatatctgctcgtgttaagagagtagcctcagagatcagggatatgttatatccacttgttatcaggcgttcccgcttagatttagatgcaattgaggaatatagagatgatctgaaacatcaaaagatttctttcccaaaggttaacgatccacagattttagagtattctttggatggtcttagcgatctgtatgaagaaacgcttgaaacaatcgcaccagacgaggaaggtggaggatttataggtgcgcggtatatgcctacaagttatatcaaaaatttcgaaaaatatcgcgaccgaattgccaaagagatgggcgttgatgaaaatctcttaaaacaaagccaggtaaacctggcggattttatgaagcgtttactggtcaggcggtttgaaagctcgatgtttgcctttaagtcaacgttggaatcgttgattcatcattctgaggtaatatgtgattggcatgaaagattgggaaaagttccagtatataaaaaggggaagttgcctgatttaaattcactgttagaggcagccggggaagatcttgaagaggaattaaaagatgtaattcttgagaaagaactggcggagtataaagaaaaagggttgtggctaatcgataggaatgagttaagaaagaaattcatcgaagatgttaaaaaagatatagagatattaaaggatattcagcaacgatggtttagtaacggactccccgatgatcccaaactcaaacattttatggagatgcttaaagacaggcttgcaaaagatcccaaacggaaaatcgtagtctttactgagttttcggatactgccgaatatctggaggataatcttaaagacgaactcagggtttttaagtattcagcccgggatgcaactaaaaagaataaagaaataatcagagaaaattttgatgcaggttatagaatccaaaagaatgattatgatgtcttaattgccactgatgccatatcagagggttttaatctgcatagagcaggcatcgtttttaactacgatatcccctacaacccaaccagagtcattcagcgcgttggccgcatcaatcgaattaacaaaaaagtatttgatgaactttttatctttaatttcttccctaccgcaactggagagcaggaaacacgaatacgacaggtttccacgctgaaaatagccatgattcatgccttgttcggtgaagatacgaaggttttgaccagagacgaagagcttaactcttattttgttaagcaattccggcaagccatgtcagatcaggaagaacttgcgcctgaagctgtatatgaaaactttatcaaaaaattgaggatttcaaatcctgagattgttgaagaggcattaaaattaccgaagcgatgtcgtatcaggaggactgtaaagaaagacactaaaggtgttgtcgtttttggcaaaaaaggtgaggaatacgcttttaaattgggcacaaattctgaagaggagcctcaggcattgacgcttgtcgaagccttgcggttgttcgaagcagatacggcagaaaaggcagagaaaacttcaagctcattcccgccaatatacgaacatgttatgaagaaactgttttctaaaaagacagcggttgccttagaccgtggcaagagggagacgatattaaaagtagaggcattaaggcagaatttgcctgagcagaaggattatctcgaagacctttactatgttgtgaaagatttagacgcccttcccgatagatttgccaaattgattcgttcaattgaggcaaaaaatttggaagatgactttaaagatttgcaaaatgaaatccctcacagttatctcttagacattattgaacgggaaagaagaatagaagaaggtaaagaatccttaatcctgtctgaagaattaatatgaaacatccatgacctgacggtcacaaaaggaaatgaaaacatcagccacagaggtctcagagagcacagaggtgtaaaagattttattttttctctgcgaactcggtgtcctctgtggcaaagaaggattttcagatgaaagtgatagatttaaaaactccgtactctcgtaacagttttatatcgttttttagagaccatcttcttccggaggattttaatatccttgatgagcatataagctttggctttcagtccaattattttcaagctgtctcgaaaatcggtgaaataccttctcttgatcttactatttatgaaataaaacaccatgcggaaagcgaccctcgtgtgtctttatcaagagattctttccgcttgctttcccaatacggtcagcagagggcgcttatcttatttatatccgaaaaaacaggtaattaccgtctttctcttgttactattgatttaaaatgggaagaagggaaaagggttaaaaaggaatactccaatcctcgccgttattcattttttcttggccccgattcaagaacacatacccctgaagaatatttgttaaaacctggcagaatcaaagattttgaagatctcaagaaaagattctctatcgaagtagttaacaaagaattttatacagggattgccatactatttactcagttagcaggcgggaaacgtgctataggacggcagaagtttgatgaaagaggcatccttgtgctcccttcaacaaccgatgataccctgcgtaaggaatttgccgttcgtctcattggccgtttagtgttctgttggtttctaaagaagaagcgttcaaaagcagggatcagtttgttgtcggaagaaattctatcctctgaggctgttaacaaagcaggcctgcctgtgcgtagcacgcagacaggcaattccccgataaacctgtccccgaatgttttaatcgtgggaacattcggggacaagtattaccataatattcttgagccgcttttctttcaggtcttaaacacaccaactgctgaacgtaagagaatctatcaaaaagaaccctggtctcagattcccttcttaaacggcggtctctttactccgcatcaacacgatttctacgtcccgggagtgatggatatatccaggcatatcaatacccttaaagcgcctgacagatggttcaaagaactctttgaactttttgagacctataatttcacaatagatgaaaatacctcgatggatgttgaactgtcaattgatcctgaaatgctcggccgtatctttgaaaatcttcttgctgagataaatccagagactggtgagacggcaagaaaagccactggcagttactataccccccgtccggttgttgattacatggtggacgaaagtctaaaacagtgtttacttacaaaaacaaatttgaatgaggagacaatctctggtttattagcttatgagatcgaaggcgtatctttatctgacaggcaaaaagaggaagtgataaacgcccttgacacaataaaagtccttgaccccgcatgcggcagcggggc

SEQ ID NO: 276 - DNA, 4915 bp, synthetic construct
  variation 147..148: note = n is a, c, g, or t
  source 1..4915: mol_type = other DNA
  misc_feature 1..4915: note = Synthetic
ccatcctgctgtttttaagtctttctccctcctcagatgaggagggggcagtgggggtggtgttgagtttttaagcactttcctatagacagacagtattggaacccccctcttccccctcccttttaacagcccctgcttttcagnnttgcgacctaataggtcgccactactagatcttaggttctctccttcagtaccccccctgttgactggattttgattccctgggggactcataatattgactctttctgaacttcctgatggcttttactgacttttgacattctaacttgctaagagaataaattgatacgacctcatctgtcgtaattatgatacttggatttgacaattacccatgtaaaggaataaattattgatggataaacctaataagggggaaatactcatgaaatacacattaggattggatataggtatcgcatctgtgggttggtgtgtgatcaatgaagatactcatagaattgaagatttaggggtaagaacctttgataaagcagagaatcctaaaacaggttcctctttagccgaacccaggagattggcacgggggctcagaagacggttacatagaaaattacaaagaatgttggatgttagatacttactaacttcatcgaaaattatttctcaagatgagctagataatttggtattaactaagaacgaaattaccccttatcaattaaggtcggaaggtttagacagggttttaaaatatgatgagtgggcaagggtattgattcatctggctaatcatcgaggatttaaatctaacagtaagcgagaattaaaaaagaaaaatgatgaatccgggaagatgaattcttcaatcgaagcaaatgctgccttgatgattgaaaagggttatcggacagcaggagaaatgctttataaagatgagaaatttattgagcataaaagaaataaagctggtagttattcaatgacactttccaggggactcctagaagaagaaataaaaaccctttttgaatgccaaaataaatatgggaatacgggtgcaaatccagaaatagagaataaatatttggagatatttaatcggcagaaacattacgcatctggaaaccagattttcaacaaaatcggtaattgcacttttgaacctgaagaaaaaagagctcctaaacgaagttacaccactgaacgttttaacctgctacagaacattaataaaacaacttattattttgagggaaatcggctgttttttacccctgagcagagagaaatattgattaatatggcctattccaattcaactggaattaaatacagccaaatcaggaaaaagcttgaattacctgaagaagcaagttttgcctttataaattattcatcacgaggaaaaaaagacaaagaccctgaaaatcaaatgtttattgaactaaaaggttttcataatattaaaaaagctattgtaagtactcatggagaaggggtctggaaggattacctggctcatcctgataaattggatattattgctgaagggttaaccttttataaagaagataacgatgtaatatcttacttgtcacaggcaggaataaccgatggtattgccgaatcaatattagatattactgaaatatccggcattcaacacctatctcataaggccatgaagaagatgatgccttttcttgaagaaggtaaattatacaatgaggcagctgaattagccgggtataaccatactcaaccaaacattaatggagaaaaagatattttattaccattaattccagctgaagatataaggaatcctgtggtaataagatctctgacgcaaacccgcaaggtccttaatgctatcatcagaaaatatggttctccttatatgattaatattgaattagccagagagatggggaagagttttgatgaaagaaacaaaatagaaaagagacaaacagaaaataaaaatgaaaaagaccgattgaaagaagagattagaactgagtatggggttgatcccaggggagcagatcttctgaaatatcgtttatggaaagaacagggtggcttctgtgcttattctcaggcttacttagaccccaaaaaattgtttgaaccgggatatgctgaaatagaccatattattccctggagccgaagttttgatgacagtttcaacaacaaagtcctggttaccggtgaacagaatcggataaaaggcaatcagataccttttgagtattttggtaataatgctgaagatgataattggttgaattatgttggttgggtaaatgcgaatattcgaaatcataagaaggtgtataaattactaaaaacatcctgtgatgcagctgatagccgagaactaaaggaaagaagtttaaatgatacccgctatataagttcatatattacccaatttatcaggcagaatctggcttttgcagagggaaaagaaaaaaatagggtcagaactgtaaatgggcaggttactgctgttttaaggggtcgctggggattggttaaaaatcgggaagagggagatttgcaccatgcattagatgccgctgtggttgccagtgttactcctgccatgatccagaaaatgaccctttattcaaaatggggggagttatacagagttaaagaaaagaagaattatgttgaccctgaaacagggaagcccatagaaaatgttgagtttggattctctgataaagaccactttcccatgccatgggaaaaattcagatatgagttaattgccaggctttctcccaatccatctgagggaataataaaacttaaacttgatacctaccctgaagatgatatagagaaaataaaagctgtatttgtttccagagcacccagccggaagatttcaggacctgctcatgaagataccattcgcagtataaagcctcttaaagatggagaaaaatatactcttgtaaaaactgacttgaagaaagtaaatttagcttctttagaaaatatgtatggcaaagatagggataagaaactttataatgaactaaaaactcagctggaattaagcggagataatcctaagaaagcttttgctgaatatattcgtaaaccgactaataatggaaaaaatggtccaattgtcagaagcattaagcttatggtctctggtatcagtggggttcaggtaaataagggattagctcataatggctcaatgattagagttgatgtgtttatgaaagatagtaaatattacattgtacctctgtatgtctcagatttagttaataaaatattacctaataaggctataaaatcatttactgacgaagaacgatggcctgaaatggacgagaaatatagatttatgtttagtttgtatcccaacgatttggtatatatcgaaaccaataaagaatcatattggggctattatattaaaacaggcagggcatctggccagattgttattgaaaatcatgataagagtcaaaatccatttgttcttagtatttcatcatgtaggacaataaaaaagttcaatattgatcctctagggaaaattaataatgtaaaaaaagaggttcgctgtgggatggagaagcctgtatataagcaaaccagctaaagtatcttttcgggataaccgtttggtcataaaccaggaggaagagttcagtattccactggaagatgtcgattctattgttgttgattcaggagaagtatcctcaacctttgtccttatgagtaaattggcagaatatggcatctccctttttacctgtgatgaaaaacatattcccaacggaatattgattcctttccaccaacatagccggcaaaacaaagtaaccgcgacacagattgaatccagccagccattcaagaaaagatgctggcagagagttatccaaaagaaaatcttaaatcaatcactttgcctggaatatgcagggttaaaggattatatggaaataagagccttagctcactatgtcacatccggggatgcttcacagaaagagtctcatgcttccaggctttacttttcaagactattggaaggcataacccgaagaaagcaacatatattaaacagtggattaaattatgggtattcaattttcagagggactattgccagaaccctttcttcttatggatttattccctgtctagggatacatcatgacagcgaattgaattcttttaatcttgccgatgactttatcgaagtgtttcgccctttggtagatttatgggtaatcatgaatatccccagagataaagaagatcttacccttgagcagagagtcggattggttaatttactccattatgatatggctatggttgatgggcattatcctgcccttatgtctatagaaaaaatgattggcagttattcaactgccatgtttgaaaaagatgcttccaggcttgaattacctcaattaattcctttggaaaaacatcaatatgagtagtcagaataggcggtttatgagagttatggtgttttttgatttgcctgttgctcttaaatcagacaggagaatctatcaaaaatttaggaatttccttctgaaagatgggtatgatatgattcagttttcggtctattgccgaatctgtaatggggaagatgccgtggataaacacatgaaaaggctttctgaaaaccttccagaaaaagggaatatcagatttttgcagataacagataaacaatatgcctccatgaagttcctggtagggaaaccacgtaaaaatgagaaaaaaatcgactcttcacagctgcttttattctaaaatccccttctttttatcacaaaaaaaactctttgtgggattgacccgcaaagagttagttccccagtaattatagcctgtcggagaaaga

SEQ ID NO: 277 - DNA, 14223 bp, synthetic construct
  misc_feature 1..14223: note = Synthetic
  source 1..14223: mol_type = other DNA
cccaaaaatctgattgcctcaagcaaccgcagggtaccaagagcgtctgagtttgccgtatattcaggttcttcaaaggataccataacatggctttgagcggcaagattatagacttcatcgggagtggtgactttaagtacattcgtaagacttgaactatcagtcatgtcaccgtgatgcaaaacgaattgtcctgatgacccgtactctccataaaacaaatgatcaattcgcgcagtattaaacagcgaagttcgccttttgataccgtgaacctgataacctttcttaagcaaaaattctgctaagtatgagccatcttgaccagtaattccagtaatcagtgcagtttttgtcatagctttagtgacgctttaatctattctatttctgacacaaaaaattatggtcaaagaggatcttagttattcccgaacactttgagaaatattctttcaacttatacgtacaataaaaattaatattagttataattttctaatggatgtatgaacttcaattaatcacacaaacattttgtcaccacattgtacatagaaaaaatccagtattaaacactttgttcctgcaatttatacaatgttacttgaaagcataaaatctgaaaatctgccagtatccaatattgtttagcaagagaaaatttaatcaagcacgatattactgttcattctagtgaaaaaatttgctgccgaaattaatcatttaccaatactagatctgcttcacttgaatcagtaggataaaccaatgttcaaatttgaaaaaggggatgtagctgactgatagaaaaaggccgacccaaaaattaatctaggtcggcctaaatttttcggcttcaatgagccttattaacgacttgacaccaatctctggttgatgtaaaatatatttcactttaatcaagccatgtgcactaatttagatttccatttagtcagagtcaataacaatttacaaattatcaaggtatttttatgaaaaggtatattctgggcttagatatgaatgcaaacgccataggttggtgtgctgtaaaaatagacgctagaaacaaccctataggtgtgattgacgctggtgttcgcattttatcacctaatgaagaggcaggaagagatcctactaccaaagcctcacttgccgctactaggcgagaagcacggatgcagagacgaatgcaaaaaagacgcaagcgaagacgaaaccgccttatgcatgaattagtttcatctggactgatgccggtggatataacggagcgtaaaaacctagagaagttagatccctattggttacgccgagaagctctctactcacaattgaagaaatatgaggtcggtcgggccctttttcatcttggacagcgaagaggttttaaatctaatcggattgccgatggtgtcagtgagggaaaaggggacaataaggaaaagggcgcaattgcttctggaacggaaaaacttgaaaaagaacttgaacattcgggttttcgaactttgggggagtatttagcggaacgacataacacagataaacaagggaacaacaagcaaggaaaacccattcgatttagacctactgtttcgggtagtactttacaatacgacttatacccaacccgtaaaatggttgaggacgaattgaaccatatatggaatgaacagaaaaagcactatcctcaaatactgacggaggaactttttgaaaaaattaaaaagattatcattgaccaacgtccattaaagccacagtttgttggaaactgctcaatttaccctgatgaaccacgcgctccaaaagcacatccatattttcaacgtttcagaattatggatgatgtcagcaaacttcggttaattatacccgggtttggtgagaggcatttagacgacatagaattcctcaatgccgtcaaactttttatgagtaacagcagccgtgtaattacttttgaaaagattcgtaaagcactttccatcaatgaaaattttcgcttcaactttgaacgcgaagaccgcaaaggatttgaaactgacaatacagcaagaattcttggcagtaagaaggcatttggtcgccagtggagaaacttagatattgaacgccaaggggagattatcgaacggctgataaatgaagaagataatgataaactattggtatggctccaaacagagttcggcttaaacgaagacacttcaaagtatgtaagccgtgttagattaccacagggatatgcaagtttttcaatcaagattcttaaagaattaattgtggtcatggaaaacaagagaataaaaacgaaagatccaaaaactgacagagttttttctcgtcctctgacctacaatgaagctcttaatcaactcggtcaccatcattctaattggtcgcccaataaactaatggataaattaccatactacggtgaggtacttcaacgacatgtcattaaaaaagccgatgctccaaatgggagtcaagaaagtattggacgtgtttctaaccccactgtccacatcgctatgaatcagctacgattagttattaatcatctcatcacagaatatggcaaaccagagatcatagctgttgaattaggtcgtgaactcaaaatgaataagaagagtaaagatgcgttaaagcaacaacaaatgaaaaataaagaacagcgagataaaaataaaaaaacgcttgaagaactgggaatcccagaaacaaaagacaatttagaaaaactaagattatacaatgagatgccacctgactcacggatgtgcgtgtattctggaaaaccaatcaacatcagtaagcttttcactggcgaagttgagattgaccacatactacccaggtcaaaaactttagataattctttcatgaatctagtcctttgtttacgaagtgaaaaccaatacaaagctaaccgtcctcctgaagaaacttggtttgatgatgacataactcagatttgcagccgtgctcaaaatctattcccaaaaaaagcttggcgattccaacctggagcaatgaaccggtttgatgaacaaggtggatttcttgcacgccacctaaaagatactcagtatacatcgagattaaccgcaacgtacctcaattttatttgtccttcaatccagacatctccaggccgtttgacagcattggtaagaaagcactggggtcttaactctattctaagtaacaatagtacaaagaatcgaaatgatcatcgccatcatgctcttgatgcatttgttgttgcgtgcattgataaacggttagttgaaggaatatctaaagccgcgagtagttcagaggaacgtaaattagagcgctttttttgcgaaaacgatttcccaaaactaaattcaaaagttaagagcgaattagagcatatccttgacagtctcattgtaagtcatcgtcctgatcatgggttaagcttcaaaggccatcttccacccaaagtcacaaccggcaagttgcttgatagtttaccttatggcaaatgcaatgccacgattgatgacaaagaatacaaccttcaaaaacggatatctttgagtgaactatcagataagatgattagtcgtattaaagataagcatatcagagaaatgcttctaaacgatgttggtaatttgccaagtaaagagaaaaagaagataaaaaatctgctcattgaatttggaaaaagaacaggtattagaagggtaagagtgttggatgtattagaaaccaaagaaaatgtttggactaaaaaccatacagacagctcacagaaaacattttcagcctcatacagaaaaacagacaaccattcaattgaaattttccaaactttggaaggaaaatgggtgggccgaggtataacagtttttgatgccaatttacccgactataaaccgcaaaatacacatcctaaatatcccaatagtagacttgttatgcgaattcaccgaggcgaccttattgaatgtagttttggaggcaaactaggagtttggaaggttatccgattagaaccttcagccaataggattcggcttgcaatgcataacgaagcaggctcgctagataaaaggcataacgacgaggatgaccattttcgatttttaattaagagctattcaaaattgcaggaagccaatgcaaaatatatcaggataaatcctataggaaagcatatttaacctgttttcgactatagatttttacgaaacaaaatctcttatggctttccgaacagtagaaatttcagaggatggtcgccatctagcaaaatatcgtggcttcatgactgtttcgtataaaggaaaggaattaggtaggattgccattgatgagctcgctgctgttattgccgctgctcatggtctgacttattccaacaatttgctaattgcccttgccgagcaggctgttccatttatactttgtggcccaaactacatgccattagcatttttgtggacaactcagggtcactatgaacaaggtggaaggatgagtgatcaggctgatgctagcaaacctcttcgtaaaactttatgggcacaacttgtaagagctaaagttgagggacaaatatcaacattaacagtgttagaaaagccaagcaatcaattgaaattactttctaaacgtattcgatcaggtgatcctgataatattgaagcacaggccgctaggtattattggccgttgttgtttggcgataatttccgtcgtgatagatttttaacaggtacaaattcattattgaattatgtttatactgtcttacgctcgggtactgcaaggtcaataatggctgcaggattacatcctgcactgggattagctcacagacaacgaacaaatgggtttgctcttgctgacgatcttatggaacctttccgaccaatcgctgatttacttgtttatgatttggtttctaatgggattactgaaattaacagagatactaaaaaacatcttgtttcaatattgtcaatagatatcaacggttataatggaatcagctcaattgccatttgtcttcaaagtttagcaaattctcttgtacactgctatgccaaagaatcaaaagtgctaaaactaccaaaaggtataactgctattaacaattgacggttctctagattattatgagtgcatatagaatgtcatggatttacgtgatgtttgaccttccaaccaattcaaaagttgaaaggaaagaagcaactaaatttcgcagctatttgctagatagaggctttcagatggcacagtactccatttatctgcgattcacaaaaagccgcgaagtagcaaatacacatatttcgcgcgtaaaatcagcttggccaggaaaaggaaggctgcatatcattacgattactgatcaacagtatgcaaatgcacatattatagtaggtgagaatcgtgaatatcgaacaaaaaaaccagatttaatctcttttttttaatgcttttcttccattttttttcaattaaagtaaagaaaaaccccgatggaatcggggtttttcatagttggtaattacattaaccagagattggtgtcaagccgcaactggtctcccgttagttcgtccaagaaactcaattacattaaccagagattggtgtcaagccgcaactaaagcgaccaacgccaatattgcagcgataattacattaaccagagattggtgtcaagccgcaactgtttcttcattgcttgtttcctttgctttaattacattaaccagagattggtgtcaagccgcaacggcttctggtctatccataataatctcctcaattacattaaccagagattggtgtcaagccgcaacttatggagcgtgccagcggtttagggatgaaattacattaaccagagattggtgtcaagccgcaacagtaaatattcttgcattagtcaatctcctaattacattaaccagagattggtgtcaagccgcaacaagaagggtgatacatataataaaagggataaattacattaaccagagattggtgtcaagccgcaacaatacacctgacggcaatgagatacatgttaattacattaaccagagattggtgtcaagccgcaaccgttactctccagtaagttttcgtgggctaaattacattaaccagagattggtgtcaagccgcaacaactctatgctcaatatcaatccgacttgaattacattaaccagagattggtgtcaagccgcaacctattacccgctattgtgattgtaaaaacaaattacattaaccagagattggtgtcaagccgcaactggcaggtgctttggcagtcaaatcgcgataattacattaaccagagattggtgtcaagccgcaacgaagatgtcggtgaggaggcagggagaaaaaattacattaaccagagattggtgtcaagccgcaaccacgggacctggttgccgtgcgggggcattaattacattaaccagagattggtgtcaagccgcaactgagtttcttgccataatgcttaccacctgaattacattaaccagagattggtgtcaagccgcaacttgacctattattggggtgattctacgtataattacattaaccagagattggtgtcaagccgcaacatagtgctagtaagatagatttctgcttgaaattacattaaccagagattggtgtcaagccgcaacttgtgtagtcattgtataattccttgtttaaattacattaaccagagattggtgtcaagccgcaaccatattccggttcaagtggaagccccgcaaaattacattaaccagagattggtgtcaagccgcaactcatattgctctgcggtaaaatgcttcataaattacattaaccagagattggtgtcaagccgcaacacttcttcagtatctaataccccaagagttaattacattaaccagagattggtgtcaagccgcaacacctcagcaaagctgccatcaaaaccgctaaattacattaaccagagattggtgtcaagccgcaacgctatggaaggtatagggataaatgggctgaattacattaaccagagattggtgtcaagccgcaacaagtgcggggagatgacctatgaagctataaattacattaaccagagattggtgtcaagccgcaactgtaggggcatgtaaaaggtataagaacgaaattacattaaccagagattggtgtcaagccgcaacgcgctttgtgagggtcctattgagggtgtaaattacattaaccagagattggtgtcaagccgcaacaatacctcttcaccctcgtaaataaccttaaattacattaaccagagattggtgtcaagccgcaacaatacctcttcaccctcgtaaataaccttaaattacattaaccagagattggtgtcaagccgcaacaaagtaaccgcagagtcggttgctgagtcaaattacattaaccagagattggtgtcaagccgcaactgaatgtatcttgaccataatagtcactctaattacattaaccagagattggtgtcaagccgcaaccactctccctccctagtggagacactaaagaattacattaaccagagattggtgtcaagccgcaacagggtgtcactaaacgatatcaccagcttaaattacattaaccagagattggtgtcaagccgcaactttgccaataccgggaaggagcaccccgccaattacattaaccagagattggtgtcaagccgcaaccgacggctccgcaatagtgattgtgcctaaaattacattaaccagagattggtgtcaagccgcaactcaaccgtccgtccctctcggaacagctttaattacattaaccagagattggtgtcaagccgcaacgatacgagcgatcttatttggacaaacaataattacattaaccagagattggtgtcaagccgcaactcagccctgcgtacgtggtcaaatgtgctgcaattacattaaccagagattggtgtcaagccgcaacacaaaagcacgaaactcatcaagacgaatcaattacattaaccagagattggtgtcaagccgcaacttgactgatattactactgaggggcgggttaaattacattaaccagagattggtgtcaagccgcaactctggggtcgtattgctgctaatcttccttaattacattaaccagagattggtgtcaagccgcaactctggggtcgtattgctgctaatcttccttaattacattaaccagagattggtgtcaagccgcaactatcacctagtatcaccgtttacactcactaattacattaaccagagattggtgtcaagccgcaactagtagcgggtgatatcgtcgtccccgcataaattacattaaccagagattggtgtcaagccgcaaccccgactattttatgatggagtgtgtgcccaattacattaaccagagattggtgtcaagccgcaacacgttgccgggtaaccttgctcaatctcttaattacattaaccagagattggtgtcaagccgcaactagttttgttatggtgccgcttttcggttgaattacattaaccagagattggtgtcaagccgcaactcgactacgcttttcgcactcgttcatcacaattacattaaccagagattggtgtcaagccgcaacagattgacctaaattcggaaatcactgaccaattacattaaccagagattggtgtcaagccgcaacctactgccatcctttattgttttctgatctaattacattaaccagagattggtgtcaagccgcaacggtatcttgtgtcgtgccaaagatactcttaattacattaaccagagattggtgtcaagccgcaacctgatcgtaaagaaattgcttatcgttatgaattacattaaccagagattggtgtcaagccgcaactgtcgttccgagttaaactcaaacagataaaattacattaaccagagattggtgtcaagccgcaacccgccaagctctctgctctgcgggagacttaattacattaaccagagattggtgtcaagccgcaacttaacactgaccctcccgtcttcaatttcaaattacattaaccagagattggtgtcaagccgcaacatggcaagagcggcttataacggagagggaaattacattaaccagagattggtgtcaagccgcaacgacaaccgctttgtcttcggctttacaatcaattacattaaccagagattggtgtcaagccgcaacctaccgagcgacactcttcatttaaagcggaattacattaaccagagattggtgtcaagccgcaacttattactagcgctcgtccctatttcgctgaaattacattaaccagagattggtgtcaagccgcaactattgctcgtgttgatctgatttgagttgaaattacattaaccagagattggtgtcaagccgcaacgattgatgccagtatcactaaagataccgtaattacattaaccagagattggtgtcaagccgcaacatcctttgttatacggttgttttgattttgaattacattaaccagagattggtgtcaagccgcaacgttttgagcgagactcattgagacggaattaattacattaaccagagattggtgtcaagccgcaacttgggatggagcgactcgagtcattgaaaaaattacattaaccagagattggtgtcaagccgcaacatcgtccatcctcaaggtcctcaatactcaaattacattaaccagagattggtgtcaagccgcaactgtatgggacatggggagccattatgaggtaattacattaaccagagattggtgtcaagccgcaacattccacggaaccattttatagcggattggaattacattaaccagagattggtgtcaagccgcaactgagccacggctctcaatagcccgacaataattacattaaccagagattggtgtcaagccgcaactaattactaggagcatattactcatactttaattacattaaccagagattggtgtcaagccgcaaccgagcggtcaaaacgctatacaattaacggaattacattaaccagagattggtgtcaagccgcaaccatacaattagaatttaccacatacaccccaattacattaaccagagattggtgtcaagccgcaactcggttagctgcgagtatgtccgataaataaattacattaaccagagattggtgtcaagccgcaaccattggaacagtgcatcatagtcgcaaagcaattacattaaccagagattggtgtcaagccgcaacgtagaattgatgaggattgaccaagataagaattacattaaccagagattggtgtcaagccgcaactatgccttgctggatagtgctgcacgggctaattacattaaccagagattggtgtcaagccgcaacagttccttcacttgttcgccattaggtaagaattacattaaccagagattggtgtcaagccgcaactggctgaccgagatactggatattctcgataattacattaaccagagattggtgtcaagccgcaaccatatcggcgaagggctgtgcgagtgctagaattacattaaccagagattggtgtcaagccgcaacaagttgttctaacattatggttaaccgtgcaattacattaaccagagattggtgtcaagccgcaactcgtgccgtcttatgctcgtggcactctctaattacattaaccagagattggtgtcaagccgcaactatccacgacttcctctccgtcacgaatgaaattacattaaccagagattggtgtcaagccgcaactatccacgacttcctctccgtcacgaatgaaattacattaaccagagattggtgtcaagccgcaacggaaaacaattaatagttacttcatgctaaaattacattaaccagagattggtgtcaagccgcaactacttttaggtacgggttcaattaaaatgtaattacattaaccagaaattggtgtcaagccgcaacttggtttcgcttctgtacaatttaattgtcaacttgattgtcaatattcattaaaatagtttttagtttctgctattaacagttaaagttgggagaaattgattttaaattatcacccattttagaatgtaagttgcacctaagcttagctaccatacaccataaagttttttagagggattaaactctcatcgttaaattaagaggttaaacttccatgacacatgaattggacaatcttctagaagcatatcgctctcatgctctcagccaacgtgaccaaggtacagcatttgaaaaattggtttgtgcatggctagtggtagatcctgtgcaatcgattcgtatcagtaaggccgagatttggtccgattgggcactccgaacaggtaagagccgaagtgatactgggatagacgtggtcgccacacggcatgatggtggtttgattgctgtacaatgcaagaattacgtcgctgacaggcgaataaataagtcagatattgactcatttatttctgcttccggcaagaaagaatttgctgagcgtctgattatagttacttccgaagcaccttggagccagaatgctattacaatgctcgaacggcaggccattcccacaactcgaattaccttacacgatttaagaaatagttctgtcaattggttggacttcacagcgtcggataaaatcacccgtgtcaaacccaaagaactccggattgaccaaatggaagccttagaagctgtcaaatccggacttaccaataatgatcgtggaaaacttatcatggcttgtggcaccggcaaaaccttaacaagccttcgtattgctgaggaaatggttggtgttaatgggcgggttcttttcttggtaccctcgcttgccttgatgtcacaatctgtacatgaatggtgtagtgatgctaaaattccactttctacttttgcagtttgctcagacataagagtaggccggcggcagcggagcaatgaggatgtcgccgaacttgaaatcacggacttaagcttccctgcaaccaccgaccctgaatctctaacaaaagcgtttgtcggagtgaagcatcaagccactatgaaggtggtcttcgcaacttaccactcaattgaagtgattgctaaagctcaggcacaatatgaactacctgaatttgatcttattatctgcgatgaggctcatcgaaccactggggtgacttttaacaaccaaaatgaatctaatttcgtaaaagtccacaacaatgaattaatccgcgggaaaaaacgcctctatatgactgcaacaccacgaatttatggtgaggaagcaaaatcaaaggctcattacgaatcggcaacacttgcctccatggacgatactaagacctatggggaattgcttttctttcatgggtttgctcgagcagtagaaagcggtatcctttctgactaccgggtaattgttctagtcatggacgaggaaaatgtcagtaatgctgtactaaatcgactttctgacgagcaaagcgaattaaggcttgatgacgtcacaaggataatcggatgctggaaagcactttcaaaaaccggattaaaggagatcagaaacgaagattctgccccaatgcgtcgtgcgcttgcattctgtaatcgcatttccacctcaaaacttattactaccgagtttgagaatgtagtaaaagagtaccaagaaaacatgaaccaagatgggtccaactgtgaagttcagcacgtggatggaacttacaatgcttccaaacggagacagtgtcttagttggcttaaggaggatactgacaacaaaatttgtcgaatattgagcaatgcccgctgcttaacagaaggtgttgatgttccggccctagatgctatcctattccttcaccctcgcaacagccagattgatgtcgttcaggctgtaggacgagtaatgcgcaaatctgagggtaaaaaaatgggctatgttatactccctgttgccattcctcctggggtgagtgctgaagatgctctaaacaacaacgaccgttataaagtagtatggcaggtattgaatgcattacgtgcccatgacgagaggttagacacgacaattaaccaggggggtcttggacaggatataagcgacagaattaccatcataaatggtaaccatactgagttgaaaaaagttacagcaattatcaaagatctaccaactcaatcaaggggggccaacattggtattaatggcggaaacggaggaaacggcgaaattcaaattcaaccacttcctcttgtgattgacaatttataccgagctgttatggcaaagatagtggataagtgtggcaccagggaatattgggaggattgggccaaggatgtggcacgtattgccgaacgccatgtcactcgaatctctggattagttaatcaaccgaatagcaatgcccaactctttttccaagatttcctcagcgaattacgtgacgatctaaacgagtccatcagtgagcaggatgccatcgagatgttagcacagcatctagttacaagaccggtttttgacgccctgtttgagggacaagaatttgtaaagcaaaataaagtatctaaagacatgaccgatattttatcggtaattgatgaaactcaaatcgaacgtgaaactaatgagttaaagggattttatgcctcagttcagcgtcgagcattgggaattactgatcccgcagctcgccaaaatcttattactgaactctacgaaaaattttttaagagtgcatttccacgcacagcaaaaatgcttggcattgtctatacaccagttgaagtagtagattttataattcattcagtgaatgatgtgttaagggatgaatttgatttgacattaggctcaaaagatgttcacattcttgatccttttaccggcacgggaaccttcgttacacgactactgcagtctgaattgattccaattgaggatcttgaacgaaaatactgcaatgagattcatgccaatgagattatactcctagcttactatattgctacaattaatattgagtcagcctttcaaggaatcttcaatgacaaatatcgaccctatgaaaaaatctgc

SEQ ID NO: 278 - DNA, 23417 bp, synthetic construct
  misc_feature 1..23417: note = Synthetic
  source 1..23417: mol_type = other DNA
ggtggcctcgtatggatatgtctcttctccggccagaacggatcgggcgctggatgccagacgctggagcggcctgacgaacacctgaacgaacactagggtcgtgactgcaagcacaagtccgaagcctgcaaggaagagtacaagcgtgccggaaacggagctcgcggccatggcgttattgtcgattctggcgacgaggctccatccgaagctcggtaggtcggagtatcccacctgcgggatgaccgcggtctgataggcaacgccgtctggccaggtttcgagcgcggcgcgtgcggcgcctgcagttgccgcgcgcatgctcggcaggtccagcgatctccctaccacgtcggtcgtcgccatcatgacgcttcccgtccggtcgacgatgaacgcgtcgagctgcagcgctcgtgccgtctccgccagatgcgcttgcgcccaggagtaatccagatgcaggccgagcacgccggtcacccggccctgactgtccttgatcggagtcgccagatcgagaaactgccgctggccgccttcggaggagggaagcaggtcggccagcaggaccgccttatggacgtcgccggcgaagtccccagtcagcccgcgctggaaccaggggcgcgtggagacgttctgctgctccagaagcccgcccgaggcgatggtgactgtgccgtcgagtgccgcgatcccggcccaggacacctgcgagttgtcgccgaccacaaggtccagcgacgttcggaccgaggaggcgtcgcgcgatgcgatgtcctgcgcaatggtacgcgcctttctccattcacggtggagagtacgggcaaaatcgagctcgatgccttgtgcccgtgtcctgaccgcttctgccagtgcggtctgccgaagctccgcctgccgctggtcgacgacgagccatgctccggctgccgccagaagggcattgagaacgacaaagccgtacagggcacgggagagcgagggagaactgcctcgcgagagcagtcggctcatggtctcctccagacttcaggaaggcgaggtgtcgtcggcccatccgcagcgaagagcggacgaagcagacttctgcaatggtcccgcccttctggcaggcagtgccttggcgccttcggcccctattctgggatagcgcgactacggctcgcattctgcaggatgcgcgtttcgagacgacttttgcctgaaacacgtctgtgcctacaacctgaggggctggcccggtcaagtcaagctggcggcggttctcgccggtggacgagctctcgaccgagtggaggcggttagagcccgagatctgacagcccgggatgatcctccggacgtggacctgacgcccaatggaacttccggtccgattccgggatgggaaggtcattgatgctggcgatgcgggtctgcatcaggccccggccgtcgaactcccagttttcgttgccgtaggagcggaaccagttgccggcgtcgtcgcgccattcgtaggcaaagcgtacggcgattctattctccgtgaaggcccagagctccttgatcaggcgatagtcgagctcgcgggcccacttgcgggccagaaacgcggcgatctccgtccggcccgtgaggaactcggcgcgattgcgccagcggctcgccggcgtataggcaagggcgacccgctccggatcgcggctgttccatgcgttctccgccatccgtaccttcagcacggcggtttcctgggtgaacggcggcaagggcggtcggcattctgcctcggcaggctgtgacatctggtgttttcctcttttgcaggtctcgggggaactcgtgggcggtcaggcgacggccgcgtcccatgagccggtcatgcgcagaaacggcgagagcccgtcctcacggctatgccatctgagcgacgtcgctgcggctcggcagacgatgcggcgaggccggaacgtccagcgccgctcgcttccctcgaaggcgccattcgccggctccgttgggattacctgcgcctggccggtcagctgcagcaggtctcccgtctcgaaatcgacaaacaggagcccagccttgccgttcgcgacgatgttgccgagcgtgttgaaatgcaggtttccggcaaagtccggaatggtcagaacgtcgtctccgcccacatggacgaagcccggctttccaccgcgatgggaaacatccacctgccgcaccccgtcctccagatcgacatagctggcgacgaagaacgtgtcggcgcgcgcgatcatctcgcgcgccgcccggtcaagtccgtccagctcccgcctttgcgatgcggggcgaggtgtggcctgcccgatctccacgtcgcgaagctggatgtatttcgggcagttgccgaaactgtgctccacgtgcacggcgaacccgtccggcccggcgctcgaaagccttccgttcatgcggttgcggcgacgggtgtgcaactcgatgcccagtagcccgacgccggcgccgctcgtcagtcccggagcgacggggtcgtcttcgtcgacggctgcccgcacctgcagcgtgtgcggatcgggcgagctagcgaatcccgccgcgccggtcacaaggctggcccaggcgtcgcccgcatggtcgacggtgccgaccagcaggaacggcagctgctcgaagaaggcgcggtgctgatcaggcatgtagcggcgaacaacccggcgcccgagtgcgtccatccgctccgctgcgccggcctgccgctgcagggtcagttcgccctcgtgaaagggcgaggcgggtaccgccgtctcgtcgtggttcgtcatggcgactgttcctcgtcctctcatcgggtcctgatcctagactgccgcggcaaggccgacaggcgttgcctggaacggcacgaagccgggaagcgcctcgatacgctccagccaggcgaggacgtgggcgtaaggagcaaggtcgacattgccttccggcgcgcgtgccacgtagctgtagagggcgatatcggcgagggtcggccgggaggccgccagccagtcgcgatcctgcaactccctgtcgaggaccttcaggatcgcgtgggcgcgggagatcacgtcctcggcgtcaaatttcgcgccgaaaacggtgatcagacgcgctgcggccggaccgaaggctatctgcccggccgcgatcgacagccagcgctgcacggccgcagcgcccgccggatcttcgggcagccagtccgtccggcccgccttcttcgccagatagaccatgatcgcgttggaatcgggcaccagagtgccgtcgtcgtccagcagcggcacctgtcccagacggttcagctgcaggtagtctggggccttgtgggcaccgttggcgagatcgagctcgacgagatcgacctcgagccccaggagcgagcagaacagctgcgcgcggtgcgagtggccggagagggggtgatgatagagcttcatggctgggctttcctgctgaagtggatgagcccgatattgtttgtttctctgttcaggtgaatatgttgagtttgcaatggttcattccataaataggaatagcgaggcggcatggatcggttcctggcgatgaagattttctccaaggttgtcgaaacggggagccttgcccgcgccggccgtgaactcaacatcagcccgccggcggttacgcgtgcgattgccgggctggaggaggccatcggcacacgcctgttgatccggaccacccggaagctgacgctgacggagtccgggcagcgctatatcgaggactgccgtcgcatcctgatggatctggaagaggccgaggccgccgctgcgggcgccttctcacagccgaccggcacgctgacggtgtccgcttctgttcttttcgggcgcatctacgtcctgccgatcctgaccgagtatctcgacctgcacccggaggtcgccgcaagggcgctgcttctcgaccgcgtcaccaacatggtcgaggaagggatcgacgttgccgtccggatcgggcacctgcccctgtccagcctcagcgcggtcagggtcgggaccgtccggcggatcgtctgcggcgcgcccgactatctggaacgccacggcacgcctcgcacgccgcaggatgtcgccgcccaccgcatcgtcgccgcgaccagcgtgtggacctcgccggaatggcacttcggcaaagaacagaagaccacggtccaagtgacaccgcgcctcgtctgcaacaccaacgagggggcgatcgaagcgactgtacggggctggggccttacgcgggtgctgtcctaccaggttgcgccgctcatcgccgagggccggctgattccggtcctcagtgacagcgaagaggaaccgctgccgatccacatcgttcacccggaaggccgccgggtcacagccaaggtgcgggccttcgtggaactcgcgtcgcggcgcctgagggacaatccgctcctggacttccgatgacaggaaaggctggagacgtgcggcaatccgggttagcgcgcccggtccctgctatcccgtcgtgaggtcgtgctgctcgcgtccgttactccagtggcacggccgcgccgcgcttcagggtgccgagcgccacgcgcgtgcgaaagcggcggatattcgcgttctcgctgaccatgcggtgcatgaggccgtcatagtctgggatgtcgcgcgcggccaccacgagtacgaaatcgctgtcaccggtgacataccaggcttcctgaacggctccctcgcgcatgatccagcgcttgaaggcagccaggagttccggccgttcgcgctccacctcgacatcgacgatcatgctcagcgggtagccggcggttcctggatcgacaatcgcgacctctgcggagatcgcgccgctctcgcgaaggcgcgcgatgcgccgctggaccgccgaaggcgaaaggccgatctctgcgccgatcttgtcggcggacaggcgtgcattctcctgcagcagggcgagtaatctccggtcaagttgatcgaggagctgcggcatttgcgcgttgatctccaaacatgcgcgtaaaatacgcgtcatctgagcaaaggatcgggaaaattcctgagattgcgagaatacagttcgcgatgcccgccttggggagcagttcggccgctgcattcacgtcgcgcccggcacggtcgccggtatctcctcgactttctccggagaatggatttgcaactcttctatcagacgcactcgccctatgcccgcaaggtgttggtcttcgcccatgaggttggccttgtgccccggctggacgtcgttcatcacgaaaccagtcccatccggcagaatgagcaggtcttcagggtgaacccgctcggaaaggtgcccgttctcatctgcgaagatggaactgcgctcttcgattctccggtgatctgtgaatatctcgatgagttgcacgaccggccgaaacttgtccccgcgcaaggcccggcacgctgggaggcgcttcgccttcaggcgttggcccaaggcatctgcgatgcgggaatcctgctgcgctgggaacaggaacggcgaccgcaggcatttcgctacgctccgttcgccgacgggcaggcagaaaagcttgtggagtcttatgagttcatcgaacgcgccatcagcttggaaggtcctgtgaccgttggacatatcgcgcttgcgacagcgctcgactggatcgtgttccgtcaactgcctgtcttcggcaattaccccaggctgatggagtggtacgctgaatttagcctgcggccgtcgatgcaggcgacgagttacagcgggagaacgcaagactgagcaagatgatgcgtttgccggtgtaacggggaggcggctatgggctgtggtgccccacgacgtgccgctctgccgtttcgcgcaggagcgcgcaaagctcggcggcggccggtgcagggtcttccacgctgagcagcctcacctcgatcggcggcaggtcgggcaggctgtgctcgtgactgtcgagttcccgtaggtccgccggaatgcggtgccgcgtgcgcgccgtgatgccgtggccggtccgcatcgcggcccacagtcccggaaggctcggcgtcgtcagcgccagccgccaggggcgcccggcctgatccaggctgcgcagcgcagtctggcgaaacaggcaaggatgatcgaacagcaccagcggcaacggggctgcaatcttctggtgcctgcccgttccgatccacaccagcggcagcgtggcgatcttctcgccgtgcccctccgacccttgcgggaagaaggcgagggcggcatcgagccgcccggcacgcacctcctgcgctagcgtgtgattgcggcccgcgcgcacctccacatgggtgccgggatgccgcgcggcgaaggcctgcagcgtgtccggcatgacgtcctcgaagaagtcctgcggcagtccgagccggatcgcggccggcgctgccgccgcgcccagccggtccagcgccgcatcgttcagcgccaggatccgccgcgcatgggcgagcagcgtctcgccggcctccgtcggcagcaggccgcggccgctgcgccgaaacagcacctgcccggtctgctgctccagcttcttcagatgcatgctgatcgccgattgcgagcggccgagtgccgaggctgcgcgcgcaaagctgccgagctcgatgcccgcaaccatgctgcgcagcgcatccatgtcgagattggccctgatcatcccgaaatcctaaagatttaatccagcattatccgatattcgaaaggcacgcagcgcgctagccttgccatgctgaaaggcgaagcgagtaaggcgaacgggagagcgggatgcgtgtcgggtttgtcggacttggcgtgatggggcagccgatggcgctcaatctggcgcgggcgggcgtcgatctgctggtgtggaaccgcacggccgggcgctgcgatcccttgcgcgaggccggcgcgaaggtggcggcgagcgccgccgaggtgtttcgcggctccgatgtgatcatcctgatgatggcgaacggcgcggccaccgatgccgtgctcggccggagcacggagggctttgccggtaccgtcgccgggcggctgatcgtttcgatgggcaccagttcgccggagtggtcgcacgggctggatgccgacatccgtgcggccggcgggcgctatgtcgaggcgccggtctccggctcccgcgtgccggcggaggaggggcagctggtcggcatgctggcgggcggcgacaacgatgtcgcgatgctgcgcgaactgctgcgccccgtctgccgcgagacgatcccctgcggcgccgtgccgggcgcgctcaccatgaagctgtccgtcaatctgttcctgatcaccatggtcgccggccttgccgaggcctttcatttcgccgagcgacagggcgcggatctgcaacgatttcaagcggttctcgatgcagggccgatggcgagcgccgtctcccggatcaagctcgccaagctgtgcgcgggcgacttctcggtgcaggcggcaatctccgacgtgaagatgaacagcgggctcgtcgccgaagcggcgcgcggggccgggatcgccgcgccgctgctcgatgcggccgacgcgctgttcggcgaggcggaggggctgggcctcgggaagctggacatggccgccgtcgtccaggcgatcgcggcccgcaccgacggcgggccgcagggcgcctgatcaggtgcccgagtaggccggcacccgccgctcgatccaggcgccgaggccttcgtgaatgtcgttcgtcgcgaccatccgggcgaactgctcgccctcggccagcaggccttcggcgatggtcatgttgaggccgcgggtgacggcggcgatgatgccggccaccgccagcggcgagtggcgcaggatccgccgggcgagggcgcgggcgcggctcatcacctcgccgggcggcacgacggcgttgaccagccccatctccagcgcctgatgcgggccgaagggatcgccggtcaggagcagctccagcgcgcgcttgcggcccgcaagcctaggcaaacgctgggttccgccgaaggtcggcgggatgccgatggcaatttccggcttggcgaaacgggcttcgttgctggcgacggccaggtgcgcggcctcggtgatctcgcatccgccgccataggcgaggccgttgaccgcgacgatcaccggcttcgggaaggcctcgagccgggcggtcatcgcctggccgcggcggacgaaatcgcgcaccgcgcgggccgggccgagccggacgctctcgcgaaactgcggaatgtcgccgccggcagagaaggcgcgctcgccggcgccggtcaggatcaccgccttgatgcgggtgtcgagctcgatctcctccaaccgctccagcagccggtcggccatctcgtagttgatcgcgttgagcttgtccgggcggttcagggtcaaggtggcgatgccgccgtcgatttcgcacagcacggtgtcggacatgggggtctcctcgtcggtccagtccacccatgctgggccgtgggcactcccgacacaaacgaggaaagcttgcctaaagtgagcagaattcacccaagaaacggcgcggcctcgcccttcagccagcgcaggaaggcggcgatctcgcgccggggctcgtgaccggaggggagcagcgcccagtaaccggtgcgaattggggcgggccgacacccggtaatcggcgcaaggccgggagcggccagagcatcctcgcaaagcggcaggcgggcaagggcgatgccgagcccttgcgcggccgcttccagcgccaggtcgaccgtgtcgacgtgaagacctcggcccttcggcggcagcgcctcgcctgccgccgacgcttcgccgtcgagccaggccgcccagtcgtgctcgaccgtcgccacatggatcaggggggcgcgcgcccagtcgatccgcccctcgcggcggggcagacgggccgcaagatcgggatgcgccaccggctgcaacgcctcgcgaaacagcagctcggagcgcgccgagggccagggcgcgggccccatgcggatggcgaggtcgacgccgtcgagcggaaacaccgcctgccgatggctggtgtcgacatgcaactcgatctccgggtgccggccgcgaaaccggccgagccgcggcaccagccagcggcgggcgaaggtcggggcgacgctgatgcggatcctgcgggcgccgagcagcggcgacacccgatgcgcgccggtggcgatcatcgacagaccctcgctgacgtaaggcagcaggtcctcgccggcggctgtcagcgtcaccgcgcggcccgagcggtcgaacagcggcgcgccgagccaggtttccagcgtgtcgatgccatggctgactgcggacggggtgaggccgagctcctctgccgcctgcttgaagctggcgtggcgggcggcggcctcgaacaggcggagcgaggcaagcggcggcaggcgcagacccatggacgtctccccgtcgaaatgagttctgctcatttaaacgcggaaagatgccgccgggcaaagttatttcggcccgctccgcccgccgcacccggcgggttggaccggggaccttttccccgtttgcgagacttgcgacgaattttgcaaaatcccgtctcaattcctgtgaaaattgatgcgagacgccacaatctcgcgaaattcgcgatgtccggcgcctcgagagcaccacctgcccgccgagcccccgcgacttggatggggcctcgtcaaaaataacaggagtgagccgtggccgcggtcctgccggcaacaccggtgccgtgacgcgccaaatgaagactgtccaaatagggtgggggacaggcaggcgcgaaaacggcagggcggcaaaccggggataaaaagaaaaaagccagcgccgaagcactggccttatctggtgcatgtctcagcttgttaacggctggaccgcgatttctgaacattgcaatctaggcaggtcatttcagtcacgtcaattcttaaggtctttggttatgcccgctcccttgatccgtaccctcgggctcgatctcggcaccaattccctcggctggtgtgtgctcgaaacgcgcggcgagccgggcgagggcggcgaggggcgcatcgtcgatgcgggcgtgcggattttctcgcagaccgaaatggcgggccgggaggcgcgctccaacgagtcgctggcggtggggcggcggatggcgcgcggcgcgcggcggcggcgcgaccgctacctgaagcggcgcacgcggctgctggccctgctgaccgaccttcgcctgatgcctgccgacgcgagcgagcgggaagggctggtccggcggaccgacgacggcgaggacggcgatgtctcggtctcggtcttcggcttgcgggcgaaggcgctggaacgtgcgctggagccgcacgagctggggcgggtgctgttccatctcaaccagcgccgcggcttccgctccaaccggcggaccgacagcaacgacgaggagcagggcaagatcgccgagggcgtcacccgcctggagcaggcgatcgccgaggagggcgcgcgcacctatggcgaatggctgttcaagcgccgccaggcgggcctttcgatccgcgcccgcctgtcgtccgacggcaagtcctatcccttctacccctcgcgggacgcgctcgagcgcgagttcgaccgcatcgtggccgcgcagcggccgttccatccggaggtgctgacggcggacgccgtcgccgcgctgcgcgacacgatcttccaccagcgtcccttgcgtccggtgcggccgggaaaatgcagctacaacccggccgaggaccgtctgccgaaggcgcatccgctgttccaggccttccgcctgctgaaggaggtcaacgagctggaggtggtcggcgaagaccagacccatcgcaagctgaggccggaggagcgcgacgccttggtgctgcagctgcgcaccgggctgaacaagcagggcaaggtgccgttctcgaagctgcggcgaacgctgaagctcggcagcgaaacccgcttcaacaaggaaagcgacacccgcaaggacctggccggcgacgtggtgcatttcgcgctgtcgcagccgtcctgcttcgggccggcgtggagcggacttccgctggagcgccgggcggagatcgtggaacggctgcggaccgagccggacgcggccgtcctcgtcgactggctgcgcacggaatgcggcctgtcgcgggaggtcgcgggcaacgtcgcctccgtgtccctgccccaggggttcggccggctcggaccgagcgcccttgccgacctggcggacgaaatgacccacggacgcgacgagaacggcttcgtgctcaccgaggcggcggcgtcgatcaacgtctacggcaagacgaattcgcaaaccgatccggaccgcaaggccgcaagcctgctgccgaaataccaggaggtgctggagcggcacatcccgcccggcacgggcggcgaggcccaccccggcgccccggaatgggacgaggtgatgggccggatctccaatccgacggttcatatcgcgctcaaccagctgcgccgggtggtgaaccgcatcatcgcccggcacggacggccggaccggatcgcggtggagctcggccgggacctcaagctgaccgatgccggacgcgacgaggtcaatcgcaagctggggcagatgacccgcgaggcggaggcgctgtcggtcgaactgagggacgtcttccgggtgcgcgacaacggctacaaccggatgcggctgcggctttggaaggagctgaacccggaccagccgctcaaccgggtctgcgtctattgcggcgaggtgatccggtgcggcgccgtgttcacgggcgagacggatatcgaccacatcctgccctattcgctgacgctggacgacgggcgggccaacaagatcctctgctgccgggactgtaaccgcgccaaaggcaaccgcgcgccggcggacgtgccgcaatggcgcgggcggtacgacgagatcctggcccgctcggcggtgctgccgaaacccaagcgctggcgtttcgccgaggatgcgatggaacggttcggcggcgaggcgggcttcgtcgcgcgccagctcaccgacatgcaatatgtctcgcggctggcgctgacctatcttgccgcgctctacgatgcggaggaggcggatctcgacggggtgctgcgccgccacagccgcatccgggcgctgcccggccgcatgaccgagatgctgcggcgcaaatgggggctcaacgacctcttgaccgacgacgatcgcgcggacacggcaaaggccaagaaccgcctcgaccaccggcaccatgcggtcgatgccgccgtggtggccgcgacctcgcgggcgatgatccagcggatccagacggcggcgggacgcgcggaagcggaaggggcggagcgcgtggtcgcggagatcgacccgccctggcccgggttccgccaggagctgcgcgagcgcctgcggacggtggtcgtcagccacaagcccgaccacggcaccgtctcgcgcaagggatacgaggcggggcggggccagacggcgggccggctgcacctcgatacggcctacggcccgaccggcgagcgcgatgccgccggcaacgagaaggtggtccggcggatccctatctccaacctgcagaagcgagaggacctggcggcgatccggggcaacgaacacgggcattcggagctgcgggaccgtctcgaagccgccaccgacgggctgtccggcaaggcgttccaggaggccgtccagcgttttgccgaaacggacgagaaattccgcggcatccggcatgtgcggatcatggagacgcgctctccggtctggatcacccatggcaacgggcgcttccgcaagggctacctgccgggcgagaacctgcgctacgacctgtgggagctcgcggacggaacctgggtggcggaggtggtgtcgctctttgacgcgcatcagccgggctacgtgccgcggatgcggcaggagcaccacaatgcccgcaagatcatgagcctgacgaagggcgacatggtcgcctatgacgatccgaaaagcggcgagagggtcatcgccaaggtgcgcaagttcgatcagcgcaacaagcagctctacctcgacccgcattaccaggccggcaatctcgaccggctggagaaggaaaaggcctatgcgccgttccgcccgatgcccaacccgctgaagaaggtgcgaccgcgccaggtgcggatcgacgagacggggagggtgttcgatcccggtccctggtgggagaagacgtaggggaaatttctgtcggcgctcgagcgtcttgatcgggctggtcaacggtcaggaaaacttcgatgcccatgtcaggcggatcggcggcaacctgccggaacggggcgatgtcttcatcttccagtttaccgaccggcagtacgagaacatcgtgcgcttcagcgaccagtcgcgacggcgccggcgaaaaaaccccgagcagattgcgctgttttgaggagattcgggatggtcttcctgcggtccggcggcaatttcctgtttcttttcaggagactgccgccggatctaggatagctgttcagaaatcgcaggccaaccgcaacgccagctgccggttggccgccatgccgatgaggatagctgatcagaaattgcaggccaaccgcaaccaccttgcgcgaaaggggcggggcgcggcgaggatagctgtccagaaatcgcaggccaaccgcaactggtgtaggtctcttcgatctcttcgacggaggatagctgttcagaaatcgcaggccaaggcgatccccctcatttccccttgcggatgaagacggcgtcttcccagtcggggtcgacgcgggggtagagcgtgacgacgtcgggatcgtggccgggcaggatctcgcagccggcctcgatcagctcgtgcagcacgcggtaaccctcgaccgtgcggaaatagtcggcgaagaccggaaagatctggccgtcggtcaggtagcggcgcaggtgcagcgcgtcggaggcgatgaccagcggcgtctcgccgtcgaccaccaggatctgcagcccctgcgagtgaccgccgacgaggcgggcggtcaggcccggcagcagcgtgtaatccccctcgtggaagcgcacgcggtcgcggtagaccatctccaccgccgtcttgacgtcctcgaccgcgaagggcttgcgcatccgggcgtggcacatgcagcgcccggtcgcataggccatctccgcgtcctgcaggtggatggtcgcgttcggaaaatggcgcagatttccggcgtgatcgtaatgcaggtgggtgatgaagacgtcggtgacatcctccggctccacgccgatgcgcttcaaggcctcgaccgggtgggtcagcaggatccgctggcgggcggcgccttcctccggcgcgaaaccggtgtcgaccagcacggtcctgtccccgttgcggcagagccagatataatagtcgagacgggcctcgccctcgtgcgggtccggatcgagcaccgcatggttccccggtaggtccttggtggcatagcgcagcgcgatcacctcccagggcttggccggccccttgagggactgtgcgcggccgggcgcggggaaaccggggatcttgctggtcgtggtcacggaaacctccctcccttgtccgcccgcaggccggtgccgcgaaagggtgcggcaaacggaaacgggcaggttgtctgacaatctgtcattttcggtctatactcgtcggcgagccagatgtctaacatcgagcgcagccgcattcggatatgctatggaacgcggagcaaccggtgcgggacaggccggacggaagaaagtggaatcgatggaacaggcgagactgcgaatctcgaaacagcgcgcgacgattcggcatctggtagaggaaaagatgcgcgagctgatcgccaccggtcatttcaagccgggcgaccgtctcatcgaacgcgaactctgcgagacattcgatgtcggccgcacatcggtgcgagaggcactgcgtcagctggaagcggaaggcctgatccgcaccgagccgcatcgcggtcccatcgtcaccaaggtctccttcgaggaggcgcagcagctctatcagctgcgtgcgctgctggaagggttttgcggcgccgaattcgccgccaagggcaccgacgaggagcacaagcggctgttcgccgcctgcgaggccttcgcggcggcggcggaaggcaaggccccgaccgagcagctggttgcgcgcaaggcggagttctatcgctgcctgatcgcgggcgcgcggaacatctatgtcgaggacatgctgacctcgctgcacaatcgcgtctcgatgctgcgcgcaacgacgatgacccagccgcaccggctgccgaagagcgtcgaggaaatccgcgacatcaccaaggcaatctgcgcccgcgatgccgaatgggcacgccgcgccagcatcacccacgtggaagaaagcagcaagatcgccctgcagctgctgagcgacgcggaagtcgcctgaggctttgttcgacaggatgggggagtggcgagcgtcgttgtagctgctgctcaccccccctctgtcggctttcgccgacatctccccctcaaggggggagagggggacgtggggcaggaacttcggcgcagtagcatcccccaacctgcgcctcccaaccggctcccgacctcccgcctgacgcccttccggcccgcgtcttgtgccgtttcgcgcctgtgtcgcgatggtgccgcggcaggtttgcctgcaagcgcaggcacttgcgcgactgattgacagattgtctgataatctgataatgccgccctgtcagttatgcagaggctgaaagccagggagttacaaaaatggtcgagcaaacggtcgccacaaaaatcgccttcatcggcctcggtcggatggggctgccgatggcggtcaacctggtctcggccggctatcaggtcaccggctacgaccgctcgaaggaggccggtgcggccttcgccgccaagggcggtacggcggcggacagcgcccgcgcggcggcaagcggcgccgagatcgtcatcaccatgctgccgacctcggccatcgtcgcgtcctgcctcattggcgaggagaacgcgctggcggacgtggcgccgggcgcgctggtgatcgacatgagctcgtcggtgcccgccgacacgctgaagctcgccgaagagctgaagacgcggggcctctcgctggtcgatgcgccggtgtccggcggcgtcggcaaggccatcgacggcacgctggcgatcatggtcggcggcgaggcgggcgatgcggcccgcgccgagccggtgctgaaggcgatgggcgaccgcatcttcctcgccggcaagctgggcgccggccatgtgatcaaggtgctgaacaactacgtctcggcggccggtgcgctggccgcggtcgaggcgctgatcgtcggccgcgagttcggcctcgacgaggatgtgatcaccgacattctcaatgcctccacggggcggaacaacacgaccgagaacaaggtcaagaagttcatcctgtcgggcgccttcaactcgggcttcgatctggcgctgatgtccaaggatatcggcatcgcggcggggctcgccggcgatctcggcctcgacatgaagctgctggcgcgcacctcgcaggagtggaacgcggcgacggacgagctgccggccggtgccgaccacaccgagatctaccgctatgtcgacggcggttcgcgccgtggctgacctgctcgccaccctggtcggccgtcttcaggccgcctccggcgatccggagctcacccggttgtcgccgggcctggccgtggcgctgtcgatccgttcgggcggcgcgcgcgccgtgctgtggatcgaggagggcagggtggagccggcgggcgcggcgatcgtcgccgatatcgagatgcgcctcggcgagggcgtgctggagaagatgctccaggtgccgccgccgccgcgccaccagggctttaccgcgctgcagatcgccaatccggatgtcgaggtgaccggcgatgcgctgggccttgccagggcacgcgccgcgctggagcggctgttcgagatggcgctggccgcgcccgagctcgcagcgccgaggcgcccccggcgcatcgaaggcgtcaccgggcgcaagatcacgctgaactgcaccgaagggccgctggagatccatacggagattgctggccgcaagggcgcggtgccgctggtctttttgcatacggcgggggcggatgcgcgccagttcgaggcgcagatggccgacagcgcgctgggcgatgcctatgagctgcacgcgccggacatgcccttccacgggcgctcgatgccgccgctcggctgggacggcgcgccctacacgctgacggcggaccgctatctcgactgggtgaaggcctatctggcgcaggtcgtcggccggccggcgatcctggccggctgttcgatgggcgcggcggtgacgctggtctgcgcggcccgtgcgccggagctgctgcgcggcgtgctgccgatcgagccgccctaccgctccaaggggcggatcaaccgaggccagaacgacgtcggcgtccatgccggcctgcacaacggcgccttcgtgcgcgggctgatggcgccgacctcgccggaaggctatcgccgccgcgccgcctggatctactcgcaaggggcgccgggcgtctatcaggccgatctcggcttctactcgctggaattcgatggcgaggagatcgccccgatggtcgatgccgcccgcctgccggtggtgctgctgtcgggcgcctacgactactcggcaaccccggaggacggtgcgcggctctgcgccctgatgccgggcgcgcgccagatcgtcatgcccgatctcggccatttcccgatgaccgaacatcccgaccttttcgccggctacctggatcaggcgctggcgcttctcgccgccggacccggcgccccctctcactcgtgagcaactgaaggaagcaacgatgaccaccaagaccatgcgccccgatggcacgccggccggcgagcgcttcgaggccggcctgaagacccgccgcgaggtgctgggcgatgcctatgtcaacgcctcggtcaacaaggcgaccgactacaactggccgatgcagcagctcgtcaccgagtactgctggggcgatgtatggaaccgcgagggcctcggccgccgcgagcgctcgatcctcaatctcggcatgatctcggcgctgggccgcagccacgagctgcgcctgcatgtgcgcggcgcgatcaacaacggcctcaccaaggaagagatccgcgagatcatgctgcaggtcgccatctattgcggcgttcccgccggcatcgacagcttccgcacggcccaggaagtcttcgaggaaatgggcatctgaactgcgcagcgcccggagcgatatccgggcaaccacccctgggaggaacctaagatgaccaaagacacttccaagtccccgttcagcctgtcgcgtcgccaggtgctggcggccggtgccgcaacggcgctgaccatgccgttctacgcgcgccgcggctttgccgccgacacgatcaatgtcggcgtgatccagccgctgtcgggcgccaacgcccagttcggcatcaactcgcgcaacggcatccagctcgtcgccgacgagatcaacgccgccggcggcatcaagtcgatgggcggggccaagatcaacctgatcatctccgacgccacgtccaacccgacgcaggccgccaccgtggcgcagcgcatgatgtctcaggacggcgtgtgcgcggtgctgggcgccttcgcctcgtcgctgacgctggcgatctccgaggtgaccgagcgccgcggcgtgccgctgctcaccatgtccttctcggaccaggtgaccggccgcggcttccgcaacatcttccaggtggtctccaaggcctcgcagctgggctcggcgacgatcacccacacgctggatctggcccgcaaggccggcgacgagatcaccaagatcgccatcatgtacgaggacaccgcctacggcacctcgcaggccggcggcctgcgcgccgcggcggaagccaacggcatcgaggtggtgatggacgaggcctatccgctgggcatcaccgacgtgtcgccgctgatcaaccagctgcgccgcaccgaggcccaggccgtgttcccggtctcgtacctcaacgacagcctgctgatcatccgcaacatgcgccagcagggcatcaacctgccgaccatcggcggcgcggccggctacatcatcccggacttccgcaacggcctcggcgatctcgccgacgacgtgctgtcgatctcgccggccgcctacgaccaggcgccggagttcaccgagcggttccgcgagcgtttcggctacttcatggtgcacgaggcgcaggagcatgcggcctgcatgggcgtcctcgcctcggccctggagaaggccggcaacgccgacccgcgccagctgcgcgacgtcatcgcctcggagaccttcgacgagggttgggccaccgtcatgtcgggcggcaagatcaagttcgacgagaccggcctcaacgtccacgcggtgccgatgatggtgcagtggcgcggcgacgagctggtgaccgtcgctccggccgaatacgccaaggccgaggccgtctggcacagcctctgatcccgacctcaagcccccgctgaggggctgccaggctgccgggagggtgaccacgccctcccggcgaaccttgtgaggggacaatggaatacctcatcatcctgctacagaccctgcttgacgggatcatgatcggcggcgtctacgcggtgctggcgatcggtctcagcctcgtcttcggcgtcatgcacatcgtcaacttcgcccatgcggagttcatgatgatcggcatgttcatcggctgggcgtgctggcacttcttcggcctcgacccgatgctcggcgccttcatcgcgctggcggtgaccttcggcttcggcatggtgctgcagcgcgtgctgatccgcccggtgctcggcgcgccgcaggtcgcccagatcttcctgaccgtcggcatgctcttcgcgctggaaaacgccgcgctgatgatcatgggcgcggaataccgctcggtcacgaccccctaccagacccagtcgctgacgctgttctcctacggcagcgaacgcgtgctggtgggcatggacaagctctacgccttcctgatggccctgctgtcgggcagcgcggtgtggctgttcctcaacaagacccgcttcggcgcggccatgcgcgcgacctcgcaggacccgatggcggccaagctgatgggcgtcaacacggacctgatgtacgcggtcgccttcggcctcggcgtcggcaccaccgccttcggcggctcggtcgtgctgccctacatcaccgcctcgccggcggtcggctcgggctacgcggtgctgatgttcacggtggtcgtgctcggcggtctcggctcggtgaccggtgcgatcatcggcggcatcgccgtcggcatcatccagtccttctccgccctgttcatgccgatccagctgcagaacctcgcgctgttcgtggtgttcatcctcgtgctggcgctgcggccggaaggcatcgtcgcccggaggcgttcatgacccgctccaacacgctctccatcgcgctcccggcgctggtggtcctggcgctgatcgttgcgccgctcgggctcgatcccttcggctacacgctgcgcatcctgtgcctgatgctgctgttctgcgcgatgggtcaggcctggaacatcgtcggcggcctcgccaaccagatctcgctcggccacgcggcctatttcggcatcggcgcctacagctcgacgatcctgttcggctcgttcggcctgtcgccgctgctcggcgtgttcgtcggcatgttcctggcggcgatcttcgccctggtgctgtcgctgccgacgctgaggctgaagggtcactacttcgcgctggcgacccttgccgccggcgaggtcgcccgcgtcgtcgccaactcctggaccagcgtcaccggcgggccggtcggcatctcggtgccctaccgtcccgatgccggcttctgggcgctgcagttccagaccgtgctgccgaactactatctcttcctcggcgcgatgatcctggtgtcgctggtgttctggctggtccagacctcggccttcggctaccgcctgcgcgcgatcaaggagaacgagacggcggccgaggtgatcggcgtcaacacctaccgggtgaagctgcatgcctcgatcctgtcggcggtgctcaccgcgatgctcggcacgctctatgcccagttccagttcttcttcgatcccgacacgatcttcggcgtggcgacgatctcggtgaagatggcgctgatcgtgatcctgggcggagccggccggctctacggtccctgggtcggggcggcggtgatcattccgctggaagagatggccaactcctatctcggcaactccatcgccggcctgtcgcagttcgcctacggcatgctgctgatcgtggtgatcctgctcaacccgcgcggcctgatctcgctgttcgagtccgtgcgcgaccggctcaaggggaggcagcgcgcatgagcggccatcttctggaagtgcggaacgtcacccggcgtttcggcggcctggtggccaattccgacgtcaccttcaccgtctcgcccggcgagatcatcggcctgatcggccccaacggcgcgggcaagacgacgctgttcaacgtgctggtgggcatctatccgccgagctcgggcgaggtgatcttcgacggcaagagcatcggcggcctgaagccgcaccagatcgccaagtcgggcctgaccaagacgttccagaacgtcgcgctgttcgccgagtcctccgtgctcgacaatgtcgtgaccggcgggctggtcaaccggagcctcacggacgcgcgccgctttgcggccgagtgcctggagcgggtcggcatcggcgcgatcgcacagaagaaggcgggcgatctgtccttccccgagcgcgcccgcgtcgaggtggcccgtgccctgtgcacctcgcccaagctcctgctgctggacgaggtgatggcggcgctgacgccggcggagatggaggagatcatcgagctcgtgcgttcgctgcgcgacgagggcatgaccttcatcgtcgtcgagcatcacatgaaggcggtgatgaagctgtgcgaacggctgatcgtgctgaacttcggcgagatgatcgccgacggcacgcccgaggaaatcgccagcaaccgcaaggtgctggacgcctatctcggcgccaatttctcgaccgaaggggagggccactgatgcaggcctcggccaacgacaaggacgtcctgctggagatcggcgagctgaccgccggctacggcgcccagccggtcctgcacggcatctcgctgcatgtggcgcgtaacgagttcgttgccgtcatcggcgccaacactgccggcaagagcacacttttgcgcgcgatctcgggcctgctgccccagtgcaagggccgcatcgtcttcgacggcaaggacctgacgaagctgaaggcgcacgagatcgccgggctgggtattgcccatgtcccggaagggcgccatgtgttcccggagatgacggtcgaggacaatctgcgcatgggggcctacgcgcatgccaatcaggcagcgacgcagcagtccctggagcgggtgttcgagctgttcccgcggctgaaggagcggcgcatgcaatatgccggctccatgtccggcggcgagcagcagatggtggcggtcggccgcggcatgatgctggagcccaagctgctgatcctcgacgaaccgagcctcggccttgcgccgctggtcgtggaggaaatgcatcagcgcttcctcgacattcaccgctccggcgttacggtgctgctcgtcgagcagaacgtctcgctggccctgcacagcgcggaacgcgcctatgtgatgtcctcgggctccatcgagatcgagggctcggcgcgcgagctgctgcacgacgaccgcatccgcaaggcctatctgggcatctgacggcgcaaggcccgatgccccccgctcgggccttgcccccgcacggatacgaagaaaggacgaccccgcatggctgagaacgccctcgcc

SEQ ID NO: 279 - DNA, 23324 bp, synthetic construct
  source 1..23324: mol_type = other DNA
  misc_feature 1..23324: note = Synthetic
cgcacgccgatgccgagaagcggaatttgcgcattgatcgccttcaggccgacgatcaggccggcctgggtgccggcgctgccggtcgcatggacgatatggtcgatcttcaggccgcgatcattggcctggccgaccagttcgaacgcgcaattgacatagccgagcgcgcccgtcgggttcgagccgccgccagggatcgtgtagaccttcttgccgtcggcgcgcatctgctcggcgagcctttccatctccgcattcatgtcgagcccgcccggccgcttctcggtggtcgcgccatgcagatggtccagcaacacattgccattgtgattgtaattggcgttgttggactgggtgcggtcttccagcaggatatggcactgcatgcccagcttcgcggcgaaggccgcggtctggcgggcgtggttcgattgcgtcgcgccctgcgtcatcacgatctcggcgccctgaagctcggcctcggccatcaggaactccagcttgcgggtcttgttgccgccggtggacagccccgtgcagtcgtcgcgcttgatccagatctccggcccgccgagttcggccgtcagccggtcgagacgctcgagcggcgtcggaaggtgggcgatgaaacggcgaggatagcgggcgagatgcatcggagggctcctaattcgatttcaggaaacttactgcccggattttcagcaggctaatgcaaatttcacgaaagattatgcgaatcttgcatttttagagcggacgcctatcctcccgccatgcatctggactggatcgacgatattctggccgtcatcgacaccggttcgctcgcccgcgcggccgagcgacggtttctgacgcagtcggccttcacccggcgcgtgcgcatgatcgaggatcgcatcggaaccagcctgttcgaccgctcgcgaaaaccggtcgaggtgcggcccggcgtgcgcgcgctggagccggaactgcgggagatcagcgccaggctgcgacggcttcagcaggaattgcgcctgtccgccgagcatggcgaccggcggatcgtctttgcatgtcagcacgcgctggccacgacgatctcgccccgcatcgtcgccgaactgaccagcatggatggcgtctccgttcgggtccggtccggcaacaacgatgaatgccttctgctgctcgcctcgggcgaggccgatttcatcgtgacctatgagagccagggcatggccgattccggcaggaccgacagcttcgaagtggtggatctgggcatcgaccggttcgtccccgtctgcgcgacgtccctgctggcggaacgggacgccccgaccattcccgtcatcagctatccgggcggcatcttcttccgggcggtcttcgatcatcatatcgcaccgttcctgccggaacggagcagcttcgttcccaaggcggaaacggcgctgacgctcgccgcctgcgaatatgcgctgcagggcatgggggtggcgtggctgcccttcagcctggtcaggaaacatttggcggatgagcgcctgcatcagttggacgaactgccgacccatccgctgcagatcagaatgagacgtctgacccggccgtccggcgctcgtaccgacgagatctggcgccgtcttgaatcgatcggccccctttcgccgcccctatagcgcgttccagacctttcggccggtctcgtccagccggtcgtacgaacagaagagcgacagtgtcaggctggcctgccagtccgggccgccgacgcattggacctcgcccgcttccatctccgcggcgaccgcgccttccggcagccaggcgatcccgctgccggacagcatgcggcgcttgatggcttcggtcagcgcgtccatgtagcgcagcgtcagcggcggcgtgcgcccgccaatggtctgatcgaccaccgtaccgaggaagctgctgggatcgtaaccgagatacggaatcgcgctgacgggcgcgtccagcgaccagccgccctccgtggcggccgcgctctgggcgacgggaagcatccgttcgacgccgatgtccttgcgggcgaactgcacctcctcgaagacgggctgaacgtcctggtggcggtaatagagcaggaaatcgcaggtgccgtccgacagcagctggcagcaggtgcgcagattgtcggaatagacgcgcacccgcagattggggatcagatgctcgaattctgcgatccgtcgggtcagataattgacggagatggtgtgcaggacggcaaagcgctgaaaggccgttattccctgctgctgggcgcgcagggtctgccgcacgtcggtcaggtttgaaatggtctccagcgcgacgggcaggaattgctgtccagcctccgacagctgcaccggataggtcgagcgcttgatcaggggcgttccgagccagttttccagcgatttgatgcgccgactgaacgccgactgcgtgatgttccgctcttcggcggcgcgcgtgaagttcagcgttcgcgcaagacaggtgaaatcgcgcagccagttgatgtccatttccgctgcctctttcgcctcaaacggctgaattgcctgatctatgcaagacctgcatagtttgatgaaatatttgagttggcaataggcgaaggcggctcgctaacaattcgatcagcttcattggcgcaaatgccgcatcgaggccgaactgccggggactggcgatggggatttcgtcagggaggctccgcagacctttgggaggaacagatgacttttccgagaaaaaccgccgcgacgctcgcatttgcgctggccggcagcaccatcgcaggcgctgcatcggccgaaacgaccctgcggctgagcacctatgtgaacgaatccgatatccgctatgagggtttcacgcatttcgccaagctcgttgccgagaagaccggcggatcggtcaaggtcgacgtctttccatcggccacgctgcatggctggtccgaaggcgtcgacgccgttcagggcggcgtatcggacatcagctggatcaatgccgacaaccgcctgccctgctatgcggtcacctctctctatcccgcgcaggtgagcctggaagatcaggtcggtctcgactcggcctatgccgatctgatccgcgacgaagccgccgaagccggcctcgtgccgctgctcaactccaactattcctacgatcaggagtggtggttcgacgatccgatcgaggacatcggcaagctggacggcaagctggtccgctccatcgggccgctggtcagcatgatgatcgagacgtggggcggtgagccggtcttcgtggcgcccaaggaagtgttccagtcggccgagcgcggtgtcgtcgacggcatcaatatgggcgtcgccacctacagctcctggaagctgtggaacgtcatgccgcacatgatcaacgccaacctcttctacggcaacatcatctacatgatgaacaagtccaagttcgacgcgctgacgccggacgagcagaccgcgctttccgaagcggccgccgagaccgaagcctggctgcagccgcgctacgaaggctgggtcgacgagcaggtggccgccgcggtcgccgaaggcggcaccgaaacgaacctctccgccgaacagacggccgcgcttctggccactgtcaccgacaagtggaagtccgaggtcgacaaggcctgcggtgacgatctggccaacagcattcggacgcttctggccagccacacgccctgattgcggcgcttccggtggccctgcttcccacccccatgccggggccaccgaccttccgttgaaattctggagacgtgtcatggatgacggaatcgatcgcttgatccgcgcggtcgagcgggtggtcgtgtggctggccggtgcgggcgccgctctggtcctggtgcagatggtctggatttcctacggcgtcttcgtccggtacgggctggggcggccggaccggatggtgaccgaagcgacggctcttctcctcttcccggtcgcttttgccgggctcgcctacgccctgcgcgaggatgcctttccgaaggtcacgatgctgaccgatcagctgcggcccggcctgcgccgcgtgttcgacatcgtcaatcacatcctcatggtcggcgtcggcgccttcttcgcctatgccggcgtcagcgccacgatccgttcgttcaattcgggcgtcgcgtccgagatcctgcattggccccgttttctcttctggggcccgggcgccttcgcgctcgtgatgttctcgatctacgcgacgctgcggctgatccgtctcgttcgaaaccctgcaccgtcgggagacctctgatggaatggtatgtcgtgggccttggccttctgggcctgctgatgctgttcatcaccatcggcctgcccatccccttcgccctggccgccgcctcgctgccgttcctctggcagatccaggggtgggaaacctcgatcgtctcgtccgagctgaagctctggggcgtatggatcgactatattcttctggccgtgccgctcttcgtcttcctgggggagctgatcggcaaatccaatatcggcccgaacctctatcagttcctgcaccagggtgtgcgcatcaagggctcggccgcctacggctccatcggcgccagcgccgggttcggcgcggtctgcggctcttccatggtcggcgcgctcaccatcggcggcgtcgccctgcccgaaatgctgcgccttggctatggcaggcggctgtcgagcggcgttctggccgccggcggcaccttgtcggtgctgatcccgcccagcctgatcctgctgttctacggcatcgtgaccgatcagagcattggcgatctgttcatcgccggcgtcatccccggcatcattctggtctcgtgcttcgtcatcgtcgttctggtctggggtatgctgaagccgcaggatattccgagcagcgaacatgccgagaagatgccgatgctgctgatcctcagcacggtcggaccggtcgtgctcatcggcctcgtcatcaccgtggccatctatgccggcatcgccacgccgaccgaggcggccgccgtcgccgcgctcctcacggtaattctggcctattgggtcggcgggctgacctggcagggcttcaaggcctcgatcttcgccaccatgcgcaccatgggttatctcggccttctgctctcggccggcgtgctcttcggcttcgttctgacctattatcgcgtgccgcagcagttcaccgagctatttctgtccttcgacctgtcgccctataccgttctcgcgatcgtgctggtgttctacatcattctgggcatgttcctcgagccggtctcgatgaccttcatcaccctgccaacgatctatccgctgatgagcgcggccggtttcgacctcatctggttcggcgtggtctacaccatcacgatggagatcgcggtgctgacgccgccagtggggctcaatctctacgtcatacaggcgataagtcgggacaaggtatccatcggcgatgtgatcatcggctgcctgcccttcatcggcgcgatgatcctgctgatcaccatcctgatcttcgctcccgatgtggcgctctggctgccggagcagatgcgctgatggaaacactgccttatctgcgggcaggacggggtccgacgcttgtcctcgtgcacggctatctcggcggcgccgcccagtgggagcgcgagatcgaatggttcagccgctcctacgatgtgatcgcgcccgatctgcccggcttcggcgccgccgccgaccggcccggcgaggcgacgatcagcgggatggcgcgggccatcacgaagcttctggacgagttggggatcgacaccttcaccctgctgggccactccatgggcggcatgatcgcgcaggaaatcgcggcgacgcgtccgaaggccgttcgcaagctgatcctctacggcaccggcccggtcgggctgatgccggatcgcttcgagccgatcgccgtatcccgccagcgtgtgcagcgcgatggcgtggccaagaccatcgcccggatcggagcgacctggttcaaggatggcgaacgggcccgcggttacggcaggctggtcgagatcggcgaacgggccaatccgcaggcggcgttggccgcgctggacgccatggcggcctgggacggtcgccaagcgctgggcgcgctgtccatgccgacgctcgtgatctggggcgattccgaccgctcctaccgatggccgcagatcgaaacgctctggcggggcataccgaatgtcgacctcagcgtggtgccctgcgcatcccatgcgctccatctggaaaagccggacctgtttcgcgccatcctgttggagttcataaggtgagtgctcggcggaaaccatgtcgctatggggagcttgccgattcatgattctgaaaagcactgtttttcagatgagtagcgcggtctagcgtaccctatcgtgcagtaccatggtagatcaaagacttaacttgggcctgctgcaatgcgtagatgcttacgtaggaaattcgcgttaataggcggggtgttgcggcatgctgaagaatggctcagactcgctctggcgttccggtgataccgtggtcgaaaccgcgcttattcagcattcttgcttgccatcggtatttcgcgggtagggctgaaaggccggccgcgtcatcaacaagagcttccactgccgccctgagcccggaatcgagggacattgcggcgttgagatctttcagttcgccatatcccttaatgttcggaaggtcgttggtcgccggatcaacggcaaaaccttccggcgcaatccatttcgataatgtcgtatttcgcgcgaagaagaccgcgccgctatcaaggctggtgccgtcgctcagcttgacatcgccctcatagcggatttcgttgcccacgagatattcggacacacgcgtcccatcaacgccgatcgaaacgataccgtggtcggacagcgtgctgatctcgtcggacgtcgcgacaccgtcgccattcaaatcctgccagattcgcaacgaggaaaagatcgcatcgttggcatcgatcaagccatcgccattgctgtcggcccgccccagttcggtgaaaccgtcttcggtcgccgagccgaacagttcaccgatcccatccacgacgccgttgccattggcgtcagcgagtagaaagccatcatcaccgctcagccggccggtgcgctctgcgaaaccatcatccataaagtcaaagtgggcattggacgcctcgacggaaatcagttcgataccgtcaccgtctaggtcgatcacaaacggatcgagcggcggcatcggaggcgaaggcggccagccgaaggggaagtcgatcttaatgcctggataccagattttcaaacactgttatataaggtcaggaccaagagacggagtcgtatcaattatccaatttataaaagtgttagattatcgtatatgttaaatacatctccaatttcggcatggagaagtagatcctttgctgttcctcatagggcatccttttctgccgaggataggagattaccctttccataagagtattctatttaaagcagaaaaagagggatacaggcggctgcatatgcttgagctccccatgtagggaactcgtcgttaggcagactcgagatcgctcgtagtagatccagatctgcctgagcgcgggcgtgagtgtcaggattttgatatctcttatcatgattatagaagagcacgtctagtgcatccttcagggttgctccaaagtcgagtagctctgggtggacttccccaccggaatatccggggcctccgtagttgccgtaggtcggtatccaaatcagatggccaggaatttgcaccttcacgttccaattgatactcattgataagccctcgtaaagaagcgtttggtggcctcgctcagatctgttgcaaccaagaggcgacacggcaaatcaagtgaacactcaacgatctcgaattttgaaccgataggcttgaggccgacgaccttattagttgtcggagccataaaaaacagttctttaggcgattcgctcaaagtcgtcgaattattctctgagcccagtcgaattacacgccacttcgggcctgaatcaatcgaataaatcacagcatatttgagatttttatcgacagagcttctctcgacactttttaaatttgaaatcaattgatatgaaatcaattgatacggatcgatgtctttgacaatatcttcttgtgagaagcagaaactcaagttgcgctgccagggttctgacgaggaccgttcaatcatcttgctaggcggccactgttccccgaaaggaatacccagcttaattgcaatgcattggttggccaagaagggccgtccaatttgataggcgagaatgccgggaagaagcctttttcgctcgcccgtgacaacgtcgaacttgaagagagctcgccgctggttgggattgcgcgatgtcctgcttggttcggacagctgctcgctaaaatagatttctttgcccactttcgtgggatagaagaccgccctctcaccttcgtaaattggatggaaacgattgccctccaagtccacctcgacgatccgctgcccgacgagagctactggatccggaaagagattaatctggttgagactgccctctccctcgacgataatctcctgcagcagttcctttcgtgaatcgtagaggaacgacctcacctcaccgcctttcagcacgctgaatgagatcaaagaacagtcggcattacatgtgaggtcgagaacctgatggtttcgctcaccgtgagcggtcaatccatatctccatgtcaagaggccgcccacgacaagaaccgaaaaaatgagcaagagatttcgtacggccatgctggttctaaccgctcacgaacgaactactgcaaaatatgagcgagtccctgacagtcgaccagcgctcttcatagtttcacccttcaagacaaaaaaccttgaaccgcttttccctctggcggccacacctctagaataggaaaataagcgcgcgccagatgccaagtccagcactccttagttgtattcaagaagattctataacgccaaatcggttacatttgctctggcgtaaaaaaggcctgcggaattttaattgatacattcgaaagggccgcagaggcgtcggcttaatgtcaaacacatcgacagacgttccgtctgcttaacggcggcccccgagccgattaatcatttctcggaggacctgccagtcagctaagcgctcccatcgaggacattccggcatagcttgtcctgccccagtagcggacgttcgcgctatcctcatagaacggcagcttcgcgccgccatattagtcgttcaaaacctataagttctacccgcaaagctgcccttcacccatacgggctgaaggtgccaccatagggggagcagcctttgcttacaggggtctaaagtcgtcatgtccaaggcgctcggctgcgcgttcttgcgtccaaactgtagttgcccaagaaaaaagcgctcgccggagcgagcgccttatctggtgcatatctcagcttgttaacggctggactgcgatttctgaacaaactccatatagctccgcaggccacagaaatcaaacaaaaagtagaggccgaagcccctcctttccgcccgggttcagaaatcgcaggccaaccgcaactacacgctccactttacttgaacgcatcaagtaagagggtaacgtaattgcgcgacgcgcggcgaaccgagtttgcgccacagttgatctttctgtgtagccagcgcttttggagcaaatcaaaagtgctgacaccaagaccgattcgcaaaagcagaatgtcattgcttaagcgatgtgtcagcacgtggagcatgtaaggaattattttgaagtaggggacgatggccgattatcatacaacctggggatttgacctcggaaccaattcgctcggctgggcggttatcgaaacacgcggcgagccgggccagggcaacgaaggtcgtatcgttgacagcggcgtgcggattttctcgcaggctgaaatggcggggcgcgatccgcagtcgaaagcctcactggccgttgccaggcgcgaggcgcgcggtgcgcggcgacgccgcgatcgctacctgaaacgccggcggcggctgctcgatctcctgacacaatacggcttgatgccggttgacggcgaagcgcgcgaaaagctcgtgcgcgatcatgaggaccgcaagggcggcgacttgtcggaatcggtttatgccctgcgtgcccgggcgctcgacacagcgctcacgccgcacgagatcggacgtgcgatatttcacctcaaccagcgccgtggcttcaaatccaatcgaaagaccgaccgcaacgatcccgaacaaggcaagatcgcgaccgccatcaatgccctggaagcacagatgattgagaacgaagcgcggactttcggtgagtggctgcatatgcgtcgtgaacagggtctgtcggtgcgcgcgcgcatgactgccgatggtaagggttacgacttctatccttcgcgtgcggcgcttgagcgcgagttcgacaggatcatgcagacccagaagcgcttccacccgaaactgctgggcgacggcgttatcgccgacatccgcgaagccgtttttttccagcgcccgctgaagccggttctggcgggcaaatgctcttacaatacgaaggaaacccggctgcccaaggcgcatcccttattccagaaatttaggctgctaaaagaagtcaacgaactggaaatcgtcggcgaggaccagcagcatattaagttgaggccggatcagcgtgacgcgctggtgctagcactgcgcaccgacctcaataaacaaggcaagataccgttctccaagctgaagaagcaactcggccttggcaaggaagcgcgctttaacaaggagaccgacaaccgctccgacttggaaggcgacgtcatctatttccgcatgtcgcgcccggagtgcttcggcaatcgctgggcggacataacggtggaagaccaggccgcgatcaccgacaagttgcgcacggaagcggactacaaggaactcgttcgctggctgcaactggaagccgggctggacgagacacaggccaaggcggtggttggcatgccggtgccagatggcttcggccgccttgggcctacggcgttggcggcgcttatcgacgcaatggagaacgacaccgacgagaacggccacgtcatcaccgaggctgctgccgcgaaaaaaatctatggccgcaccaactccgaggcggatcccaaccgcaggggcactgcctatctgccgaaataccaggaggtgctggaacgccacattccgccgggaaccggcgaggccgacgatccttacgacgagcgcatgggccgcattaccaatccgaccgtgcatatcgcgctcaaccagttgcgacgcatcgtcaatgcgctgatcgccaagcatggcaagccggaccgcatcgccatcgaggtcggccgcgagctgaagctgaatgacaggcagcgcgaggcggtcaacaagcgcatcgggaaaaacacgaaggaagcacggcggcgttctgctgaactgaccgatacccacaaggcggctgataccggttacaaccgactgcggctgaagctgtgggaggagatcaatgccgaccagccgctcaaccgtccttgcgtctattgcggcaaaccgttgtcggcggccatggtgttgagcgccgagaccgacatcgatcatatcctgccctattcgaagacgctggacgacagtcaggcgaacaaggtgctgtgctgcaccgcctgcaaccgcgaaaagaagaaccgcgccccggccgacgtgccgcaatggcgcgggcgctatccagatattctcgcccgcgcaaccacgttgccgaaaaacaagcagtggcgttttgccgaggatgccatggaccgtttcggcgcggaggaagggttcctcgcccggcaactgaccgatatgcagtatatctcgcgcttggcgctgacctatctcgctcacctctatgactacgaggagccggacctcgatggggtcttcagacgccatgcccgtgtgcgcgcgctgcctggacgcatgacggagatgctgcgccggtattggagcctcaacgagctgctcccggaccacaacctcgtcgatattgacttgaccaggcataagaaccgtctcgaccaccgtcaccacgccatcgacgccatcgtcatcgcctgcacctcgcgggcgttgatccagaagctggcgacggctgctgctcaggcggaagagaaaggcgcggaacgggtcgtggagaagatcgcgccgccgtgggagagttttcgagaggatgtgcgcgcagccgtcaatgacatcacggtcagccacaagccggatcatggcacggtcagccgcgccggttacgccaatggacgcgggcagaccgccggcaagctgcacaatgatactgcctacggcctgaccggcgaaaaggacgggaaaggcaacgatctcgtcgtgcgccgtattctgatcaccgacatcaggaagccggctgacatcatgaagatccgcgccaacgaacatggacatagcgaacttcgcgaccggttgtggcaagccacgcgcggcttggaaggcaaagccttcgaggaggccgtactggactttgtaaacaacgactcgaagttcaagggcatccgccatgtgcggatcgccgaagtcgaaagccctgtgtggatcgagcatggcccgggcggggaacaccgcaaaggctatctacccggcggcaacgaccgctacgaggtctgggaaatgcccgacggccgatggcaagccgaagtcgtgacgacattcgatgctcatcgaccggacttcgttccgcggatgcgacaggcgcatcacaatgcccgcaagatcatgagcctgaaaaagggcgacatggtcgcctacaacgaccccgatagtgggaggcgcatcatcgcaatcgtccgcaagttcgatcagcgcaacaagcagctttatctcgatccgcacaatgaagcaggtgaactcgacaagcgtgaaagggagaagacgtacaaaccgctccgacccatgccgaacccgctgaagaaataccggccgcgccaggtccgtatcgacgagattggtcaggtgttcgaccctggcccctggtgggagaaccgcggcggttaaccaagagttaagctcggcagggcgcgcagtacgccacggtggtagattgcgaacatgttgcgcgtggtcgatctttccaccgacggcttgtatgtggccgtccaccgcggctttctcacggtctccaaggatcgtgaggaagtcggacgtatcgcactcgacgatatcggaggcgtcattgcccatgcccatgggctgacatggtccaacacggtgttcgtccgtctttccgaacgggcagtacccgttgttctctgctctcagaaccatatgccggtggcttgtatctggccgctggagggaaaccatctgcagggcgcaaggctcaatgctcaggcaagcgcaccacgtccgaaggccaagcgcatatggcgcgatatcgttgttgcgaaaatacgcatgcagggtgccgtcctggcctctgtcggcgtggaatccggcgcgttcgacaggcttatgcgaaaggtgcgttccggcgacccggacaatgtggaagcgcaggccgcgcggcgttactggcaggcgttgatggggaaggatttccgtcgcgaccgggccgcggaaggtaccaattcactgctcaactacggctacacggtgctccgcgcgacgatctgccgggccgtgtgtgccgcggggcttcatccttcgatcggccttcatcataccaatcgcggcaatgcgttcgcgcttgccgatgatctcatggagccgtatcgcccgctggtcgatcgtgccgtttacaatcttgtgcgagatggctgcgcggaggtgtcgcccgaagccaagaccgccttggcggcattgatggcactggatctgcccgcgccgcacggcatgagcccgcttcacgtgcacgcgacacgtcttgcacagcaattggcggcctcgttctgcgacgaggcaaagggtctcgatctgccggtgccaccggatccgctgacgctgacgggtttggcgcaccgaagtaaagctgcatgaccacgctgtacacgcagaaacggggagagcggacgcaactgtcctatatgtccgcttacaggctgatgtggatgctcgtaacctttgatttgccggtggatacaagaaagcaccgagcgcaagccacgaaattccgccagtttctgctcgatcagggctttgagatgagccagctttcgaactatcttcggctggtcaacgggcaggatcagtttgatacctattcccggcggatcgaatccaatcttccggaacgcggggatgtcttcatcttccaatttacggaccggcaatatgaaaacatcgtcagattcagcgatcaaagtcgccgtgcacgtcggaaaaatccagagcaaatcgccctgttctagcggctctgacttgttctgcgccagaatgaaaccccaagccctgtgtgaaaacaggggcttggggaaacatccaggctagcagttcagaaatcgcaggccaaccgcaacaccgtccctgacatgtcatcgcgatcgatgaggctagcagttcagaaatcgcaggccaaccgcaacgaaaacgaataaccgatcgcgttatgctggaggctagcagttcagaaatcgcaggccaaccgcaactgcaaacaaggccgccatctgccgggccgaaggctagcagttcagaaatcgcaggccaaccgcaactcgcgggcgaatatgggaatgagaaggagcaggctagcagttcagaaatcgcaggccaaccgcaactggtatggcaaggtgccgccgcatgaggtgaggctagcagttcagaaatcgcaggccaaccgcaacaggaagggggtggacttgtcggagctgtccaggctagcagttcagaaatcgcaggccaaccgcaacgtgcagtcgagaagatgcgatctgcattgcaggctagcagttcagaaatcgcaggccaaccgcaacacaaggcggcccatgcccaagccattatcgaggctagcagttcagaaatcgcaggccaaccgcaacgagccggttgcgcgatagcccgcctctaccaggctagcagttcagaaatcgcaggccaaccgcaacgctgcgcgggcggcaggctttcttgcaagaaggctagcagttcagaaatcgcaggccaaccgcaaccactccgtgcgtcgaccgatttggtcgccgaggctagcagttcagaaatcgcaggccaaccgcaactcgtggtcgtcgaaggaggccagttcggccaggctagcagttcagaaatcgcaggccaatcggcgggagtgagattgccgatgctctcgtggtatcggcggtggttgtaatgatcgacgaacgccgcgacctgccgctcgagatcgcccggcaggaagtagttttcgagcaggatgcggttcttgagcgtctgatgccaacgctcgatcttaccttgggtctgcgggtgaagtggcgctccgcggacatggctcatgccgttggcgtcgatccactcggcgagttcggcggcgatgtaggacgggccgttgtcactgagcagcttcggcttgtgcagcaccctggcgctgtcacagcctgatgccgtgagtgccagggtcagcgtgtcggtgacgtccccggccttcattgtggtacacagcttccaggcgatgatgtagcgggagaaatcgtcgagtaccgtcgacagatagaaccaacccagccgatgaccttcaaataggtgaagtcggtctgccacagctggttgggcgctgtggtcttgtcgtggaactcgtcggcggccttgataacgacgaaggccgggctggtgatcaggtcgtgggccttgagcaggcgataggccgaggattctgagacgaagtagcccttcgtgtcggtgaaggtgaccgccagttcccgcagcgacagctccggttcgttcagcgccagctcgatgatctggtcgcggacctcatcggggatgcggttccagacccggctcggacgggggctgcgatcctccagagcgtcgacgccgccggcaaggaagcggtcataccagcggttgaaggtcgatcgcggaataccgaacttctgcaacgtgcgccgcgtcgacagatgcgagctctcgaccaggcggatgatctccgccttatcggatgcggggtatctcattcgtcgtcgcccccatccgcgatcatgctttttttgcgcagccgcagtttcagcgcctgctcggcgacgacctccttaagatcgcgcgcctccttgcgcagcaccttcacctcgtcgctggttgcggcgcgcgccgtgtcgccggcaagccgcttcttgccggcttccaagacctccttcgaccagttgtaataaaggctctcggcgatcccctcgcgccggcaaagcgccgcgatcgactcctccccgcgaaggccttcaagcacaatgcggctcttctcctccccgccatactgcttgcgggtcgcgcggcggatgtccttgatgacctgttccgcaggcgctttccctatcccggatttctgtctcatctgcgctcctttgaaaggctacgataaaccagaaaccctccgctctcagttaagccaatttggtcccatcagtgctgacgccggacaagcatgacgggattgttgcatggacatacatatgagagacattgcccgtcaggagttcctattcagcatgtccaagagaagcgatgcatggctcaagctggttcaggcggtcggccaaatcgaggtggctgtcggcaaagccatgcaggaaaagcataggttgggactttcggaataccgggcgcttcaggtgctcgcgcgttcgcccgattccgaactgcgcatgcaggaactggctgcgtatttgggattgaatcaaagttccatctcgcggttggtggagcgtctggaacgcgcggagcttacagttcgcgatctttgtccggacgacaagcgtggcgtctacacggtcctgaccgaaacgggccgagcgcgccttcaaggcgcacaagccgactatggcaaagcgctggactcagcgatcaagcggtacggatgcgaggatctgttgtccgcaaagctcgttgcgtctccttaggcgaaggccaaatgttcgaatcagcaagtggatcagatcgcgatttgcatcctcatgattgcccaacaaggtcggctgctgttcggtcgcttggctacgattaaagacgatttggcggacctgcacggaacctccccatcatttcgggcggcagcacggccatggctcagcaaccggcgcaaaacttatgggtcaataacgatccgccgtctgcccctcgaaacacacggcatgaaggcgcgttggcgttcgtcctcgccaagcactttgtcgcggtgatcgacgtcgcctgaaagcagctcagtccggcattcgccacatatgccgccttcgcaggaaaacggcacgtcgatgccgtgctcatgcagggcctcgagcgccgtctgctgctccgacacttcgaaggtttcgccagttttgctgatttcgatctggaatgcgggtccgaatcgattgtcggacgcggcgagagccgagaactgctcgaagtgaatgcgttcggccgaaattgccagggaaacagcagttcgctggtacgcttccagcatgccggctggcccgcagcaatatgcatgcgtcgtttcggacatgcctgtgagaagctcttcaaaatcaagccgccgtggagccgtgggatcctcatcagcatagagaaagagacgatcggcaggacaaagcgtccggatttcctccagaaaggccatgtcctgcagggtacgcccgcagtagtgcaactcgaagctacgctcgtagcgaacgcattcgtagatcatcgcgaggatcggcgtgatcccaatgccgccggcgatcagcacggagtgacccggctctgcggtgagttgaaactggtttgccggataggtgacgaacaattcatcgccgggacgaagagcatgaacgccaatcccgccaccgcggctttcggcctccagcagaaccccgatccggtatgtggtcggatcgccagggtcgctgcagagggaatagggccgcctgatcccgttcggcaggtgcacggtgacatgcgcgccagcctcaaagggctgcagctgcgggcgataggcgtgtcgcagcgtcaccgcgcgcacacggtcggtttcgcgactgaccgcttccaccacggtcttctgcagaagcttcattgccatgagggaccctcagaagagcggtgcgatcgtgtcgccccttgcaatcgtgccacccttgacgatctgacagttcaggccggaccgattgatcaggggatcgaagacggggcggtcgagcaggcgttccagatatttgcagggcacgttgaggcgtccgccgtaaagctccacggaaccgacgcggaagcgtttgccgacaaggtggttcaggggaacgccgactgtcacgaggttgcggcgtgtctcatgcggttcgatcgtgatgccgtgatcccgctcgatcgcttcgagcgtttcctgttcgatcagcgtcacctggcggtcgggatgcggctttccggagtagtatccattgcccagcgcgtatctgtcgccttcaagaccgacgccctcgaccagccgcgcgctggacagagtttccatttccacccctgccgcttctgcgatgtagatgccttcaagacgtccgcgccaggtcagactggtgtcatcggtggcgcgatcactggcaagccgtttctccaattgcggcaaccggtcctgcccccagaaaatctcaccctcaacgacatagctgggcgcaccgaagacgccggcctcgatcgctgcctgtgtgttgtcgtcgatgagggagccggactccgcgcttccaatccagtgctgcacctgctcgccggaatatttgaacatggaggcaatgtcctgcagcgtcgccatgtccgcaatattccggtcttcgatccagagcgcgcgcatcacagcctcggccagatcgccgatatcgtgattttggagaatggcgccggcgagcaaccgcagggcattttcattgtcgaccggaaaatgctgcggttgcgggatcaggtcggagcccagcgcctgcgcccatctctcaagttcaaccattcgataggcctgccgttgctgcgatcgctgcatcagcggcagcccgccggtggcctggaggagggacccgctgcgcacaggcttgtatgccacggttgcgttcagtcgccttgcaaggtcccgaaggcggcgatggcccagaaaggaccagtcggacgacggccagaaatagtactcaatgacagcttgagacatttattggagttcctgtggggtagggggaaaggcattgggacggcgccgaacagccgaggccacaagccatgcgagaatggtgatcgccaggatcattgcgccgctccgccaaagcgggtcatcgccaagcaggcacgcaaggccggcaatgccgagcaacggccgcagaacgaacggtacctcgcgctcgaagaacccctcgaccgacaccgatagcgcggcaagagaaatcagtgtgatcgcgccgccggtgagagcgccgatgagctctccactcaagatcggtgtggtgaaaaaggcaatcggcagaacgtagatcgacttggcgatccgccaggcgatcatgccggtgcgcagcggcggactgttggcaatagccgccgccgcataggcggtgaggcaaaccggcggcgtgacattgctgtcctggctgagccagaaaatcgccagattagcggcaacgagaatggcagccatcgtcgcgggatcgaccgcttggtcgacaagcaacgctcgcgattcctgagggagttcgttcaggaagacgcgcgcagccgcttctcccttgccgatggacgccgattggggatcgagcaaaagcagaacgggttgcagggcgtccgaaatatcgcccgtggcgagcggctggataatcgcctccagtgaaacgatctgcgccaatgcgggagcgctcaatgtggccagaaccacataggcggcggtgaccggcaggcccattcccagaacgagggacgctatggcgatgagcagaagggcgagcagcagattgccgccggcccagtcgacgacgagcagcgaaaaggtcgcgccgaggcccgtcatcgctatgacattgacgacaagaccgatcgcgacgagcaacaggccggtcagcgccgcgtttcgcgacccctccgatagcgccagcaaaatccggcgcggacccatcggccggtccgtcagccacgacgtggcgatgacgaggccgatcgcaaggcccgcagcgtagaccggcgtatagcccagcgcgagcatcacgacgacaccgcagacggggatcaggaacgatacgccgcgtttcctgacgatgtcccaggcgttctgttcgtcctggagcacgtcctcacccgtttccagaccgatccgctttgcttcgatgcgaacattgagcgccagcgagaggaagaagaggagggcgggcacgagactgagcagcacgatattggcgtaggaggtctgcgtgtagctggcgatcaggaaagcgccggcgcccatgacgggcggcatgagctgcccgccggtcgatgcgctggcttccaccgcggctgcaaattgcggagaaaagccgctgcgtttcatgagcgggatagtgacgacacccgtgctgaccgtgtttgcgacggccgatcctgaaactgttccggtcagcgccgatgcgccgatcgcgacgaagcctggtccaccgaccattcggcgggaagtcaccttggcaatatcgacaatgaactcgccagcgcccgagcgcatgaggaacgccccgaacagaacgaacatgaagacgaagctggccgatatgccggcaatgctgccgaacattccctcatcggtataaacgctccgaaacagcaccgtctcgatgctcaatcccggaaagccgagcggcccgtcgataaacttgccccagaagagcgcgtagctgagaaacagcgctatgacgacggcgacgatcgggccgctacggcgcgcgaactcaatgccgcccagaataacgagcccgacgcagacaagctcccaggtgtcgaagttcattccccgtgcatagaatgcgctctggcgggcgacgagaacaagggctgccagggccggcgcgagcgtcaccaggctgacgaccagccatgcccaccgggtcttgggcctcgcgaccagaagcagtacgagggccaatgcggcaaaatgcagggccgccagttgctgcagcggtggcaccgcgaacaggttgagccacaaatgcagaagggagaccgccgcacaacccaatgtccgggcatcgaagccttcgggcttgatcgcgttcatgtcgctgcaaatccagctcagtccgcgagaagcgattgaggcacgtccacacccgcctcgcgatagaagctgacggcgccgggatggatcggaagcggggaaccctggatggcgttttcaagcgccatctctttggtcgcgccatggatcgcctgaagaaatggcaggttttcatacatggtcttgacgatccgatagacgtgctcgtccggcacatcgctgcggcacgtcagcaggttgggcgtggccatcgtcatatggtcttgcgactgacccggataggtgccggccaggatcacatagggggaccagatacccaggtccgcattcgccttggcaatctgatcctcggtgtatgacagaagcgagatttcgctgcctgcggacgccatgaggcgggtgaccgcgccgacgggaacaccgccgcctatgatcgcaccgtcgatctgaccgttcatgaaggcgtcgaccgtcgcattatagcttagactcgtcagatcgaaatcgctgtccagatcgtagccgagattgttcagcatcaccgtgttcgatccgatggttcccgaattgggccgaccgaacgaaaccgggtgtcccttgagggcggcgaggtcgtctatcgtaccagtgtcgacgaaatcgttgcggatgacgggatgctcgacattgttccagagcatggagatggcgcgaatatcgcgctgcggctccagttcggagagtgcgccgctgccagtgcgggcaaaatggccgaagaccgattgcatgatggcaaattgggcttcgttgcgcttcagcagatagacattctctccggagccggcagagttgatggcgttgagccggatgccggtttcgggggccagccgaacctgcgtcaatgtcgcgatggcgacgccgaccggatagaatgttccgccggtcgacgccgtcgaaagaacgtattccgatccttcggcagcccgtaggccgcggggcgccccaagcaacccgaccaatgcggcggccgagccacccatcagaacattgcgccggcttgtgttgaggctcgctcgaatagctttcatgacgttccctccctgtcaccaaaggcatacagcgggagcgttcgtcgcttcaattcattttatcaatatcaggtatagtcttagcctatgatttagccggccattcgcgtttgcaatggtcgaggaaatctctggcgtgcggacgcaactgctcatcgttgcgccagatggccacgacgtgccgcttcaagcgcggatattcgagttcggcgtggatcagaccaagcccggcggcgcgaccgaccgccaccccttttggcatgagcgctacgccatattgtgcttcggccagacgaagggtgagattgacgctgtccacttcggcccggatatgcagcgggttttcacgtgtggcgcgattgagaagggagcggatggcatagccgttctggaaggcgatgacagggatgttcgtggcgagccgcttcgtttgacgaagctgatccgcccagggcgccgatgggtggaagacggccacgatgtcttcgcgaaagagcatttcgcttgccagatcgtcgtgcagattctgcgtatcgtaaacgaagccgac

SEQ ID NO: 280 - DNA, 23321 bp, synthetic construct
  misc_feature 1..23321: note = Synthetic
  source 1..23321: mol_type = other DNA
atcgacttgtcccacttatcgccccagggataggccgtcagggtgcccgcccgcgccgcatattcccatttcgcttcgctcggcagtcggtaaagcccctccgaactgccgccggtctcctcatttagccactcaacatacttttgtgcatcctgaaaggagacattgatcaccggacggcccccccgatcccaacctttatcaccgggcttttcaatccccgtagcatcacaataacgatcgtattcctcaaaagtcacaggataccgcccaaccgcaaagcgacggtcaatcgtaacacggtgttgtttttcactatcaaagtgttccggctcatcctcaggctcatcctccggcgagcccatcaaaaacccctccggacaggcaggaatgatgatcatttcagggcaccaatccgcgtcaaactccaaaaaacaacaaagatcaggggcaatatcaagccgacgaccgaaggcaagtgagataagccgttttatacgggttagatggcgcggggcttcggattgaagcgtgttggcgcggtcgctaagtttattgaggtccaccttactctgtttgagactgcggcgcacaaaggtcttgaggtttaccaagacccggaccactcgatcaggatggctcctctctaatgcgatctcaatttccttagaagcctctttgaacaacggggacaggtcattgctcagatttattacctgtcccggggccgatgacctgccatccatgagccttgcaagaaggttcagcaaaccggcaaaaacgccattttcaaatagttctgcggcttcagccggttcccctgcgggaaaaagggactcgatatccttccaggcttcttccagggtgtcagcatccaaacggtcccagttgtctggattgacgctgagcaaacccagtagacggtcaagagcttcttccaggatctgtcgactgtcgggggaaaacgcgttgctcaacgcaggaatctcccggcaggtatttcgaaccgatgccgcgtggcttgccagctcatcggccagagattggacggccgaggcaaaggtccgtggcccgggtccaacatcgttggcaggagtattggtctgccggcgccccttttcaagaaacaaatcaagacggggatcgttcttgtccgggtggaccgttccactgatgagcgcctgctcgtacgcttcttcaaagcgaacgttattctcatcttcactgcgccagccaggccagtgttcctgcatccagtcagaccagctgtcatcggaagaagcatcggcatcggacggtgcgaagccatagagaactgcgatggcccgctctattttttctggaagatggtttgccggtacactatcattcgaaccggtgatgtattggctcaagccgcttgcgcttatgcaaagcaccttggccagatcaccctggttcttgaaaaacggatagtctgatgggcaatcatcacccagtttttgaggaagggtttttctcaagaaggtcagcttttccttcaatcctggtacttcaatcacgctcgccctccatccacggcagaaaagctaacaaatccggtcaggtagcgcgagtgccccaaccggatttgcatcggtctgccattgcaacgcaatgttactgaccaggacggcgcaacttgcgcgccagaagtttgacaccggccagtgccgcattcaccagccaggcagacacgataaccgcggcaacgctcagcaaggccgggtcgagatcaagcccaatggcctcaaaagccgtctgggcaagcgggacaagggcactttgaagcgtgccctttgcacgtgagaggaaactgaatttctgggtcatgtcctaatctccaaactcgaggaatgaagtgaaccggttcacacccaatacatacggctagtaattcgcgatttcgatcttaagttattgaattcaatatatttttcttgaattttcaaactgtcacagttgaataattcaagtcgctttcttgaattttcaatttttatggaatgcgcggaagttgaaaaatttcttgaaaccacctcaggcaaaagcaatgctccggcgagagtgcaaaaggggcaggtttggctaatccgtctattcaagagttcggcgccaaggtgaaatggctaaggagcctggcgaccggaaataccggagctgtctggcttcctgacgggtttccgacatttggcgatgatggggacttgcccaaggcattgggaatcaagcccccccgatttggcaattggctcaccggcgacatcaatccggatccggaggccgtacgcaatatcgcgcgcctgttcggttttgccccaacagacgactttctgaagaagcatacttccgccggcgggaacgatccctggatccaatggtgggcagaaaagtggccttctttccgccctaggtatgcgaatgagcagcaaccggcaggctgtgagttcgcagacttccaacaagcctataaagaggctgccgaacatggtcagctgacgtttcaggagcctgttctaccgaaggcaaagcaaagcaccgtcgtcaaatctgccgcaagctcttacaaaggggaagatttcggatccgttgaggcgctggaactccttcgggaccgggttctcacgagcttgaagaccgacgagaccggtaaacacggcaactacattccgatcctggaggcccagttcagccgggctattgcggcacatgagcatgctgaaaacgccgatgacgtggatatcctggcggcggcgagccttcaatttgaccttgtcgacctgttcggggacaggtttgaagccgaactgtcctcgattggcatgccgcccaatctaagaaagttttgggaagcagttcatcgtttgaaagaagggacaggagataaggtcgagctcgatggcgagatgctgcggttaatctctcttgcgctagatgaaatcacaaaacgcttggaagaaaaaccagccgacagtatcgcgaaggccctgaaccaattaaaaggggatcttgaggctgcggaggtcaaatgcgcgatccgcttcggtatcctcaacgctggcattgcctgcgttgaaaagagtgacggcaatgatgatctgcgccgtggcattcgtgcgctgcgcgccaccattggccgaagaccggatcttgcaccagccggctcaattttccgcgaacttgacgctccctggtgtccggaaatggtcgtcattcctgcgtgtccgaatggttttctgatgggctctccggagggtgagcctgagcgtgtggataacgagaagtagcatcgagtgacgattaagtgtcgatttgcgatcggacgatatcccgtgacgtttgaggaatacgaccgctattgtgacgctatggagcgagagaggccagaggatgaaggctggggtcggggtagccgcccggtaatcaacgtttcctgggaggacgcgcgagcctttgttgcatggctgaacagcgaaacaggtgatgatgcagaagggccgtatcggcttccgagcgaggcagaatgggaatatgcgtgccgcggggatcaaagcgggaagaatgcaacgtcgttcagtccctcggttggagccagcagctcgcccaccggagccttcctcacatccgaggaagcgaattttgatgggaatttcacctacaatgggtctccaagaggtgaatatcggcaaaagactgttgctgtcgatcacgaggatttcccgacgaacgcctttggcctgaggcaaatgcatggcaatgttcaagagtggtgcgaggaccatttcgaagatgattatggcagagttccaagcttcggcagcgcttatgagaccgacgacggctcccttcgcgtcttgcgcggcggctcttggatcaacagtccgagggacctccgttcggccttccgcagctggggccaaccagcgctcggggacagcagcatcggcttccgactctgcagaacgcttacctcttagatctttacctctttaaaccttgcggttccgagccgcagatcacctccattttagaacttgatggctctacacttgatgccgccgattgagctcagttttcaacaagcagacgacttccgcctgtgcatccacctcaagctctccaaaggcctcgagcatactttcccgatgatcggtggcagtcacttcaaggttttcgatccaggcaatgaaatactcggcgtcgctgtagcgctcgtctcggatcgcgtccttcgactttgcctgaaacacagtgagctgacgacgcatgaggcaatagcgtcgaaacgccttcacaaactgctcgtagctctgctcatcttcaggtgccatatgcgttcgccgcgccgatgaaatcttctctcctccggactcgcctcacatggctatgtgaccggcggccagataatattctgcgtccttccgatttttatcgactgcaaatgacgcatgtaactgtacggcaattttaagttgtacttcttaaaaatctcgtcgatatacaattaaaagtagagctactttcgaagagccttagcgttagttgcggtgtgagttggggggcgtctggtgtcggatgaggtttggagacaacacgcgacggcaaatgaactgctggcatttgagcatgacttcagttccaggtttgagcttcagctcagatgccgaaaatcaaccgcgaacgccttatctgaccttgatgttctaacccttctcctggaaccagcctgcagatcggatggcgcccatacgatcgctcgcaatcttcttctggcctttggatccctgccgggcgtcctcagcgcagcacggcacagacttttgcaagttgagggggtcgaccagcgtcttgcagatatactggtcatagcgcgccagtgtgccttgcgatgcacccgttccgaggtgtccaacagatgcgtgatcgagtgttggacggatcttctcacctacctccagacagcgatgggcaacctgcgccgcgaacagttccgcgtcgtttttctgaacaagagaaatgaagtgattgtcgacgaggttttacaggagggaaccgtcgaccatacgccggtctatcccagggaagttatgcgtcgcgcgctcatgcatcacgcttctgcacttatcctcgttcacaaccatccgtcaggcgatcccacgccgtcgcaggccgatatcttgatgacacataggcttgtggaggcggcggaggtctttgaaatctcaatctatgaccacatcatcgtcgctgaagggctgtcggtatcgtttaaaggattggacttgatatgagcattcctgccattcgataccatctcgcgccccggttaaactctcttactagcttttgcgaagaagaacagcgtaacgcagaagacctgccacctttaccaaggctcccgtccaaccagcgatagcgccagaataggcgttaacgcctgagctcacatgaccagcagtagcggtgttgcttgacacaattgaacccttagcttcactgtcaattattacatcttatagttacatatcttccctttggacgtcatcaaaaaaattactgacgtatgataaatcaatagaaataacggttgaattgcaataaaaataaatgatctataactattataaaactctccatcggtattaaatccatatataaagaatggtgaaagcgtaattacaaagaaaaagttataaagtattattgaaatgcaattattaaagagaatttcaaaacctaatatagatggaatattctgatcccataatcgcccatatttaaatactgcaacgaatgtgtcagattttgaaatatcacttgaatgcaataaaacctgcacccacttaaataaaatgtgcaatgctagcatgagaatcgcaatagttcccgaaacactctcgaattcatagcaccaagagaagacataagtcgccgtaagaaagagtacgataggtgcgacgtgagggagaacgcgtttataggtctgcttttttgaacaatggctcaatacatcgagagaaaatttaatctcaaacaacaacaaaaataaaaataaaaaaaatgactgaacatcaccatccctatgaatcataaatattagcaaaatcacactaatagaacagaaaaacagaggaactgacaaaaaataaagaacacgcactatattacaactccacaccaatcaataattgcattcttctgatatttagatatgcgatctgatcgaattcagtgtggaaattaaatcaaaacacaagttattgcataaattttaccaaaactatgcgttcactcaccctttttcaaagccaatcttaaatcgatgtaaatgcatgaaagcaacctaaaatagctagtgctttaccttactcaacagaaagctgctaacaaccttacagctttacgaaaaacagaagcgccaacgtgttaggcaatgcgacagatgtcgtttcgggaggtcgcccgggtcacgggcaccaccgagacccttgcccgaaaacacatggtcgaggcacacaggatcctggctaaacttcccctgaacgatcattgagtttcggcggaacggtccggcgcgctatttaaaatatagtaataattgcaatgttaaaaattacaatctctgatcaacatcagcccgaacgtttgccggagcctggcgcgttttgggcttcttccagatcctgcgaaattcttagctcaagccaggggaacagcgccctaagctcgctctcatcggccgggtttctggcagctgccaccaactcattgtaacgggacaccgtctcggccagatgcgcatcagaaggcaacgtcacacccttcgccttgtggctctcgtgaaccagcttaccggtttccttgaagatattagactggaccatcggcttgccatcgtcggtaacggatgcatcggactcgggcgggccgccgtccagaaacatcggaccgtggccggatatcagccaatctccattgacgccaaactgctcgcgataagccaatagaacattggcatccggtacgctgtcgccgcgctcgtagttcgccagagaactctgcccaataccaagttttttcgaaaactcagctcgcaccggatcgcccaagcgatgacgaacatcccgaaggcgttgggccagttctgtttttattgtctctggtcgcgccataaccgccgaactaataaaaacaataattgggtttacaaagcccaatatttgttttaatacctggttgtagaaggcagcacatgcagcccgcgattgcgttttcacctcgacataggccgtctgtttttacaggccggcgccgccggagatatccgatgaccggaaaactatgggataaacacgccatcaaagccgaattgcatcgccagggcatgaccctgacggctctcgcagagcgagaaggcattaatcccaaatcattccggggtgtctggtcaagaacccatcgcaaggcagaagcagccctggccaagtttcttggcgaaccggtcgagcttctctttccggaccgctaccccattcgaacatcccgcattctgtctaccaaatacgaagctgagtctgctagcccgaagaagtgctctgagtgctcctcttctggcaccgcagcaaccaaggccgcgtaaggtggcccgcgccgatgatacggcaggtccggtttcggacgcagcggcttcaacagcacctgcagcgaccagccgagtttgcccccctcgcctgccccatgcaacgccgaaacccgctgtccaattcgacatgctggatgcgatgcatcatccgtttcacgggacaggccgcaagaccgcgcattggcgcgaaaccgccttcatgcttggggcgatccacgctggttccgctttgacgatgaggatggcgaaaccttgctcttgcgcgcgcccggtcaggacgagcccctcaaaccctatggctggatcacgcattgtgcgaaggcgaaatccgggctgccaatccggggcggtctggcgcggggcgctgcctggtccttcctcttcaagtccttctccctgaaagactgggcgatcttcgttgaggcctatggccagcctttgaggcttggcaaatacggcgccggagcgagcgaagcggacaaggacaagctgctgcgcgccgttgccaacatcggcacggacttcgccgcggttgttcccgaaagcatggcgatcgagttcattgaggccagcctcaccggctcgcatgagctttatgaaaagcgcgccgactggctggaccggcaggtctccaagctggtgctgggccagacggcaacgaccgatgccatcgctggtggccatgcagtgggccgggtgcatgacgaggtgcgcgccgacattgaggatgcggatgcccggcagattgcagcaacgctgaaccgggacctggtgcgggcgctcatcgatctcaacttcgggccgcggcgcagctacccgaagatctcgatcgggcgaccggatgagatcgacacggatgccctagtcaagaacgtggtggcactggtgccgatgggattgaaggtcggcatgtcgaccatgcgcgatcatctgggattgcctgatcctgatccggacgaggaactgcttgggctgcaagcaggaagttccgcgcccgaagatcaggatcagaaagatccttctacgcaggcgatcgcattgcggacagtcacagccggggcacaagtgttgcgcccggacgatgcagtcgaccgggcggtgaacgccatcctggacgatcatggctgggagccgctggtcgggccggtgatcgaaggcctggatgaagagctggccggagccgaaagcctggaggatgcaaaggccatccttgagcggcggatcgaggtgcttggggtgactgcctttgccgacacgctggcgcggctcagctttgccgcacggcttgctggtgaaaccgatgaggatgtcagctgatcatggtcgactttctgcccctgccgccgcgcgatgcaatccgggcgcttgaggcgcggggaaagacactgtcgccgacgttcgcctggcaggacgtctatgcggatgatcacgccgccatgttcaccgtcgccaagtccgccggccatgacattcttcaggacatctggaacgcgcttctaactgcccttgaacaaggagaaaccttcgagaccttctcccgccagctgaaaccgctcctggtccgcaagggctggtggggcgaagcgatcgaggttgatccgcaaaccggggaagaggtgcgtgtccggctcgggtccttgcggcgactccggacgatcttcgatgtgaacatgcgggtgtcttatgccaccgggcactggagccacttcgagcggctgaaggtggcgcggccctatcttcgttatgtagcggttcaggacgggctgacacggccagagcatcaaaggcttcacaatctggtgctgccagtcgatgatccgttctgggatgtgtttgcgccgccgaacggctggaactgccgctgcaccctgcagagcttgtcggagcgggatattgcgaagctagaggcagctggtgacgtgctgcggttcgaagcgccggtggtgaccatgcgggcctggacgaacaagaggaccggggaagttcgccaggttccggacggggcggatcccgggtgggattacaatccgggcaaggcggggcacgcggagacggcgcggcggctcgaggcagagactgggatggaatttggagagctgtgaaaaacggccgtggagcgcgatggaggggttcagggcatcatcgacgcgggaaaatgctggcgggcgttctgaggtgttttaaggcgggttaaatttgataacaaaaagccagcgccggagcgctggccttatctggtgcatatctcagcttgttaacggctggactgtgttttctgaacaatcgaattattgccaattccctaaatttcgtcaatcctaaaaacaactagggggcgaaatgaaaatcttaaccactcttggtcttgatctcggtacgaactcactcggctgggcccttatcgaaaccaccggagaaccgggccaaagggagcaaggacggatcgtcgatataggcgctcggattttctcccagtccgaaatggctgggcgcgatccgaaatcgcagacctcactcgcggttgcccggcgtgaggctcgggggatgcgacgtcggcgtgaccgttacctgaagcggcgcaaacgtttgctggcgcttttgaccgacagcgggctcatgcccgcagatgaagacgagcgcaaaaagctgcttaaacaaacttcggatagcgcgggcggcaatctggaaacatccgtctacgcgctgcgggccaaggctctggacaccgtcctgacgccttacgagctgggccgagtgctgtttcagctcaaccagcgccggggcttcaagtccaaccgaaaaaccgacagtaacgacgccgaacaaggcaagatcgccgaggcgattacaaaactcgaagccgagatgctggaggatgacgcccgcagctttggcgaatggctgcacaagcggcgtttggctgggttatcggtgcgggcgcggatgaccagcgacggcaaggcttacagtttttatccctcccgcgcggtgctggagcgggaattcgacaggatcacgcggaagcagcagagtttccacccagaactgttaagcgatgagcttgtcgatgaactccgcgaggcgattttctatcagcggccactgaggccggtgctgccggggaaatgctcctacaatccggcggaaagccgcgcgccgaaagcccatcccctgttccagaccttccgcctgttgaaggaaatcaacgagctggagatcgtcgacgaggatcagcagcactggaaactttccccggatcagcgggacacactggtgctgctcctgcgcaccagccttaccaaacagggcaaagcgcctttttccaaattgcgaaaggcactgaagctcggcaaggaaatgcggttcaacaaggaaagcgacaaccgcaaggatcttgacggtgacgttgtcgccttccgcctgtcgcagccggagtgtttcggtaatacctggagcaccctgccgctggaacgccaggcggaaatcaccgagaaactgcgcacagcgacggacacggagaagctggtcgactggctgcgtttcgagtgcggactggacgcagacagggcgcgcaatgttgccgataagcccatgccaaccggcttcggccgccttggggctacagcgcttgccaccctcatcgacgaaatgcggcacggggtcgacgacaagggattagttatcaccgaagcggaggccgccatccgggcctatggacggacgaattcggagaccgatccaaaccggttaggattgtctattctgccaaaatatcaggaagtgctggaacggcatatcccgccgggcaccggcgagaaggtggacgaaaaggatcctgcctgggacgaggcgatggggcggatcaccaatccgacggtacatatcgcgctgaaccagctccgccgggtagtcaatgcgctgatcaaaaagcatggcaaaccagatcggatcgccatcgagcttggccgcgacctaaaattgaacgagcaaaaacgcaacgaggcgaacaaacggatcggcgagaatacgcgagcggcaatcaaacgttcgcaagccctgaccgaaacgcacaaacaaactgataatggttacaaccggttgcggcttaagctttgggaagagctgaacccagaccagccgctcaaccgagcctgcatttattgcggcaacgcgatcaacgcggaaaagctgttcaacggcgagaccgatgtcgatcacatcctgccacgttcgaagacactggatgacagccagggcaacaagatcctgtgctgcaccgcctgcaaccgcgagaagggcagcttgcctccggccgacgtgccgcaatggcgggaccgttacggcgagatccttgcccgcgccatcgtactgccgaaaaacaagcgttggcgcttcgcgcaagacgccatggcgcgcttcggcgacgaggcggagttcctcgcccggcaagtcactgacatgcaatatatctcgcggctggccctgacctatttggcgcagctttacgacgcggaagagacggacatcgacggtgtgtttcgccgccactcccgggtgcgcgccctgcccggccgcatgaccgaaatgctgcgcaggaactggggtctcaacgagctcctccatgaccacaattacaccgatccggccaaaccgaaaaaccggatggaccaccgccaccatgcgattgacgccgccgtaatagcctgcacctcaaggtcactgatccagaggctagcgagtgcatcggcgaaagcggaggccgacggagccgagcgcctggcgggacaagtggccgaaccgtggaccgactttcgcgatgagctgcgcgataaggtgcaagccatcgtggtcagccataaacccgatcacggcacggtttcgcgcgctggctacgacaaagggcggggtcagacggccggtaagctgcacaatgacacggcttatggctataccggagaaaaggacagcaagggcaacgagctggtggtgcgcaggattcccatctccagctttacgaagcccgccgacatcatgctgatccgcaccaacgaatatgaccattcagagcttcgcgacaggctttacggagcaacgcgcgatctggagggcaaagcctttgaggctgcggtccaaaacttcgtcgagaccgacgtgaagttcaagggcatccgccatgcgcggatcgtcgagccgttgaagaccattccggtgcgtgacaggtacgggaggccttacaagggctacaaaggagacagcaaccaccgatacgacgtctggcagaccttggatgggaaatggaaggcggaagtggtctccaccttcgatgcacaccgaccaggctggacgtcatcggtcaaagtcaacagtccggcagcaaagaaagttctgagtttacagcagggcgattgcctggtgcttgatacagaagatggccagcggctttgcagagtcgtcaaattcgccgaaagcgggaccctcacactttgcgaccacaatgaagctggcccgctcaaaagccgtgactcggataagagcgacccattcaaatatgtctatcggagcgcaaccagtcttaaacgcgacagggcgcgtcaggtccgcgtggacgaaatcggacaggttttcgaccctggcgcttggtgggaaaaatcgcctgattaaccaagggtaaagatataagaagtggccgaccgcattcggcgatatcttccaataatgcaacgtgtggtagatttatcttccgatggccttcacgtcgccatccatcgagggtttctcaccgtctcgaaagaccgcgaggagcagggtcgcgtcgcgcttgacgatatcaacggggttatcgctcatgcgcacggattaacttggtcgaacacagtattcacccggcttgcggaacgctctgttccaatcgttctttgcgcacagaaccatgcacctgtcgcctgtgtctggccaattgaaggcaatcacgcgcagggagcaaagctgaatgctcaggcaaacgccccaaaacctctgatgaaacggctctggcgcgacatcgtgtttgcgaagattcaaatgcaaggcgccatccttgcctctaccggggctgaagctggcgccttcgatatgctggcccgcaaggtgcgctctggcgatccagaaaatgtggaggcccaggcagcgcggcggtactggcgagcaatgatggggcctggttttcgccgggacacgggaggcgatgacattaatgccctgctcaactacggttataccattctgcgggcgattgtcagccgcgcgatctgcgcggctggccttcatccaaccattgggctgcatcattccaaccggggcaattccttcgcgctagccgacgacctaatggaaccctacagacccttggtggatcggttagtctataacctgcgtcagcaagggcaggatgaggtaacgcaagaagcgaaacaaattcttgtcgaactcacatctttcgaccttgagagctcgcagggcctcagtcccctctatgtgcatgtgacgcgcctcgcccagcaattggcggccgtgtaccaggatggctccggaaagcttgaattgccgtcgtcgccctcgccgctagttctgtccggccttggacatagagggcagcaagaaacatgaccaccctttacacgcaaaaacggggagagcggaccgaaccaacccatttgtccgcttataggctgatgtggatgcttgtcactttcgacctgccggtggagacaaaaaaacaacgggcggcagccaccaaattccgccagtttctgctggaccaaggctttgaaatgagccagttttcaaattacctgaggctagtgaacggacaggagcaattcgaaacccatgtgcggcgcatcgaatcgaacttgcccgaccggggtgacattttcatatttcaatttacggatcgtcagtatgaaaacatcgtccgtttcagcgatcaatcgcgccgagaacgcaagaaaaatccgtgtcagatcgctctcttctaatgggattgccatgaattttgtgcggctggaggcccaactcgcctttaaaatcagcgaactggacctccatctagtgtagccgttcagaaaacacaggccaaccgcaacgagaacgccctgcgctcattggcgcttttgagtgtagccgttcagaaaacacaggccaaccgcaacggactgttgtcggttgggcgaagcgggtgcagtgtagccgttcagaaaacacaggccaaccgcaacgtttccgcggcgctgaacaagtaaactaacagtgtagccgttcagaaaacacaggccaaccgcaacggaacactggctactacgagaccctggcagagtgtagccgttcagaaaacacaggccaaccgcaacatgcaggcggagcgacggtgagttgcatcaagtgtagccgttcagaaaacacaggccaaccgcaactgtcctggtcacctgcctcgccagagaattagtgtagccgttcagaaaacacaggccaaccgcaactcggcaatcgcaaaggctgcgacggccaagagtgtagccgttcagaaaacacaggccaaccgcaaccaacgcgattgccatgcggattgcaatcctagtgtagccgttcagaaaacacaggccaaaacttcccacacgctgggggaatgacgtcttcccgcctcggttgcgatggttgcacccatggcaaccaccgtcaacagtccccgtcctgacacccacctgatcgccgccagcgacgccgtcgccgtgccttcagacatgacggcctggatcaagcttctgcccgccggcagcttcacttgccgggatgggcgcggtccattccatgcgggcgacagtaccgcgctacaggcgatcctcacccacacacagagcctgctcgccgccaccgagatgatggtcgattacgatcaccagagtatcttcggtgcggtcgagggcgttggcggcaccgccagggcggccggctggatcaagcgtttcgagatccgggatgacggcatctatggccaggttgaatggaccgaggcggccagcgccgcgatcaaggcgcgcgagtaccgctacatctctcccctgttcaccgtcgagaagaccacgggcaaggtcatggccctgcgcaatgcggccctggtcaacatgccggcgctggatctcgaggcgattgccgcccgtttctcaccatccaaattttcaatggagcggaatgcgggcggaaaaccggcgtccacttttcctcatcccgctcaaacccaggacacccccatggaacagattgccattgcgctcggcctggccgagacggcgagcgaggctgagatccttgccgccatcgtagcgacacagcagagccacgcggcgattgccgccgctgctggcctaaagcccacggccacaagcgatgacatcaccgccgcgatcaaactggcaacggcgacagcgacgcccgatccgaccaaatacgttcccatcgaccaggtcaccgccatgcaggccgatctgaaggctctcaaacaagagcatgacagcgagaaggccgggcagctggtcgcagccgcgatcgaagcaggcaaactatccccggcgctgaaggactggggcatggagctatgcctagcagatccggccaagttcgagaccttcaccgcctcggctcccaccctcaccggcccacagttgggttcagcgaaaaaagacaccggcgatccggccctggatgacagcgacctgcaggtcgtagcccagatgggtctttcagcggacgctatgatcgcctcgaagaaggacctcggctgatgactgctctcgctacagaccgcaacacaagggaacgctccggcgaccggcgcgagttcccggttgccgcctccgcggtgatctacgccggggcgctggttgctttgaacgcaacccgcctcgctgtgcccatgacgacctccacaacgctgctggcggtcggtcgctgcgaaggccggatggacaattcggccggcgctgatggcgacctcgacgtgcgcgtcggtgtcggcatctaccgcttcgccaattcggctgcagccgacgagatcaccgccagtgacatcggcaagacctgctacggcgtcgacgatcagaccgtggcactcaccgatggcaccggaacgcgctcggcagctggaaccatcttcgacgtcgacgcccagggcgtctgggtcgacttccgttagagcaagcgaggccccggatcaggtccggggcggcaccaagcaagcttcaccgtcccggccttgagccgggacctgccgacaatgagatgagaggcgggccctcccgcaccaacgaacggagttcatgagagatggacatcaacagccagacgctgcagtcggcctatatcggcttcaacgcatctttccagcgcggcctcaccgaggccacctccatgtatggcagcgtggcgaccaccgtcacctcgaccacccgcgaaaacgaatatggctggctgggcaagttcccccggttccgcgaatgggtcggcgaccgtgtgatcgcctccctgcaaaagcacggctattcgatccgcaacaagtcctatgagaacaccatcgaggtggaccgggatgatttcgacgacgacaacctggggatttatgcgccggtcttcacccagctgggcatgtccgcaacaacattcccggacgagctggtctggccgatgctgccagccggtttctccacaccctgctacgacggccagtattatttcgacacggatcacccggtgctggatgccaatggcgatgtcacctcggtcgccaacacggacggcggctctggcacgccttggtacctgatcgatgcgagccaggcgctgaagccgatcatctaccaggaacggaaggccttcgggaacctggtgcgcaaggaccgggaagacgacgacaacgtcttcatgaaaaagcagttcctctatggcctcgatggccgggcgaacgtcggatacggcttctggcagatggcctggggctcaaagcagacgctggacgctgcccattatgaggccgcccgcgttgccctgcacagcctgaaggccgactacggcaagccgcttaacatcaagccccggcttttgatcgtgccgccgtcgctcgaaggcacggcccgcaagcttgtcggcaaccagctgaccaccggcggagaaaccaaccagtggtatggcaccgccgacgtgatggtcgtgccctggctggcttgagtttgaaacgagcgcggtggtttgtcttgtcctcacgggcgtagtcctccggccattgtcccgaattgggcacggcataagccgtggcggccagtcggccttgcggcgcttagcaccgaaatgcccttcgcaattcaatcattttggagaccacggccatgtccgatgaaacgaatgtcccggcgacaacgacggcaacaggtgccccatcgaccaaaacgcctgaaccggctgccaaacccgccgccaaaaaaaccacaaaggcaaaagagtccccggctgccaaacctgtgtcagcaccgaagatggtcctgcggatcaccgccaagccgaaggccgggttccgccgctgcggtgttcatcatccagccgagccggtcgactatccggctgacgcctttgacgcgcaacagatcgcgatcctgaaggctgatcccagcctggtggtcgaagagcccgaagcgcaaagcgcttaataaatggggaatggttgatggcctatgccacgcaacaggatctgatcgaccggttcggtgaagaagagctggtccagctcaccgaccggaccaacctgcccgcatcgaccatcgatgcggatgtggtcacggccgcgctcagtgacgcagaagccctggcggacagttaccttgccaaacgataccggctgccactcgacccggttcacgacgtcctgacccgaaccgtcgtcgatatcgcccgttacttcctccatggacgcagaaccgacaaggacgatccggtcacgagagactacggacaggcgcttgcctggctgaaggatgtggccaagggcctcgttgaactcgatgccgccgggattgctccggatcagaatggcgacggtcaggtccaggtgtccgccccagaccgggtcttttcccgtggcagtctttcggacttttaggaggcctcatgaccggtgtccgtcagtccatcaccattgaagatgccgaggtcaatgccgtcctgacccgcgttgccgatgctggcggtgacacgtctgcgctgatggcggagatctccggcgccatgctgttttccgtgcaacgtcggttcgaaacggagagggccccggatggcacgccttggcagcggcacgcgccacggacagcaaaggcacgcctgaagcgatcccgcaagaacgcgccagtcacgccgaaaattttgcgcgacagcaatcgcctttattcctcgatcatcagcgaggcgagttcggatgaggcggcggttgggacgaacctggtttatgccgccattcatcaggctggccgaacggtcacccaatatccccagtcgcggatggtgcggtttcgcaaagtgggacgtcaaacgcgctttgccagacaagcccacaagcgagcctatgaccggcctgtcacctatggcgcgcggaccatcgtcatccctgcccggccttatcttgggttttccgacaccgaccagacagaaatccttgcgatcgccgaggcgcactttgaggccgctatcagtgatgtggatcggggggccgcatcatgagcctggttccggagattattgcccgtttgaagtccgttgaaacacctttcaaagccgtgtcaggcgcagctgattttgcgcttgtcgagaagcgccggctcggatcacccgctgcctttgtcatggtggccgaggaagtcgccggcgacaacgagcggatcaatggcagcgttttgcagcggctggaaaccgatgtggccgtcgtcatcattgcagacaacttgagcgacgcgcgcggaggcgctgccgccgacgacatcgaagatctcaagagcttcgttcgggcgcagctgatcggctttgagccagaggcagctgaagagccgctcacccacatctccggcaagctactgaaagcgcgcggcggcacggtctggttcgaggacctctatgccgctgcgtcctacctggaggaacagccatgatcggcaagacctatcagcctcgcattggtggccgctacatccgcgatcccaaaacagggaagcctgtgagggaaaaggaaacggcgccgaaggcaccgcaaggccgaccggccgtcgcacctgatgccgcgcctgcttcggaggagcattccaattttgttcagccaaagaagctgaacgggccgaagcgcgacacgtccgtgacgacatcacaggagacctagcttatgcgcaagttcaagaagctcgcctgtctcgcgaagatcgagacggtctatggcacagacagtgttcccctggccgccaacgcgatccagctgtcggatgtgacgctgacaccgctggcgggcgaggatgtgtcgcgtgatctgctgttgccccatctgggtcaccagggcatcgagctgaccggcaattacatgcagctggagttcgccgtggagtgtgccggcgcgggcgctgccgggaacgtgcctggctatggcgttctgctgcgcgcctgtggtctgtcggagaccatcgatccgggtgtgtcggtggtttatgaaccggtgtcggacggcgaggaagctgtctcgatctactaccaccatgacggcgtccgccatgttgcgcttgggtgccggggaaccttccaggtggaattcgccccgcgccaaatcccgcgtttcaggttcaacatcatgggactgctcggcacggtcaccgatcaggctctgccggcggcagatctgtcagcgttccagaagccggtgcctgtctccaaggccgcaaccagcctgtcactccatggggctgaccggattgcggaaagcatctcgattgatctgggtgtccaggtcgaaccgcggtttctgatcggtgatgaacgcatgcagctgaccgatcggcagagcactggaaccgcagtcgtggaagccaagtccatggtgaccatcaactggttcgacgtggcaaccgccaagacactggatgcccttcaggtggttcatgggacaacggccgggcacatcgttcaggtggatgcaccgaaggtgcagatcgggcggccaagccaagccaaggccagagccagaacattctcaactattccctgccgctgatgttcgtgcccgacgcgggagacgacgagctcgtcatcactgtgaagtaggaggctttgatgcaattccgcctgtcagacacatacgccttctggtggcctgtgacggtcaaaatgccggatccggagaagcccgggaaggtcctggaccagagttttgaagcccagtttttgatgattggcagcgagcgccttgcagcactggatggcgaaggcggtgatcaacacgccgtcctgaaggaggtctggacggactggcgcggcgttgaggacgacgagggatccgaagccgatttctcggatgaggcccgcgatcgctgtcttgattatgcccatgtgcggctggcgctttacaccgcctatctggaagccagcagtggccgtgctgctcaaaacactcaggcaccaaaggtaaaaaactgatggcggccgcgcgggcctgggccttcgcacggcgcggcctgattgatcccgaagtgtctctacagctggatcgcgagacggcctcggacttcgccgccctgggcgtcgccgttcccgctgccgagatcagtgagcctgaagcctttgacgtctggcgctgcaactggcggagcgtgaccgcttttctgtctctggagacccagtggcgggtggcagccgggccagctggttttgcctttctgggactggattacacagcggccaaatcagccttcagcggccgcagccggcgcgcctggcagagcctgctggcagatctccagatcatggagcgtgcggccctgccgatcctgaacggggagcgcacatgacgcgcggttctgttgtctccccccttgagggtgagatgcccctgagaaggggcagaggggggcttttttgatgccttcccggacgcagcgcagcggagatccgggatccagtaatgtgcagagcggtggggaggttcagcgccacaacacccacagaccgtcatccccgacttgatcggggatccatgccgtttccgggcggcgagggaaatttagaaggatcaggccgcgtgtagcgcccctccacagccaaagattgattggcaatctagatccgtgcacattggttgcaagtgaaaacttgggataggaaaactatgcgcatagaagtcgcccaagcgccggaaaccagcggtgcaaacaaaaaaaagggggacctactacaggaattttcacgagagttcgctgctactcgggacctaaggattatcgaagagctgcgcacagcatcttcagagatcgatttgcactgcgaagatcctagtacaggtgaaaccatttacatggaatgcaaggcacatcgagatccattgtcgaagagagagctgacaaatcttatcggggtagtttatggagaaggttatacgcaagggtggttaatttccacaggtccacttagcaaagatgcaaaaggatatctacacaactggacacaaaaacctttaccagaacgagcgaagctcaaagtacattacgaggatgaactagctaatcttcttataaatgcaaagttggtaaaaaacccaaatgctttgcaattacacgaccatacaaagccgggccacgaagaagccacatgggttcttttggtcacagaattcggaagattttggaccacacctagatttatcggtggcgttgcgtctgaagtttacgcctttaacgcctcagatctatcgatcataaacgatcgagcgcttctcacccgcctatcgaaacttgatagctcatgggcgggcaagtcttttgtttctggcctgattaacgaacaaacggcaacccagaaaaagctcgtagaagaagcgataccagtcattgaaacggtcgaaggtaaacgttggagcgatcctcgccctgctcggctaaaagattttgcaggaagaaagaaagagctagccgaaattttcgaacttttagaggatgctcgagaaagcggttcggggccacatgtattcgccataaccggcgaaagtggcatcggaaaaagctcattaattacaggtattcgcggaagaactcggcagaggccgttcaacaagaaatattttgcaatagcgattgactgtagagcagcgaaatccagagactatataaatgcggctttggtaagaagtcttagcaaagctcggaattctggttttggcgatgatgatggttcagaatttcatatcacaaatcctggacatccattgtcgagcccctcagttaccaattttctgaaatcggtacgtaaaaacaaacaggcaatctgtataatctttgaccaatttgaagagatctacgccaagcctgaactagctgatgtattctcagcggcacatgat

SEQ ID NO: 281 - DNA, 23318 bp, synthetic construct
  source 1..23318: mol_type = other DNA
  misc_feature 1..23318: note = Synthetic
cggctgcgggccgcccggcgcctgttgcatgaggaaaagctgcccgtcagcgaagtggcgatccggctcggctaccggcatgtggccaatttctcacgcgcctatcgcgcccagttcggcgaggcgcccgccaccaccttgcatcggccgagaaacagggcgccgcaacggcgataggtatgcgtgccgatggcgcggggtctggcgccaccggtacctgtgatgcccgcctagaactcccgcacgaaatgatcctcggacacggcgtgcatccgggtggccggatgggtccagtcgagggcgcgcaccgggctcatcagctcgtcggtgatcaggccgccgcgctcgcgccgcgtctccggattggggatcggcacggcgtcgatcagcttccgggtgtaggggtgctgcggagcgcacaggatcttgtctctggggccggtctcgacgatttcgccgagcagcatcacggcgatgcggtggctgacccgctccaccacggcgatgtcatggctgatgaacagataggccagatccagctcccgctggaggtcgagcatcaggttcaccacctgcgccttgatcgaggcatcaagggcggaaaccgattcatcggcaacgatcaggctggggttgagggcaaggctgcgggcgatgcagatacgctggcgctggccgccggaaaactcgtgcgggaagcggagggcgtgctcctcgtccagcccgaccagacgcagaagctcggtgacgcgctcgccgatccgcgcgctgtccatcagcccatgcacatgcatcggttcggcgatggcggcgccgaccgccttgcgcgggttgagcgagccgtaagggtcctgaaagatcatctgcatccgccggcgtgcctgacgcagctcggcgtggctcgccgccatcagatcctgcccctcgaaccggatttccccggccaccggttcgatcagccgcaggatcgaacggccggtggtcgacttgccgcagccggattcgccgaccagcgccagggtctcgccggcggcgagcgacagggacacattctccaccgcatggacattgccgaccgggcggttcaggagcccgccgcgtacggcaaagcgcgtggtcaggttgcgaacctccagaatggtcttgccacggtgatcggcctcgttgtccggttccgggccggtgccgttgctgtcgagcgtggggaagcgccgcggcgtttgcgtgtcgcccagcccgccgagcttcggcacggcgccgagcagcatcctggtgtaattgtgcttcggcgcggcgaagagctcgcgcaccggcgcttcctcgaccttgtccccgcgcagcatgaccaccacccggtcggaaatctcggcgacgacccccatgtcatgcgtgatgaacatcaccgccatgccgatgtccttttgcagctcgcggatcaactccaggatctgcgcctggatcgtcacgtcgagcgcggtggtcggctcgtcggcgatcagaagcttgggctggcaggcaagggccatggcgatcatcgcccgctggcgcatgccgccggaaaagctgtgcgggtattcgtcgatccgccgccgcgcgtcgggaatgcggacaaggtcgaacagccgcagaacctcccggtctgcttcggccgcccccatgccgcgatgccggcgcagcacctcgccgacctgaaagccgatcttcagcaccgggttgaggctggtcatcggctcctgaaagatcatgccgatatcgccgccgcgcacatcgcgcatcgccgcttcgtcaaggccgagcagatccaccccatcaagggtgattgccccttcgatccggccgtggctctgctgcaccagccgcatgatcgacagggcggtgaccgatttgccggacccggattcgccgacgatggcgacggtctcgccccggtcgacggtgaagctgacgtcccgcaccaccggaacccagtcgccatcgacccggaaggaggtggtcagattgtctaccgaaaggatgggatgggtcattgttcccccttcagccggggatcgaccgcatcgcgcaggccatcgcccaggaggttcaaggaaaagacgacgatcaggatcgcgagcgaggggaaaagggccagccagaaactgtcgagaatgttctcgaagccctcgcggatcatgccgccccatgtggcggtcggcgggttgacgccaaggccgatgaaggcgagcgaggcctccacgcggatggcggtcgccagccacagcgagcccatcaccaaaacctccggtgcgatattgggcaggatgtgtccgaacatcagccgcggatgcgagtagccaagcgcatgccccgcctcgatgaactcgcggttcttgacggcaatggtcggcgcccgggcgatccgcgaaaacggaggaatggcggtcagggcgatggcgatcaccagattggcgaccgacgggccgagcatggcaacgacgatcagaccaaggatcagcgacgggaaggcgagcagcacatccatcacctgcatgatgagcagatccgtccggccgccgaaatagccggcgatcatgccgatcaacgtgccgatcaccatggccgagccaatcgccatcaggccgatggtgagcgagatccgcgcgccccagagaatgcgcgagagcgtgtcgcggccgtaataatcggtgccgagccaatgcgccgccgagggcgctttgaggcggttgaggatgttctggtcgagcgggtcatagggagcgatgaccggcgccagcagggcgagcagcgcgacgatcacgaacacggccagaccgatccaggaggtcttgttggcgttgaacgccttgaacaggcctgcggcgagggaagcgagtgcgatccgcagataggccgaccgcgacaggcggggagagtgcgagggcgacgtcatgagtatttgatcctcgggtcgatcaggccgtaggtcaggtcggtgacaaggttcaccatgacgacgatcagcgtgtagatcaccatcatgccctgcagcatggtgtagtcgcgctggttgagcgcgccgacgatcagcttgccgaggccgggacggttgaagacgatttcggtcagcaccgaattgccgatcaggatgccgaggtagaggccgacgacggtgaccaccgggatcagcgcgttgcgcaagcagtggcgccagacgatgatggcgaaggccagccccttggcatgggcggtgcgcacatagtcctggttaagcacctccagcatggccgagcgggtgacccgggtgatgtaggcggccatgatcagccccagattgatcgccggcagggccaggtcgcgcagccggtcggcaaggctgccgccctggccggagctgatcactgggaaccagcggagctggatggagaagaacagcagcagcaacaccgccgagacgaaggcggggaaggacaggccgagcagcgagccaatgcgggcgaggtagtccggcagcttgttgcgccgcaccgccgaccagacgccgatgggaatgccgaccacgacaccgaggatcagcgaggcgatggtcagctccagcgtcgccggaagaaccttgatgatttcctcgatcaccggcctgcccgacaccatggagatgccccagtcgccgaccagaaccccgccgagaaactccacatattgctggtagagcggaacatccagccccagccggacccggagggcctccagcgcggcctggctggcctggtcgcccaggatggccagcgccggatcgccgggcagtacccggacgatgaagaagacgatggtcagaacggcaaagagcgtgatcgcggcaaagccgagccgcttcaggataaatgctgtcatgggtaagcgcgcccctgtcgcgtgcggcggaccctgtcacaaggaccaaaggtccgccgcacggcggatgagtgcagcccccggaagggcgatgcgtcgtcacatgccggggccaacgtgtcgcgaccccggcgccggtcatgcgcggtccgattactcggagaaggcggcctgctcggtgacgggcgggctgaggttcagcgatccgttgacggtgacgccaaggtcgagcgtgtccttccaggcccagagctgcatgctctgcaccaccggcaccgcgcagacctcgtccatgatcttctgctgggcggtggcccacagggcgagctgcttctccggatcggtttcgacacgggccgccgcgatttccgcatcggcaacggcgcaatgggagaagttggcgatggccgtctcggtgccgacagtggcatccgaatggaagaactgggagaggtagacgtcggccaccgggaaccgggccgccgcgtaatgggtcacctggctcatgtccttgcggatctgctcatggaaggtggcgtgttcgacggtctcgatttccagggtgatgccggcttcgcgcagcaaggcctgcaccgcttccatggtcgagagcatgccgggcaaggtggtatggattgccttgatcgtcaccccgtccggatgaccggcttcggccagcagcgccttggccttgtcgatggaatattcgtaggtcggcacgtcggcggtgaagccaagatggccctccggcaccggcgagagcgcggccagcgtgacgtccggtcccttgaactgcaccatcgcatcccggttgatggcatgggcgacggcccggcgcacccgcacatcgtccagcggcggcatggtcatgttgagatggatgacggacatttcgcccggcttcatcaccgtgaccttggtgccggggaccttctggatccgctcgacccaggtctgttcctgcttgccgtagatcatgtcgatctcgcctgcctggaaggccagatcacgtgaggaatcggagggaatgtagcggtagtagatttccttgatcttcggctcgccgcgataatactccggattggcgaccagcttgacgtattgctgcggctgatactcggcgaacatgaagggaccggtgccgatcggcgtgcgctgatactcctcgccaagcgcttcgaccgcatccttgcagacgatgttgccgccatgatagggcaccagcaggcccagcaggctcggcacggtgttcttcagcttgatcgtcacctccagcggaccggtcgcctcgacgctgtcaaaggcggtgtaatccttggcgaaggcggagacctccggattggccgaccgcttcagcgaatagaccacatcctccgcgtcgatcttgccgtagtcaccgtggcattccacgtcgtcgcgcagggagaaggtccaggtcagcccgtcgtcggaggtggcccagctcttggcgatatccggctcgatgaactccgggctggcctcgcccggcttgatccgcaccaggccgctgaacatccagtgcaacagccccttgtccggggtcgaggtggcgacatgcgggtcgagcttgccggcatcggcgctgcccatgcccacattcagcgtggtgccggcggcaaaggcattgcccgccaccagcagtcccgccagcgcaattcccatccgtgctttcatgtttttgtcctctggtcggttggttctttttatggatggcccaggttcacgcgagtcctagggtccgggccctaaagcgtgtcctccagccggcaattcaccagcatttccgccatggctgccgtattcggcagggccattgccagggcggttatttccgcgaaatcctccgggtcgatcatctcctcccgagtgatcttggtgaccccgtcggtcaggtcggtggcaacgaagctcgggcagatcgccgtggcgcgcacgccatgatcccagccgatgcggcgggtgccatgggtcagcgccatcaccgcgtgcttggtcatgttgtaggcgatgttctcgttgcgcactcgtttgcccgagagcgaggcgacattgatcacccggccattgccggcggccttcagatgcggcaggcatatccgggtcaggaacagcggtcccttgacgttgatcgcccagagcgcatccagctccgcttcctcgccttcctcgatcgagaatgtgttggaggtgccggcattgttgaccagcccgtcgagccggccgaaccggtcgagtgtggcgccgagccaggcctcatggctggtccggtccgccgcgtcatagcgtgcgcacagaagcttgtcccccccgggtgcccccttcaggccggctttcgcccgttccgggtctcgcgcgccggcgctgactgaatagcccttggcaagaagcgttcgggcaatggcgagaccgatcccccggctcgctccggaaaccatgatgacgcgaccttcggggttgagcaatgggctctccttatccgtgcagggtgaggggggcagtggcgacggcgccatcggcgaaccggtcgaagcggaaggaggcaagccggtcgtccggttcctccccaatggcgagccgcgcggccatcggccccgtcaccgggccgatgccgaagccgtgcccggaaaagccggcggcgacgacgagattttcaaactccggcacccggtcgatgaccggaagggcgtcgggcgtcaggtcgagcgcgccggcccagacgtcttccagctccgcctcggcaaaggccggaagcacgcgccgcaccttgtcgatggtcgcctgcaccgaacgtatgcgggggcggatggcgggcgcgccggcgcgctcgaccaggccaccggcccagtcctccgcgccgcttgtcacccgcaatcgcccggtgagttcctgccgggccgccatatccgcattggcaacgccgagcaccggggcgagaaggggagcgatgggcgcgcttctgagcaccgtgaccatcggtcggcgcaaggggagcgtggtaccgagcggggcgagcaactcattggccagaaagccggcggcgagcagcaccgcgccgggggcaagggcgcgccggtcggtgattacacggctgatgcgcccgcctcgggtctcaagatgccgaacggtctcgccaaaggcgagcgtggcaccttgctcgctggcccgccgggcaaaggcggagacggtggcgaccgggtccgcatgcccatcggttggacagaaggaggcggcgaccacctcgtcggacaggggcggggcgatctcgcggatcgcggcaaggtccgcaagatagcgcagatcgaggccggcggcagactggtcggcgaccagcgcccggatggtctcggcctctgccgcattgcgtgccagccgcagattgccggagcggcgatagccggtctccgcgccgagtcgttcgtcgagctccggccacagggcgacggcgctgcgtgccagcggcagttccgccgggtggcgcccggactggcgcaccccggccagtgtccagccggaggccatcgccgccgggccatagcggtcgatcagctccacgcttgcgcccatctcggcaagctgcagggcggcggaggctccggtgatcccggcgccgatgacgagcacatccggtgtggcaaggggcgcgccggtcatgcggccgcctttttgccaaagcgggcgagagcgaaaggcgtcatgtcgaccagcggctgctgaccctcgatatgctggacaacgagcttggccaccccggggccaatgccgaagccatgaccggagagcccggtggcgatcaccagtccttgccagccggccggctcgtcgatcaccgggatctcgtcgggcatcacgtcgatgaagctgccccaggtctcctcgatctcgatcccctcaagccggggatgtagcgccttggccgaggccagcacggatctgagcaaggcctgatccggtgccggatcgagaacccggacctgttcgaacggggtgacctcgtccgccttccagcgatgccgtccgagcggaccgaagaactcaccgcccagtcggatcttgaggatgcgccagcgatcggcgatcaccggcaggaaggcgcgcagatgggtgaaggcggcgggaatgatctggaattccgccgcgcccgagcgggcgatggtgtagccgccatcggcccgccgccgcagcgaagcccgggttgcgcccaccgtcccggcgatgatctccggcgccggcccggtgcgcagcaccgaggccttgatcgccagttgcggcagggaaaggtcgagattttccagaaaggtccgcgaccaggcgccgccggcgagaaccacggtctcgcaggcgatttcgccccgctcggtgacgacgccgctgatccgtccgccgctgcgcgtcaccgaccgcaccgcgcagccttcaaggatcaccgcgccgcagcgctccgccagccgcgccatcgccggaaccgcaagggccggttcggcggtcgcatcggagggggtatgcagggcgccggcgaagcggtggtcgtcgcgtttcagaagctcatccgtttcccggggcgagagcagtcgcgcgccatgatcgaaggcggcgttttccctcagccaggcctcgtgccgggcaagctcggccgcgttgccggcgagataggtggtgccgcgaatgccgtagccgatgtcctcgccgagccggggagcgatctcgcgccacagcctggcgctgtcgatcatcagttgcaattcgcgggcgtcgcgcccggccttgcggatccagccccagttgcgcgaggactgctcggccgcaatccggcccttctcgcacaggacgacgggaatgcccttttcggcaagaaacagcgccgtgcagacgccaacgattccgccgccaatgatgacgacctggctcttttccggcagcgccgaccgctcttccatcccgctcacagtgccctcccgacatgtgtcagcttgtcacagtgagcaggctgtggatataacgcaaatactgtttccttcgttacacatgcggaaatgttatagcgaaaatgctgtcgcagcgttcactcgaggcgtttcaggccgtcatgcgcaccggcacggtctccgctgccgccgaggaattggcggtctcccagccagcggtcagccggttgatccgcgaccttgaggagcggcttgagttgtcgttgtttcgccgctatggcggccgtgtcgtcgccacccgcgaggcgcacgaactctggaccgaggtcgagcgcagcttcgtcggcctgacccagatcgaacgggcggcggcacagatcaagcagggccaccgggcgaccctgacgattgccgcggcaccggccatcgcccagtccgcgcttcccggcgtggtggcgctcctgctggcggaacggccggagtttcgcgccgaattcctgtcgatgacgacactgccggtggtgcgacaggtggcgctgcgccagtgccagatcggctttggcattccgagccagcacaagttcgagatcgacgtgatccgcagcggatccgtgcccttccgcttcgttgctccggccgatcatccgctgggcgcacggcaggtgatccgcctgcgcgatctgtcagggctcgatttcgtcggcttcgtcgattccaccatgtccgggcgcaccttcgaccggctgttcgccaagatgcgccacccgccgctgccgaagatgaaatcctacctgtcgcatatcgtctccgcgctggtgctgcgcggtattggcgttggcatcatcgatgccttcactgccgaagatcacgcgcgcatgggcggcattgtccggccgatcgaggtcatcgagcgcttcgagtattcgatcatcaagccccttggcgacaagctgagcggagaatgcgacgcgctggtcgagaccttcgaacgctatgtggagcgctatcaggacgcataggcgggtaagggcggaggggcgccagacaccaaaaaagccagtgccggagcactgaccttatctggtgcatatctcagcttgttaacggctggactgcgttttctgaacgcaaccactattgtgcatcatgtttgtttcgtcaatcctgccgggagcaatctgggggatgggatgacgaaacttaccactctgggcctcgaccttggaaccaactcgctcggctggtgcctgatcgaaaccacgggcgagcccggcgcgcgggaggaggggcgcattgtcgacatcggcgtgcggatcttctcgcaggcggaaatggccggccgcgacccgcagtcgaaggcctcgctggcggtggcccggcgcgaggcgcgcggcatgcgccgtcgccgagaccgctatctgaagcgccgcgcccggctgctcgaccttctgaccgaaagcggcctgatgccggcggaggccgaggcgcgagcccggctgttgaaggagacctctgacggcaagggcggtgatcttgacacctccgtctatgccttgcgcgcccgcgcgctcgatcatgccctgaccccgcatgagctgggacgggtgctgtttcagctcaatcagcggcgcggcttcaagtccaaccgcaagaccgacagcaacgacgcggagcagggcaagatcgctgccgccgtgacccgtctggaagagcggatgctggaggaccaggcccgcagttttggcgaatggctcgacatgcgccgccgcgccggtctgtccgtgcgcgcccgcatgaccgccgatggcaagggctatgatttctacccttcgcgcgccgttctggagcgggagtttgaccgcatctgcgaccggcaacggctgtttcatgccgatcttctcaccgaaggactggtggcggagctgcgggaggtgatcttccaccagcgccccttgcggccggtgctcccgggcaaatgctcctacaacccggcggagagccgcttgccgaaggcgcatccgctgtttcaggccttccggctgatgaaggaggtcaatgagctggaaatcgtcggcgaggaccagaagcaccagaagctgacccctgagcagcgcgatgtgctggtcctgctgctgcgcactggcctcaacaaacagggcaatgcgcccttctccaagctgcggggtaagttgaagctcggcaaggaggtccgcttcaacaaggaaagcgacaatcgcaagggcctcgatggggatgtggtgcatttccgcctgtcgcggccggagtgtttcggcaatgactggagcgccttgccgctggcccgccaagcggagatcaccgaacggctgcgcaccgcgagcgaccgggacgagctgatcgtctggctgcgcaccgactgcggtcttgccgctgaaaacgcccgcgctgttgccgataccgccatgccggagggcttcggccggttgggcgagaccgcgctgtcctcgctgctcgaagaaatgacccgaggcgtggacgagaacggtttcgtcatcaccgaggcggaggcggcgatccgggtctatggccgcaccaattcccaaggcgatcccaaccgcgaagcgctcgaccggttgccgaagtatcagcagatcctggagcggcacattccccccggcaccggcggcaaggccgatcccaaggcgccggaatgggacgaggtgatgggccgcatcaccaatccgacggtgcatatcgctctcaaccagttgcgccgggtggtcaatggcgtcatcgccaagcatggccgcccgaaccgcatcgccatcgaactgggtcgcgagctgaagctgaacgagcagaagcggcaggaggtcaacaagcggatcggcgcgaacacccgggcggccaaggagcggtccgcaaagctgaccgaaacccacaagcagcccgataccggctacaaccgcttgcggctgaagctctgggaagaactcaacccccagccggtcaaccgggtttgcatctattgcggcaagccgatcagcggcaacatgctgttcaacggcgaagcggatgtggaccacatcttgccctattcgaagacgctggatgatggcgagggcaacaagctgctctgctgccaggcctgcaaccgggaaaagcgtaaccgcgcgccggcggaagtgccgcagtggcgggggcgctatgacgagatccttgcccgcgccaccaccttgccgaaaaacaagcagtggcgctttgctgaggatgcgatgacacgccatggcgaggaggaaggcttcctcgcccggcaggtgaccgacatgcagtacatgtcgcggttggcgctcacctatctggcggcgctctacccggcggaggaagcgggcatcgacggcgtgttccgccagcacagccgggttcgggcgctgcctgggcgcatgaccgagatgctgcgccgcaactggggcctcaacgaccttctctatgaccacaatcacgccgaggtggtgaaatccaagaaccggctcgaccatcgccaccatgccatcgacgcggcggtgatcgcttgcacctcgcgggcgttgatccagaagctggcaacggcctccgcccgggcagagagcgagggggtggagcgggttgcccgtgaggtccggccgccctggccgacgttccgcgacgagctgcgcgagaaggtgcgcgccaccgttgtcagccacaagcccgatcacggcaccgtgtcgcgtaccggctatgccaacgggcgcggccagaccgccggcaagctgcacaatgacaccgcctatggctacaccggcgaaaaggacgccaagggcaacgatctggtggtgcggcgggtgccgctgtcgcatttcaagaaaccggctgacctgatggcgatccgcggcaatgtgcatggtcattcggaattgcgcgaccggctgtgggaggcaacgcgcggcaccgaaggcaaggcttttgaggctgcggtgcagcgcttcatcgaaagcgatgaaaagttcgccggcattcgccatgtgcgggtggtcgagccgctgcggaccatcccgatccgcgatgccaatggccgcgcctacaagggctacaagggcgacagcaatcaccgctacgacgtctggcagttgccgggcggcaaatggaaggcggaggtggtctccaccttcgatgcgcatcagccggggtggtgttcgcccgtgcgtgccgagcatccgacggcgaaaaaggtcttcagcctgcagcagggcgactgcgtggcgctggagggcgaggatgggcgccggctctgccgcgtggtgaaattcgccgagagcggaaagctgactttgtgcgatcatcatgaggccggcaccctcaaaagccgggatgccgacaagcaggatccgttcaagtacatctaccgcagtgcttcgagcctgcgccgggaccgggcgcgccaggtgcgtatcgatgaaatcggccaggtgttcgaccccggcgcatggtgggagaagacgcccgattaaccacggattaaccttgcgtgcgcggcagactgcatcttctggtagtatatccgcatgcaacgcgtggtcgatctgtcatccgacggcctgcatgtggccgtccaccggggcttcctcacggtttcgaaggaccgtgaggaacaggggcgtgtggcgctcgatgacattggcgcggtcattgcccatgcgcatgggctgagctggtcgaacactgtgtttacccgtctggccgaacggtcggtgccggtggttctgtgtgcggcgcaatcatgcgcccattgcctgtgtctggccgctggaggggcatcacgcgcaaggggcgaggttgaatgcgcaggtcggcgcggcgcggcccctgtccaagcggctgtggcgcgatatcgtcgtcgccaagatccggatgcaaggggcggtgctcgcctccgcaggcggtgaagcgggggccttcgacctcttggcgcgtaaagtgcgctcgggcgatccggaaaatgtggaggcgcaggccgcgcgtcgctactggcaggcgttgatggggccggagttccgccgcgacaccgacggcgatggggtgaatgcgctgctgaactatggctacacggtgctgcgggcgacggtggcccgggccatctgcgccgccggattgcaccccaccatcgggctgcatcacagcaatcgcggcaatgccttcgcgctggccgatgatctgatggagccttaccggccgctggtcgaccgtctggtcttcaaccttggccgcgacggcatcgcgacggtgacgcccgaggccaagcggggtctggcggctctgaccgggttcgaccttgccagtgcccagggcatgacgccgctgcatcttcatgcgacccggttggcgcagcagctcggcgcggtgtttcaggcgggaaagggggagctcgacctaccgcgtgcgcccgaaccgctcgttctcgccggtttgggccgggaaggggaggcgctgtcatgaccaccctttacacgcagaaacggggagagcggacagcgccgacatacctgtccgcttacaggctgatgtggatgctcgtgacctttgacttgccggtggagacgaagaaacagcgtgccgccgcgaccaaattccggcaatatctgctggatcagggttttgaaatgagccagttgtcgaactatctgcggctggtcaatggcctggaacagttcgaggcgcatgtgcgccggatcgaagccaatctgccggagcggggcgatgtcttcatctttcaattcaccgatcggcaatacgaaaacatcgtccgcttcagcgatcagtcgcgccgcgcgcggaaaaagaatcccgaacagatcgcgcttttctagcaaaggctgggcgaatttgccgccgagaaaggcccaatccgcttgggttttcaagggattgggcccttatctacggtagcagttcagaaaacgcaggccaaccgcaacgcgcggttctacgatcagttggtgcatggaacggtagcagttcagaaaacgcaggccaaccgcaactggtcggccgtctggatgctcaggcgatccacggtagcagttcagaaaacgcaggccaaccgcaactagtcgaaggtcaccagatcgacccctttacggtagcagttcagaaaacgcaggccaaccgcaacggcatgagatgcggaatcttcacgccgtcgacggtagcagttcagaaaacgcaggccaaccgcaacgcgcccgcctgtggccgttcgtgcccaactacggtagcagttcagaaaacgcaggccaaccgcaaccgcgcacaggccgcgccctccattctcgacgacggtagcagttcagaaaacgcaggccaaccgcaacagctggaggcggacaacaagcggctgaccgacggtagcagttcagaaaacgcaggccaaccgcaactaccctaactacgtcccctttgtggcggcgacggtagcagttcagaaaacgcaggccaaccgcaacacgggtggtcgcgattgccaatcgaccgggacggtagcagttcagaaaacgcaggccaaccgcaacaggctcttggcgtagtcgtcttcggacatacggtagcagttcagaaaacgcggggccaaacggaaaacgccggagcgttgggccttccgacccaaacaccccggcgctccagagcaaggctaccgattacttttcggcgcaggcgcggatcttctccagatccggaccgttcggcgtgcggccgagattgaacggtgcggaggcatcgcgccagccgctgtaatcctgcaggtagctgagctggctgaggtagaccttggccgaggacgggttctcgcaggcggtgtcctcgatcaccttgttcgccatctgctggaccttctccagcgtctcgtcgtcatagcgggtgatctcgacgcctgcttcctggaactggcgataggcttccgaggcgcgcttttcggtgaaggcgagcgaccacagcaaggtggcgtcggctgcgatcttcagcttctcctgggtctccggagacaaggcatcccaggcctgcttgttgatcatcaccccgaacaccgaggcggactggtgccagcccggggtcgcccagtgcgaggtgacctgatggaagccgccggaatagtccacattcggggtggagaattcggcgccgtcgatcacgccgcgctcaagcgactgatagatctcaccgccggccatcgacacctggttgccgccaagctgctccagcagccggccctgctccagaccggacagacgcaggcgcttgcccttgaggtcttccagcgaacggatcggtgagttggtgcggaagccggattcgttgttggtcacgccataaggcaggtagaccatgccgaacttgccatagacctcgtcatagatcttggcgccgccccactgctggatccagttgacgtagtcgacggcgttgaacaggctcgcggtggtggcgagcggcgagaaggcggggtcgcgcccggcccagtagcccggccagtcggcaccggcctggatggtgccggattcgaccgccccgaacacctcgccagcgggcaccaggctgccgccttcgtagaagtcgatcttgaggtcgtcgccggtcagcttgttggccagctccacgaagtgctgatcggtggcgatcagctccagcgaggagggccaggtcgtggtcatggtccacgtgtcgccggcattggccgggccgccgaccagtgccagcagggccacaccggccatcagcttcgttgctttaagcatataagattctcccactcttatttggtcgcgtaaagaacgtccggcagccatgtcaccaatgcggggaacagggccacgacgatgcacatcatgatgatcagcccgatgaagggcagaacccccatgatgatatcggccgttttgacctcccttggggctatggcgcgcaagtagaacagcgcatagccgaagggcggggtcaggaacgatgtctgaagaaccaccgccatcaaaacgacgaaccacaacaggttgatgttcatctcctgcacgatcggcaggaagatcgggaaggacagcagcacgatgccggtccagtcgaggaaggcgcccagcaagaagacgatgaacatcatcatcgtgatcagcagccaaggctccatgtccagcgcgcggatgatctcctgcaccgcgcgcaagccgccggtgatgttgaagacaccggtgaaggcggtggcgccgatgacgatgaacaggatcatcgccgaggtgcggccggtttccttcagcgcgccataaaaggtatcgagccggaacttgccgcgcaggatgacgatccccagcgccagcgccgcaccgatcgcagaggcctcggtcgccgtggcgatgcccgccagcaggctgccgagaatgccgaggatcaggactagcggcggggccgcctcaagggcgagaaggcgtagaagctgagcccggctcaccttctcgtccggctccaccgagggggccatgtcgggccgcagcacggcaacgacggcgacccagccggcataaagcaggccgagcaacacgcccggcaccatcgaaccggcgaacagctcgccgaccgaaagcggcgagtagctggccatcaggatcagcatgattgatggcgggatcaggatgccgaggcagccggaagaggcgatcacgccggtcgtcagccgcgggctgtagccgtattgcagcatcggtcgcagcgccatcacgcccatcacggtgatcgaggcgccgatgatgccggtcgtcgccgccagcaggatcgagatgaagaccacggcaagggcgaggccgccgcgcacgttggacatcagcagccgcagggtttcgaacatgcggtcggtaacgccggaatcggacaggaaccgcgccatcagcacgaacagcggaatggcgatcagggtgtagttgtccagaacatcgccgaagatacggttgatgacgatgcccagaaccagcggcttgccggcgatcagcgcgccgagaaccgctgtgccgccaaggacgaaggccagcggatgtcccatgaacaggcccagcagcaacaggccgaacatggaagctgcaatgagatcaggcgtcatgtcggttgtactcttccctgttcaggaccagcttgaggaactcggaaattccctgcagcagcaagagcccggcggccacgcacatggcgatcttcagcggatagaccggcaattgcacggagccgtaggttgtctcgccttgcgcccaggagcgctgggcgaactcccaggagcgggtgaagaacacccaggcgaaggggaagaagaagatcggatagccggcggcctcgatccagcggcgcggcgtcggccggagcgcaccggtgatgagatcgaccttcacatgtgcctgatagcgcagcgcatagccgccgagaaggacaaagtagaacccgaacatctgtttggaaacgtcaaacgcccagcgggttggcgcgttgaatgcgtagcgcatgatgacgtcatagatgatgatacccgcaaaaatgatggcaatgacacagataacccgtcccacaacctcatttatgccgtcgataaagcggaacagcattaatcctccctgcattaagaccgttcacgcctgagcggttcttcttatcgaattcttgaatcagctcccatgctgaccaagttgtgcgacaataatatgtaacctcaatatcctttggggcgcgtcctgaaaaaccgtcgtcagaaccgaagcccctcctccacgggggattctgacgagagcggtctgtgttcgggcggcccgagttcgaccttatgggcagtgagaatgagtgggaaacattcaggcgtgtgtcggtttgatctgaaaggtcagcgatatggtcacatatcggggtggttgccgctcatgatagccagatggccgtatgtcgcaagacgttcgtgcccgatccagacagctttcccgcagctgtgcaccggcgaataggcgcgcgcgttcgaaaaggggacggcggcgcccgatccgccgatcggccgtttgtggatttgcctttggcggcggcggatggcattacgtgttttttcttacgcgaacaattgtgcccgggtgggggcaagcatcggcgggcagaggcaagccggcggtgttggaggaaagtatttcagggtttgtcaattgccccgggctattgctggcctgtcaaggaaaggctccaaagtcgatgcatggtagtccggaaaatgaggctgaacgtcttgaggcattgcgtgcgatcgcgatcctgaacacggaacggaccccggaattcgatgccatcgtcgaggccgtcgccgagattttcgactgtccgatcgcgctggtatcgctggtggatgatgactaccagtggttcaaggcccgctgtggcatcgaactcgacggtacgccgatggacgttgccttctgcaactggaccatccgcagcgcgcgcccgttgatcgtgccggatgccaccaaggacccccgtttttgcgacaatccactggtcaccggcgagccgcatgtccgcttttatgccggctgcccggtttcgatcgatggcgtgcatcgtctcggtgctctgtgcgtggttgataccgtgccgcgccagccgagcgaggcgcaggtccgtcaactttgccggctggccacggctgtggaagggttgatccgctcccatgcacatgcgctggaggtgacgcgcgcccggtccgaggccgacctcctgaaccggaaacaccgggaacgactggcgctgctggaggatgttgtcggcgtggccggtgtcggcggctggcaactggatatgaaaacgcgccaggtgacgtggacccggcagacgcggcagatccacgaagtcgccgaggattatcagcccacgcttgaaactgcgttggcgttctatcctcccgaagcgcggaggaaggtcgaggaggccatcgggcgctgccagaccgatggctccggttgggaccttgaagtgccgttccgcaccgccaccggtcgctcgcgctgggtccatgcggtcggtcgggttatcgtggaaaatggcgaggtccgccgccttgtgggggccattcgtgacgtcacaccgcaaaaagccgcggatctgcacattcgccgctccgaaaccctttacaaatcgacgcttgaggccctgacggaggggattctcgtcttggggcgggatgggcagatctgctccttcaacccggccgcctgccggatcctcgggctgccggcggagcagttggccacggcgcatatcggcgaaatcgcccggctgtttcatccggcttcgagtgcggaggacgggaagggcaatccgttcctgcgtgttctggacgcggaagaaggaaaaaccacgaccctgagcctgtgcggcgatgcggaaaccggccagcgctggttgacgatcaacgtggtgcggatcgccgaacggtatgaggatggcgaggcgacgatggtcgtctcgttgaccgatatcaccgaggtgaagcgtcaggcggacatgctggccggggtgttcgagaactttcccggcggcgtcgtcttcttcgatcgggacatgtgcctgcaggcctacaacgaggcgttcaagaaactgcttgatatgccggaggaattcctggcgcagaagccggatctggaagcctatttccgcttcaacgtgaaccgcagcgagtatggcgagggcgaggccgatacgattatccgtgagcgggtggagcgcctgtgcagcggcgaggcgcacagctacgagcgggtgcgcccggatggaacggttcttgagatcaagggcacgccggtccccggtggcggccttgtgctgactttcgcggacatcaccgaacgcaagcagaccgagcgtcgctatatcgagaatgaacggatcgcgcgggagaaatcgactgagcttgaaatcaccctggcgaacatgaaccagggggtgagtgtgttcgacggcgaagctcgtctggtgctctggaaccgccagtatatcgatctgttcgagatgacccccgaggaagcatggaccggtgcccccctgaccgagttggtcgaggccaggaaggcgcggggggatttcgacggggatgtgacggattacgtggcggacctgcgggctcggctgcaggctggcgaggtggtgcgggtgcggttccatctgggctgtggccgtaccgttctcacggtccacgctccgctacccgatggcggctggatcggcacccacgaggatgtgacggagcaggacaaggcgtccgaacggatcctgcatgcggcgcatcatgacacgctgaccggtctcgccaatcgctcgctgttcaaccggcgtcttgaagaggcagttgccgacgcggccggcgggaccgcaggctatgtgctgatgctgctggacctcgaccggttcaaggcagtgaacgatacctatggccatggggccggcgatgcgctgcttgaggaggtggcgcggcgtcttcgcaagtccgttcgcgatacggatctggtcgcccgtttcggcggcgacgaattcgccgtcattctggaaaaggtcgaggaccgcgagctggcgggcattgccgcgcggatcatcgagaccctggggcaggcggtcgatgtcggcgagaacctggcatcggtcggtgtcagtctgggcattgcccgcatgccgattggagcaagcgatatccgtgcggtcatgagaaatgccgatgccgccctttatcaggtcaagcaagagggcggcaacggctatcggctctttcggccgcaggagaccaaggcgctgtagcgccgatgtcatggcccggcgcgaggcgcactcccgggcggggcaagcggccgtttagtcgaggtcgacccgcaccggccaatggtccgacccggtcgccgtatcgtcgatgctcaccgcgcggacccgatggcgcagggaggcggagacaaagcaatggtcgatgcggctgccggtcggattgctgctgccgccgttttcgtcgttgccggccgccacataggcatcgaccagcccgtcggtgttgcacagccggccgtagcgaccggtcatcgggccggtgagggcggcatattccgggctggtgttggtgcagttcatgtcgccgaccagcaccaaatcacgcggcatcggcggcatctcgccctcggtccagcctgccgccgggtccgggtgaccgccgcaccaggcgccgccctccgccggggcccggcgcaggatgtcgaggattgcctcgatctgcggcatgcgggtttcagagcacaggtggctgaggtgcacgctgtagaagcggatcggcccggtgccgggatcgatcaccgtttccagcagcccctgctggatcgaatgctggtcgagggtgccgaatttcggcagcggaaagttgcgcgaggagatgatcgggaagcgcgacagcaccatggtgccgaactggcgccgccggttcaccagcctgccgccctcgtcgcggtagctggcatccatgtcgagattggcgccatagacccaatgatggtccggcagcagcgcggccagcgcctccgcctcatcgaccatgcccgaacgctgccagtagcgctcaacctcctgcaggccgatgatatcgccatcgcggatctcgtcggcgatgcgcgcaaggtcgtagcgaccatcgatgccaaggccgtactggatgttgtagctgatgatcctcatgctgaaagctccgcctcggccgcggcatagagcgcgggctggtcgagattgacatagtcgacgccggcctcggcgatctgccggaacaccgccggatcctcaccggggtagtagatcatggtctcgtgatcgagctcgcggcaggatgcgagcaccgccggcgttgcctcatccacctccatttcgaccatcgccgcgccaaacagcggccgggcgagggaaggggtgcgggcaatgtcgagggtgatcatcgcccgcatgtcgggggcggccgcgcgcatggccgcgcgcatctccggcttgaaggagaaccagaagatatccttggccatgccgaggtcgcggatcatccgcgccagcttggccgggtcgcaccacttcagttccacataggcgccggcgcggcccttgaggttttccaggaaggcgtcgagacggggcacccgttcgccggcaaaccggggatcgaaccagcttcccgcatcgagcgcgtcgatctccgccgagctcatccgggcgattgcgccggagccgttggtggtgcggtcgacggtctggtcgtgcatcacgtagagcacgccatcggcgctttcgcgcacatccagttcgatataggcacctcccagctccagcgccttttccgccgaggcgaaggtgttttcaggtgcgagccggcaggcgccgcgatgacagaccattttcgtgcgggtcaaaacgaaatctccacgcggattgcttcgtgatcggaaaggt

SEQ ID NO: 282 - DNA, 23306 bp, synthetic construct
  misc_feature 1..23306: note = Synthetic
  source 1..23306: mol_type = other DNA
tctcgatcaccgcgcccctgttcctgctcgtgatggcgttccagcgccagatcgtcagcggcctgaccgctggcgcggtgaaaggatagggcttcgagtcgaaggtgttgcgaactcataagggggcaagccgtcgaggctcgcatgcgggcgataccctttcttgcggccgcgtcattgcttgctcccgcatccgtcccggctctctctgcgtggcgttcgaccagaggccggttcgcgtcgaacctcttggctgcgctttttaatcgtcgtcgtcgctctccgcgaaattgcgaagcgcttcgatgttcttgacggttatcgagcgatagctcgtcgtcagccaccctgcggcctctctaggcggcgggcaacacaaacggaaagctgacaccaatcgagccaaggctctgacgcatcaagccaggcccgttgagggaaatcccccattgctactgtgtggctgccttctagattcagtgcgataaccaatcccaacgacggagggctccatggccaacccgcaatccgacgacaagcgcccaaccccggaccctgctgaggacaatgcgtttttcccctctccttattcactgagccagttcacatcgccgaaatccgacctcagcggtgcgaactattccgatccttatacaggcgggcgctggaagatccttatgatcggtgccgatgaacgttatcttctgaccgataacggcacgatgttctcaaccggcaaccatcccgtcgaaacattgttgccgatgtaccatctcgacaaggcaggcttttcattcgacgtcgcgacgctgtccggcaaccccgtcaagttcgaattctgggcgatgccgaccgaagacgaaaaggtgaaggggctgtttgcgaagtatcgtgctcagttcaagcaaccgctgaagctcgccgacgtgatcgaaacggcactgggcgaggaatccgattacatcgctgtcttcatccccggaggccacggcgcgctgattggcctgcccgagagcgaggatgtgaagaccgttttggaatgggcggctgccaaggacaagttcgtcatctcgctgtgtcacggcccggcggctttcctcgccgtaggcctcggcgacatgaagggcggcaggtcgatctacgatggctataagatttgtgcctttcccgacgatctcgatgcgcaaactccggacatcggctatatgccgggccatctgacctggaaatttggcgagaaactgaaggcgctgggcatcgagatcgtaaaccagggcatatccggcgcgacccatcaggaccgaaagatgctgaccggcgacagtccgcttgccggcaatgcgctcggcaagctcgcggccgaggcgctcttaaaagaggcggctgcggggtgatcctccatgcaggcagatgccacgttccgtgtcgctcttgatatcgagtgcagccaaaccccttcggcgatcgaggatgtggtccgctcctttgccaggccgttgggctacgaccgcttcgtcctgttctccgcatcggcggcgcgggacgatgtggtcgaacggatctactgggtcgaaggcgattggttcggcgacggtgagacggtcgatgccgaaacctatattcgacgttgtccggtcacgcggcatatgctggaaacgcatgatccgttcttctggaccaaggcgagggaagaaggcggcgagcgttatcgtgtcgttcgcatgccgcgcggtcgcggcattcatggcctgcaaatcccgatcttcggcccgtcgggccttgaaggggcgatgagcctcggcggcgagcacatcgacgcatccccgccagcgcgcctggcgctggcagtcgtagcttctgccgccttcctcgcggcccgccgattgctggaagcccctgccgacggcgtgaccggaaagctctcgaatcgcgagcgcgaggtcctggcatggacggccgccgggcggcgccagagcgacattgccgccacgctcgacctgtcggaacgcacgatcgagaatcatctgcgacgaatacgccggcgccttggggttgcgacgacagcgcaggcgatcaaggtagcgatccgcaacggcgacatcgagggctgacacgaagaccaaaggagaccagtaaaatggctaagacggtattggtgacgggagcagcgtccggcttcggccgtggtgtggcattggggctcgcctcgcgtggccacaatgtgattgccggatgccagatctggccgcaggttacggaattgcggaatgccgccgcggcagagggtgtcggaatgcaggtcatcaagctcgatgtcctgagtgagattgaccgcaagaatgcgctggaacgggagatcgatgtcctgttcaacaatgccggcatcatggaatcgggaccgatggtcgaaatcccgatgtcggtgttccgctcggttttcgaaaccaacgtctttgcggccctcgagctggcgcagggcttcgcgcgcagcatggtgaagcgcggctccggtcgaattgtctggacatcctctgtggcgggtctggtcaaggtgccctttgacggcgcctacgcggcctccaagcacgcagtggagggggtatgctccgcaatgcacgaggaactgaagccctatggcgtcgaggtcttgaccgtgaatcccggcgcctttcgcaccggcttcaatgacactggcatggagagcatggaccaatggtggaaccagggggagcgggtcgtcgagcactggcccgtccgtgaactcgaccggcagcatgatccggccgaaatgatccaggccatcattgacgtgatcgaggcagagaagccggcctatcgcaccattcggccggcaagcgccgaggaaatggtcaggaaggagcaggcggcggtgtgggagcggcatgcctgagcgccccgcctcgcaggcctcatgtggcgaggaaggcacgacgaggcgagcggcgtccggtgttcccctcttctctcacgccgattgaccttgcccccaggttttatccagtttggagttcgctccagcggtatttgggacagcagcggcgggctgcggtgcagagccatttcggctgcgcagcaccgcatcacgtcgcgggttgattgtttgagcgaactcggcaggtgtcagccaagcaatgcctgaatgtggtcggtaatcgctgcgccagtttgaaagcgctgatcgagcctgcggccggaaagagaatagggtttcgttcaaaaacgcatcgcgcagccgcccaacgaagccctcgatgaaggctttctggatcggcttgccaggcgcggtgtagtgagcgcttcgctttcacggacacgatttatgcggacggccgaatgttcgcggcatgctggcgggcctttgcgagcgcttcgtcgagacgggcgcgagacacgcccgcgaggcgctcgacgcccaggagacgtgccaggtcgcgcgcggggtcgggctcgtccagcaggtcgggattgtcgagcacgacggccgtgagctcggcgagcgggatgtctccgatcgacctgcgcgcatcctcgcttgcgggctgccgatacggaaggatatccgacacggtccctttcttccagatgaactcgccgctcgattccacggtcctgtccaggtcgcgcaagtgaaggtctatccgttcacggattcgtccacctgtccgcagccagccgtgggcgcgggccagccgctgggcaaggatgtcggtgcgcaagggactttcggtctcgatgatggcttcgatcatccgccgcaagatatcccggtagccgaattcgaagaactgatcaggatcggccggaaaaccggaaagatcggtgacatgatatcgtcgcttctcgacgataccgaccacggttgcagacgcgggcgcctgcattgctgctccttcgataccacgggagaccattggtgcttccgccgagacgagttcggtctcagtggttgccggcggcggcgcaatctcctcggcaggaacgaccccatcatcgcgaatctcctcgatcccctccacctcatgtcccatgtcccagtgggtggcaacgtcctccttttcggcggcccggcgcgccctgctttcctccagcagactttccagcccggcgtggagccgctccacgcagcctgcggcatcgaaccaccagtccgtcgaccagacacgcaggatattccagccaagccccttcaggacctgctcgcggaccttgtcacgatcccgtgcggtggccgacctgtgataggtggcgccgtcgcattccacgcctgcgagatacgcgccggcaagatcggggtggcggacgccgaggtcgatccggaaaccggaaatcccgacctgcggcaccaccgtccagccgcgtcgctcaagctgcgcggcgaccgcttcctcgaagggagaatcgaatccgccgaccgatccgatatcctgggccggcagcgcgatcgcgccgcgctcggcatagtcgagaaacgtcttcaggtgctgcaccgccagcgccttcgtccgcgccggatcgatctgatcggccgtaaagccggagaagacgaccagttcctggcgcgcgcgggtcacggcgacgttgaggcgccgctcgccgccgtcgcggttgagcgcaccgaaatccatcgtcagcttgccggcggcatccttccagaacgtgatcgagaaaaagatgacgtcacgttcgtcgccctgcacgttctccagattcttgacgatcgtctgttcgacccgttcttcggcgaagaaccattcaagctcgggatcgtcccggcgtgccgtgtcgagcaggtccaggatcagcgattgctgctgggcgttgaaggtgatgatgccgagcgtcgggcgatccttttccggcagcctcaaccagcccttcatgcggcaaaccgcttcgcgcgtgacggcttccgcttcgatcctgttcgtccggctcttgccgcgatcgtaaacaccgtcgggcaccttatgcaggcgcaccgcgcggtcttcgaccaggggcgaggggaacgtcaccagacggttctggtagtagtggtgattggagaaggcgatcagcgactcgcttcggctgcgatagtgccatctcagatcgcgtaccggaatgccggccgccttcgcctcgtccagaatgctctccagatccttctcgtgatcggcgatctcgtcctcatcctcgttgcggccgaagaagttcgtcggcggcaattgtttcgggtcgccgacgatgacggtctggcgtgcccgcgcgatggcgccgacggcatcccaggtggtgatctgggacgcctcgtcgaaaatcaccacgtcgaacagcgcctgatccggcgggagatactgggcgatggagagcggtgacatcagcatgcagggcgcaagcttgggaaagctctgcggcatcttgccgatcatgtcgcgtatcgactggctcggccgctgcagttccatctggtggcgcaacagcccgagttccgagttgcgcgaaacgctctgcacggcgggcagtccatgcgcgatcgcgctgatcacgcggcgggtggcgtgcgagcgcaccagatcgtcgatctcacggaattccttgatggcgttttcgtgctggaaccgccggaaatcccgcaaaacaggatcgctgtcgagaaccttcggaagccaccacctggcatatcccagtcgaaacgccgaccgcgcttcctcggggcggaccacccccttctcgatctgctcgacaagaggggcaaggctggaagccatcgcccggcgcctgatgcggcaccaggccgaccagtcgcgaagaagatgccgcgcattcacgagggcaccgatatcctcgctcagtgtcacaaggtcgggtccgtccgatcctgctgaaatctctcgcccggcaatctcgcggaagcgctgacgtgcagcctgcaggccttcgatcgcggtgagaagccggtctcccgtctgccggaccctgtcgttttcgaacgtcccgcgcaggcatggggcaacggaacggagcatcgatcgtgtctcttcctggccgcgccccgggatcggaacggtggcgcggaattcccatgcgagttcgaggatttccgtgatggcgacgacgtccgtcgccagaccgtcgatcggcagaggtttccccgtcaattgattccgatcgatcgccgaaaggcattccttcatgcggcgcaacagcggaatatcccgttccggctctgctgttcctccatcagcgtagccttgcagcaacttctggaccttgcgcttgccaagcgcagacgtgggccagaacgaggcgttcgcctcccgccattgacggtccagcgcatcgggatcgaggtcgcgcactgcggtcacggcgtaggcggcggaaagtccgcgctctgcctcgcggtagctcttgatggaattcgcaagcgtctccaacgcgccggcgcattgcggaagctcccgatcgaaggcgatggtgatgtcgcggccccggcatttccgcaccaccctcgcgaggttggtcagcccctggatttcggcttgtgaagatcggccttgcgacccgaggccaaggcttgccagataggcctcgacagcggtcctcaccgcctcggccgcatctttcagggattgcgccgccgcgagcaggctttcctgccagccggagctccagtcaccgacatcgacaagatccagcaccggctgccgttcgacggaagcgaaaacgaggccgagctcgccggcaagctcttccagatcctggagcgtttgcgcgtcatgggcatcccgctccggccatgcaaggcctggtgcagggttctccgcagccttcaaagcgattccgagtgccagatagggcgtccatccattcgggtagcgcttgtgcaaggcctcgacataggcattcaactcgtcgcggcgcagccgaaggcgctcgttgaccgccacccattcggatgcatcgatcccgccgccctgttcccaggccgccttgagctgtcccaggaaatggcggcggtcggccttgttcgaatgcaactcgatgcagtgatttgcgaggccatgttcgcgcaatcgccgatagacgacatcgagcgcagccgtcttctcggcgacgaacaggaccgtctttcccacagccaggcaattggcgatcatgttggcgatggtctggctcttgccggtgcccggtgggccgacgatgacgaagtcccgcccttcggcggcggcaaggcttgccgccatctgcgacgaatccgatggaagaaggcagatgaggtcggacggcgcataggcgcgatcgagctcgcgttcctcgcgaaacgacggctgtccgtcgcctgcctggaacgcctgctcgggcgtgtcgatcaggtggcggacgaccttgttcgcgcggagcgcctctgtccgctccaccaggtccttccacatgagaaactttgcgaaggagaaggtcgacaacgcggtttcatcgacgacctccatgcccggaacgtcgcggatcgcctggcgcatcatggcaagaaggcgcggaacgtcgataccgttgtcgtcgagcgggaggtctcctgcgaattgcggaagcgtcagatcgaaatcgcgctccaggaactgcaggagcgtggcgttgaagcgcggctcgtcctcatgaaaacggaccgtgaaacgcgagctggcgctgcggcgctcgagctttaccgggaccagcagaagaggagcccggtagctgcgatcgtcttccggcttcttcttccagcgcagaaagccgacggcgaggaacagggtgtttgcgccgccctcggcaaagtcgtttcggacctgccggtaaaggtcgatcagccgtgcctcaagctcggatgcaccgagcgtcgaggggagttcgtccctgagcagcgcttcggctgcgaagccgcgttgcaggtccttgccgtggacgtcgcgataaagcgcggcgtcgcgctcgccgagtggattttgctcgggaagagatatgatgcggattgcaccaccgcccgccagccgatcctcgaggtaggcgacgtccgtgcagagaaacgggatcgtcttcctcgaatccggaaaattgaggagccggttgcgaagcgtaagatcgagcagtttcttctgccaccggtcgatgcggccggcagcggtggtcggcttcacctcgatggtttcgaccggcaattcgccgaaggatggcgccgcgggcagaggcaggtccgcaacgggcgccatttcctcatcgggaacagcgcggcggatcggctcgtgcgaggcaagcggcatgatcccgccgctccgtgaccgccggacatcgatcgccgccacaaaggcgtgagcctccttttcgctgaggcggttgtcgaggatccgctgcgcgttctccatcgtcatggcggggcgatgtgtcacgccggtcgtttcgaagacgatcagctcgcgggatgcgagcgccttgcggacctccatctggtccgtctcgatcgcgttggcgagggttctcctggccagccacacaccggctgacgcatgcccctggaacatcagaaggacaggatacaatccggcagcttccagggcggcggcgaaaagaagcgtggtgtcgaggcaggtcgccagccgctcctcggcgatcgtgctcgggcgcctgatcttctggccgcggctttcgaaactggcgggcggttccgcataatgcagcgccatgccggcaattgccgagtagatggcggcggcgagcaggtaggcccgctgcgggctctcggactggtagccgtccagaccgctcgggtatccatgcgcggccaatcgctctgccgcagtccgcagaatgggtgccacgcccggatcgttcggcatgacgaaggccggaagcagttgcgccatgtcggcgacgccgccccattcgtcccgggcgagcagcctgacgggaaggtgccgttcgtcgaggacgtttcccgccgaggaaaggcgaagcgtgatctcgccgcgctccgcctcgttgaggccggcgagatagctggcgtcgagttccactttcctgtcgctcagcgcaagcctgtcgcccggcacgagccggtcgatcgtccatgttttcggcctcaggaatgagggggaagaggtcaattccagcttgcagttggcgaagtgcctgtcgctgttgttctcgatcagaatagagcggatgaccggtatggcattctgataggatgcgtaagtgaagctcgcggcgatatcggcaacgaccaccggcctttcgcgggtgttgctgatgccggcatcgtattgttccggactattgtcttctgccatctgcatcggtgtgtctccccgccgagagactagcgttgttttttaccgcgaagaaggactttctactcgtgatagttgattttgggcagaaattctcttatctgcttggattggcaacgcgtatcacgtcacgttgacctgatggtgatccaccatgaagagggatttttacatcgcaaatgaaaaagcgtccgccgaagcggacgccttatctggtgcatatctcagcttgttgaaacggctggactgcgatttctgaactgctgtatgaaatcatgaaagtggaactatagcaatgccttattccgagcgtctcaaactggttatgcttgacaagcatataagaatcatgaacctagcagttcagaaatcgcaggccaaccgcaaccacatactttcggcaaatctttgattttccgaactttgttgatagagccccgccggggtgaaccggtgaggactggctggcaaaccttcgagatggcgggtagcttatctctatacaccctccacctaggttggattctaggtggagggtgtaaatcactcagcgtgtttgacaagtgcatgattcttatcatatcgtcaaggtaggttatgtaattatctttcacatactttcaggcaaatcttatttttggcgatttttaatgagctaggaggctgcggaagatgacatgaaaacacttggtcttgatctcggtacaaattcgctcggatgggcaattgtcgaaactcgcgatgagcccacaaaatatagtgaaggcagcatcgttgccagcggtgtccgaatcttctcccaatccgaaatggcggggcgcgatccgcagtcgaaagcatctctcgcagtggcgcggcgtcaggcgcgtgggtcaaggcgccggcgggatcgctatctgaagcggcggcagcgccttgtcgaccttctcgtcgatctcgggctgatgcccgccgacaaggccgctcgcgcagagctggttaagaaccatggcgatgggaagacgggcgacctctcgtcatccgtctatgcattgcgcgcgcgggcgctggacgaggcgctgtcgccctatgagatcggccgcgcgattttccacctcaaccagcgccgcggcttcaagagcaaccgcaaggccgacagcaacgaccctgaacagggcgtgatctccgaggggatgcgcgcgctcgatgaaaagatggcggaggcgggcgcgcggaccatcggcgaatggctgcacatgcgccggctgcaaggcctgccggttcgtgcccgtatcgcgcctgatggggaaggttacgccttctatccctcgcgtggtgcgcttgagcgcgaattcgaccggatcatggctcgccagacgcttttccataccgacctactcaccgatacggcaatccgggagctgcgcgaggtggtcttccaccagcgtccgctaaggccggtgaaaccggggaaatgctcctacaatccgctggaggagcggttggcgaaggcgcatcccctgttccagaaattccggctgctcaaggaactcaacgaactggaaatcgtcggggaggaccagaaacacatcaagctgacgccggagcagcgcaatgccctggcacttcagttgcgcacgagcctcaccaaacagggcaaggtgcccttctcgaagttgcggagcacgctgaagctcgggcgggaagtgcgcttcaacaaggagaccgacaaccgcagcgatctcgaaggcgacgtgatctattttcgcatgtcgcgcccggaatgcttcggtaaccgctgggcggacctgccggtggagatgcaggcggcaatcaccgagagactgcgcaccgagcctgactacaaaaccctcatgaactggctgaaagcggagacggggctggatgaggttcatgcccgggcggtggccgacacaccggtgccggacggtttcggcaggctggggcaatccgcactgaccgcgctcatcgatgcgctggaaaacgaagtgggcgagggcggcttcgtcatcaccgaggccgaggcagcgaagcgggtttacggccgcaccaattctgaagccgatcccgaccgcaagggcgtggatgaactgccgaaatatcaggaggttctggcgcgccacattcctccgggaacgggcgagcccgacgatccctatgacgatttcatgggccgcatcaccaatcccacggtccacatcgcgctcaaccagttgcgccgtgtggtcaacgcgctgatccggacgtatggcaagccggaccggatcgccatcgaggtgggccgcgacctgaagatgaacgacagggagcgcgacgaggtcaaccgccggatcgggcggaacacgaaagcggcgatcgaacgaggggtgaagctgaccgagaccttccggcagttggacaccggttacaatcgtctccggctggaattgtgggaggatctgaaccagaagccggaaaaccgtgtctgcatctattgcggcaaggccatcgccggccacatgctcttcaacggcgagacggatatcgatcacatcctgccctactcgaagacgctggacgacagcaaggcgaaccggatcctgtgctgcacctcctgcaatcgcgagaagaagaaccggcctccgtcgcgcgtgccgcaatggcgcagtcgctatggcgagatcctggcgcgcgccacgacgctgccgaagaacaagcaatggcgctttgccgaagacgccatgacgcgcttcggcgaggaggaaggtttcctcgcccggcaattgaccgacatgcagtatatttcccggctggcgctgacctatcttgcccatctctacgattacgaagaagtggacctcgacggtatctacaagcgccatgcccgtgtgcgtgccttgcccgggcggatgaccgagatgctgcgccgtcagtggggtctcaacgaattgttgcatgaccataatctcatcggcggtgacgtggccaagccgaagaaccgtctggatcatcgccaccacgccattgatgccatcgtcatcgcctgcacctcgcgcgcactcatccagcggctggcgacggcgtccgcggcggccgaggagcgcggggccgagcgtgtcgtcgagcggatcgatccgccctggtccggcttccgcgaggatgtccgtgcggcggtgggcgccatcgtcgtcagccacaagccggatcacggcacggtgggccgcgaaggctatgcaaagggtcgcgggcagacggcgggcaagctgcacaacgataccgcctacgggcacaccggcgaaaaggacgccagcggcaacgatatcgtcgtgcgccgcattgccgtcaccgatatcaggagcccggccgatatcaggaagatcaggaccaacgcgcacggccattccgagctcagggaccggctttacgaagcgacacgcgggctggagggcaaggcgttcgaacaggcggtgctggatttcgtcaagggcgatgcgaaattcaggggtatccgccacgtccgcatcaccgaagtggcgaatcccgtctggatcacgcatggcgacgggcggcacaagaagggctatctgccgggcggcaacgatcgcttcgatgtctgggaactggctgacggcagatgggatgccgaagtggtgacgaccttcgatgcgcaccggcccggtttcgtgccccgcatgcggctcgaaaaccacaatgcccgcaagatcatgagcctgaagaagggggatatgatcgcctacaacgaccctgtcagcgggcagcgtatcatcgccatcgtccgcaagttcgaccagcgcaacaagcagctttacctcgatccgcacaacgaggcgggcaatctcgacaggcgggaaaaggaaaaaacctacaagccgcttcgcccgatgcccaacccattgaaaaaataccggccgcggcaggtccgcatcgatgagatcggccaggtgttcgatcccggtccgtggtgggagaggcaggacggttaaccaaggattaagatttgccggacgcaggcgcgcgattgagttagcctctcaacatgcagcgtgtggttgatctttcctctgatggcctgcatgtggccgttcatcgtggtttccttaccgtgtcgaaggaccgggaggagatgggccgcgtagcgcttgatgacatcggcggcgttatcgcccatgcgcacgggctgacatggtcaaatacggtcttcgtccgcctctcggagcgggcggtgccggttgtgctgtgcgcggcgaaccatgcgccgatagcctgtgtctggccgctgcagggcaatcatctgcagggcaggcggctgaacgcccaggtggacgcgtcgcggcctttggccaagcgcatctggcgcgacatcgtggtcgcgaagatccggatgcagggcgcggtgctggcatcggtcggggcggaggccggtgcattcgacatgctcgcccgcaaggtccgctccggcgatccggacaatgtggaagcgcaggcggcgcggcgctactggcaggcgttcatggggccggatttccggcgcgatcaggacggcgaaggcatcaatgcactcttgaattacggctacacggtgctgcgcgcgatcatcagccgggccatctgcgccgccggtctgcatccctcgattgggcttcatcactccaaccgcgccaatgcctttgccctggcggacgacctgatggagccttatcgaccgatcatcgacagggccgtctacaatctcgtgcaggacgggttgcgagaggtttcgcccaaagcgaagaccgcgctggtgacattgacggcgctggatctgccggcgccgcacggcatgagcccgctgcatgtgcatgcaacgcgacttgcacagcaattggcggcgcttttcgacaaggaggacgagggcctggagctgccttcgccactggacccgctgacgttatccggccttgcacggcagggcgggacgccatgacaacgctccatacggaaaaacggggagagcggaccaatccatccttcatgtccgcttatcggatgatgtggatgctcgtcacgttcgatctgccggtggatacgaagagacaccgcgccgaagccacgaaatttcgccagttcctgcttgatcagggctttgagatgagccagctttcgaattaccttcgcttggtgaatgggcaggaacagtttgaaacctacacacggcgaatcggatccaacctcccggagcggggcgatgttttcatctttcaatttacggacaggcagtatgaaaatatcgtccgattcagcgatcaaagccgccgtacccgaaagaaaaatcccgagcagattgctctattctagtgttcgcggaccatttcatggcgcgataaagccccaaaaccactgtcgaaacaggggcttggggcaatatcgagcctagcagttcagaaatcgcaggccaaccgcaaccaactcgccttcgagcgcctggatacggcgagcctagcagttcagaaatcgcaggccaaccgcaacttcggatgccgccccgtggcggggcggtcaagcctagcagttcagaaatcgcaggccaaccgcaactccccgccacaagcacggacacgggcggggagcctagcagttcagaaatcgcaggccaaccgcaacatgctggcgcgtgcgtattcgagcagcgggagcctagcagttcagaaatcgcaggccaaccgcaacggtggaaaggctgaacatgctgtctcctaaagcctagcagttcagaaatcgcaggccaaccgcaacacttcgctctgaaggttcgcctgagactgcagcctagcagttcagaaatcgcaggccaaccgcaacaaggacgggggcctcctcggcggcgaaatcagcctagcagttcagaaatcgcaggccaaccgcaaccgggcgagcgagcaatcgctgcggccctcgagcctagcagttcagaaatcgcaggccaaccgcaacggttccaccatcgccaataggctggcccttagcctagcagttcagaaatcgcaggccaaccgcaactgtcagatcgaggaaaagggctttgtttacagcctagcagttcagaaatcgcaggccaaccgcaacaaggtgaacgtcactgggacgcgcaactggagcctagcagttcagaaatcgcaggccaaccgcaaccgggttttcattgatagtctctcctggtgcagcctagcagttcagaaatcgcaggccaaccgcaacaacaatgagggcgcggccttctgggagcacagcctagcagttcagaaatcgcaggccaaccgcaacaaaatgagtaccgtcgagttctgccaaaatagcctagcagttcagaaatcgcaggccaaccgcaacgacgatctcgcgcaggggcgtgtcggccggagccaagcagttcagaaatcgcaggccaaccgcaacctgcgccaatccgtgaatctctcggcgctgagcctaggctcaggactcattgattagatccagaagatgtttgttgcagcgatgcatatggctgaaaagaacgtatgtgcgcatcggtcgtaccgagttgcaatgcgccgccagtctttgagctttgcgaagaggttctccaccttgtggcgctgtcgatagagcgccttgtcgtagggatatggtgtcttcctgctgcggctggagggaatacagggttcgataccctttgcctgcagggcctgccggaatggtatgctgtcatatcctctgtcggcaatcagcgttttggccggcggcaaggtatccaggacgaggcgtgcgcctgtgtggtcgctcatctgaccttcattgagcggcaggatgatcgggcggccttgaccatcgcagacggcatgcaatttggagttcaacccgcctttggtccgcccgatacgacggggaacatcccttttttaagcagactcgccgcagttcgatgcgctttcaggtgtgtggcgtcgatcatgatgcgttcgggcttcggaccgttaccggacagggccacaaagatgcggtcgaatcacccagccggctccagcggatgaagcgattatagagcgtcttgtgcggtccgtagccctttggcgcatccttccattgcagaccgtgcttgatgacgtagacgatgccgctgattaccctgcgatcatcgacgcggggaacaccatgcgccaagggaaaatgcggctcgatccgcgccatctggcgctcgctcagcagaaacagatcatccatcacggtctccttccagaaaccgtgaatcacatctcatcacaaattaataggtcctgaacctaggcggtgatcgtcgccacgaagacggcgagcgtcagccgcatgttgagggtgaggccgtcgatcgcgaggaagatcggcatggcgctgaaggcgagtacgatcgccgcgacgatctgtttgacgcgggcgggcggcatgcttggctcggccgtcggagacggttccccacgccgatcggcgtggggttcgggaaaggcggttgcataaaggaccacgatcgccctcctttcgatctttcaggctgcggctcaatcgtcgtcggacgacgagttcgaggaactgttcgaattcgagttgctgttggaattggaattgttgttggagttcgagttcgagttcgagttcgaattggagtttgagttggaattggaattcgagttggagttgcgattcgagttggaattcgacgagctgttggaattgcggttcgagctccagctaccgcgacggtcgtcgtcgcggtcgcggccgtagcgcgcctggctcgccttgctggtgcgcgtcatcttctgcaagaagcggtaaaccgggtcgtcggcgacggcgggcgcgggggctgcggcgccgaccaccaggaatgcgctcaggattgcgatgaccttcttcatggtgtttctcctttgagtgacagcctcgttggctgtgagggggaaacggcggtcggcaattcttattcctgataaaacagaaataatttcaatatgataggccttttctgcagcgcatgcggcatcgccgccgctgcggggcgcagcgatggccaaggcgtttatccggctcggaacctatcgctgggcgcgggcgaacttgcgataccagccgtcggcagcgagcgtcttgcgcaggatcgtcttgcgcaccgcgccctccggcgcgctttcggcacggatgtccgcgtcgagatcggaggcatcgcggcggaaggggatgacctgcacgatcggcgtgccgcgttccagcatatgcaggccgtcctcgccgatggcgaagaagggaaagtggatttccgattggtaggtatcggtgtcgacgacgccggcaacgacctcgaacacgccgttcggccggttgagcggcggcacgaacaggcagctccagccgggcggggtgcggacggtccagtaattgtggaacttgcagggcggcagcggctcgcgcggattgccggcgacctggtggctggcatgattgctgaccagcgcgcgatcgaaatcccagccgcaatcgaccgtcttgccgccgtcggagatttccatgcgcacgctcgccggaaggccgatcacccagccggcggccatggcgtcgaggaagggcatgcagcgcttcacggtgatgccgctgttggtgggcgagacctgcgtctcgtcgatcgcgggcaatttgcggaaccagtcgggcagcaccgtcttggcgcgcacgggggcggggatcacgccctcgtcctctttgcggcagagaaaggtcaaccggggctgcggtttcttcagaagggccagggccatcgctgttctcctcttcaatcgatgggagaagaacggcgatggacgaagcctattcccggcggcgcgaaaaatttttggccgagcgtcaggtcacccggtagagctggaccggccgcttcggtgcgcgcttgatgatgcccttcgcttcgagatcgagctgcacggccttcatccaccagcccgccttctgccgctccggaaaatccgtctccgacaggtgcggtagcagcgcctcctgcgcctgggcgactgtcatgcccggcgccgtgtccggcagggcggcgagcagcgccgcgcgcatcgccatgtatttcgtgcggtcgagcctttcggtgcggcccggcgtgttgatgttttcgacttcgatcttgtcagacatcaatcgtccccccaacggcgattttcggattgcggaagcccatggcgatccaggccgccaggagttttccatagaaggcgaccgtgtgggtcttgaggttgggaatgtcggcaggcaggccggaccgatcggcaaggtcgctcgtcatggtgcgcagctccgccctcggcctttgggcttccggccagagatgcaggtagaggctcagccagtgcgcgcccttcatctccaggaatatgggcgtgttgcagcaggtggcgacgacgcggcgcgagccggcggtgggggagaggcggaattccctgaggttctccgcgcccgacaggatgcagacccggtccttgcggtattccgcggccggtgtcgcatggtagctggtcagcgtgttcttcgcgccgggaagcgtcgcgagccggccggcggcggcccggcaactgttgcacaggcattcggaaaccaggatcgggtctccctgcacttcaaggcgcgtctggccgcaggcgcagccgatatgggttgttctgcgcatctcagtcatcctccgtgacgttgaacaggtatcgaatgtatcgctccagatggtcgaggctttcgcgcgctagcgcggggtcgttggccgccttcgccaggatgaagccgccctggagaacggcctgcgtgtggcgcgcgaggctctcagccgtccagccggtcgccgtgatgccgcgctcgcgccgtgccatctcgatatcggcctccagcgttgccgtgtgcccgaacatgctgcgcccgcaggcatcgcgaatgtcgggcgcgctcacaaaaacctcctgtgccatcgtgccgacgaggcaggtgaattcctgcaattcgcccgcgatgatcgccttgcggaaggcgacataggcgagaacccgcgccagcggctcgctcggaccgtgatagagggcggcggcgaaataggccgacgtcgtctcgccccagaactccgcggccgccaccccgagagcctccttgctcccgaagtgatggaagaaggcgcccttggtgacatcggcagccttgcacaggtcctcgatggtggtcgccgcgaaccccttttcgcgaatgatgtcacgtgcggcctccaggaggcggatccgtgcattgccgcgttcgggtgattgtttggttggcctggacatgacgagaacataccatacggtcggtatgtgtcaagtatggtttgatatcaacctatcctgtgccctggcgccgggcgcatacggcgctgaaccggcctccaagaaagccggttcagcatgtcatatgagggcttggaaaaggctagggtgcgagcgccttgcgttcttcttcggcggaaagcggggcgccggcctggatcgaggtgagataggtgtcgatcgtctcctgcgtggaggcgggcacgtagccttcggcctgcggcgtcgtcagcgccagccgcgtcgcccaggcgccgtcctggcggcaggcgaccgtcagcgtgctgctcgcctcctgcttcagctcatattcgcggcagagttcgccgcgctcgtcgcggaacgtggcgacgacatgcagcacggcgcccgagagccttatgtcccggccggaaacctcgcggtcgagggcggcggcgatctcggcggcggaatccgttgcggacggccccatgctgccgagtgtgaaaccgatgacacccgtcaccagcgccacgaggcttgccgcaaccggcatgagccagggccgtgtcgtcggctgcgccatctgctgcggtttcgggcggaaggacacgacgatattgtcgcggggcgactgtgcctcctccgccattttgcgcacagaagccagcagcgcctccggcaccggctcgtcgatcagcggcttcagcgcctcgcccaccagccggcggctgtcgaggaagacggtgagccgttcggccagcgcctcgtcggtcgcaagcgcctcttccagcgcgaggcttcgcgcctcgtccagctcgccatcggcgaaggccatcaatgtctcgtcgtcgaaatcgtctttgttcatgaaacgccgcctttcgtatcgggcgaacgtctctcgccaaaacttattcccgtcagctccatcagattttttcgcgcgcgggcaagacggctcatcacggtgccgatcgggatggcgagaacctcggccgcatcgcggtagctgaactcctccacgcagaccagcaccagcacttcgcgctgctcgtccggcagtttctggagggcgatggtcacctcggccaaatccatgcgggcatgggcggcggcctcgccagagggcacggagacgtcgcgcgcctcgtcgatgtcgtcatgcgggccggccgtcttcagccggcgcaggtggtcgatccacaggttgcgcaggatgcggaacatccaggcgtcgaagcggctctccggcgcaaagctgtcggcggcgaggatggcgcgctcgcaggccgcctgcaccagatcgtcggcgagctcccgcgaccggcagagcgagatcgcgaagcgtctgaggttcggcaggaaggccaccagccgttccggcaccgtcggcatgtcattcgtcatgcgatttctttggcacgccatggaataagctgtcgagtcaaacgtatgtcaggataccagtcaccgatacgagccaccatccgccatggagatcgaccatgccgagccgccttgcagccctctccggacgcctctccctcctcgtggccctgaccctggccggtacggtggcgctgcccgcgccggagggtggctttgctcccggcgtcgccgttgctctcgccgacgacgatgatgatgatggcggggacgacggtggcggcagcagccgcggcggtcgcggaggcgactggcagccgaaagcgcgcggcgacctgcgctcgctgttccgctggccatcacgcgaggtgcgtcgagcgcccgtgcgccgcgcggttgcggtgccggaccgtgcgccgaacgagatcgtcgcgaccggcctcgacgacgacgccatcgcgggcctggcgcaggacggtttcgtcgtggacgaccgggtcgagattgcgctcatcggcggcgaaatggtgcgcctcatcgtcccgcaaggcatgacgctcgatgcggcgcgtgctgccgtctcggcccgcagcgcctcggcgacggtagatttcaaccacttctaccagccgcaggccgggggcaaagccgcctgcgtgcgggaaggctgcgcgctggtgcgccacatggtcggctggccgagcggcgaggcgggcagcggcctcgcctgcctgaagccgcagcgcatcggtctcatcgacacggctatcaatgcagagcacgccgtgctggcaggcacgcggctggaaatcctcgacctcggcggcggggagggggcgaaatcgggtgagcaacacggcacggcggtggcggcacttctggttggcgcgccgggaagccgtgtgccgggtcttctgccaggctcggagctcgtcgcggtcgacgccttccagcgtttccgcaaatccacggatatcgccagcgtctacgacctcgtccgcgggctcgatctcttgatccagcggaacatccgggtcgtcaatctcagcctgacggggccggcgaaccgtgtgctcgagcaggcggtggaggccgccaacgggcggggaacgatcctcgttgcggccgccggaaacgacggtccgaatgctgagccggtctaccccgccgcctacgaagttgtcatcgccgtgacggccgtcgatacggcaggcaacccctatcgccgggcggtgcgtggcgcccatatcgatatcgccgcacccggcgtcggtgtctggacggcggcctcgatctcgggtgcaaggcagaagaacggcacctcgttcgcagcccctttcgtgacggcggcggtttccctgctgcttagcgccaagcccggcctttcgccgcgcgatatcgaagcggagttgacgaaatccgccgaggacatgggcacgcccggcaaggacaacatctacggctgggggcttctcaacgcgcgagcactctgcagacaagcgaaagatggaaagtaagctttgcggaaaatgacccgctgtgcgctgacggccagatttcgctcgaacgacgacccccgggcgccagttgcatcaatctgtggaactctaccgtcagcgccaggtcgagaacttattgtgtggtcccgaaatgcgatggtgcggcttaattttgtagattggcgggtcctttggcgcccatgcccgcttcgttgccggctggaacccgcgaggtccacgcgcgattgtgccgaaacgtcgagcggggtgcaggtcatggcgctcatgcgagcagcccgaatgagatgcgatgagcgatgattatcgaacaagggctgacaacgggccatctccggtctcaccgtataccctgaaatcaacaccgtagacggccttgaggacatcgggcgtcatgatcgattgcggagagccgcgggcgatgagcgagccgccgtgcagcgcaatgatttcatcgcagtatcggctcgccatgttgacgtcgtgcaggaccatgatgacggaaagcccctttgttttcgtcagggtgcgtatgagatcgagcactgcgatctgatgagcgatgtcgagcgccgagattggttcgtccagcaggaagcacctggtatcctgtgcgaccagcacggccagccaggcgcgttgatgctcgccacccgagagcgtctcgacaggacggtcggcgagcgccgtcatgcctgtgaggtcgagcgcttcgtccaccttccttgcgt

SEQ ID NO: 283 - DNA, 23303 bp, synthetic construct
  source 1..23303: mol_type = other DNA
  misc_feature 1..23303: note = Synthetic
gtgatcagaacatcggccgggttcgctgccgggaagctcgacgcttcgccggtcaggatttcggcgatatcggcgttgaccagaaggccggtcggctggttgttgttatcgccggtgccggccacgaatgccgcgccctcggcagtcgcgaaagcttccgcgaactcgcgctgaagctcgccttccagatcataggcgttgtcttccagaagctgggcagaaacgtccgtgtaggtcgccagttcgtgcggcttgatggcgatctgttcgtagctgccctgcgaggccgtgcggttgtcgttctcaccgacccaataggccgtcggcgagccgacgcggcgaggatacttcgtttccggcgcgccgatcgtgacgacgcgcgcatattgccgaatagggctgaattcctttagctgcttgatgagttcggccgcgaacgtctccggtgccaggtatccggcagtcgctgaggtgcccacggttagcgccttgcgctcatcggggtccatctgttccagcccgcgccgggtgtagaggctaaacgccttggtttcgacgttgtcgttgtcggcgaccggctggttgttgttcgcggccacgggccgcttgctcttggcttccagcttgtcgagccgggccttcatggcgtcgaactctttcttgtcgatcaccggctcggctttcgcctcggccttcggctccggctggtcttccttcacttctgcattttccatgtcgatttccttttcgggggacgccgcgccacctgcggacttgactgagtgaatgcgcgcgtccgggtggcacgggttcgcgacgatcgagatttcagagacgtgcagggaatagatgtcgcggccgccgccggggcgtgccttcgtctcgccggcccggaagccgatcgacaggccgttgacgcggccattgcgcagccggccgtatacatcacgggcacgcggcacgccgtcgacgaagagccgccccttcgcctcaaggccggcgtccgtctcgttgaccgactcccatgtgccgacgacacgatcggggtcgtgttcgaacagaatcggcattgccgccgacaccttgaacgcgcccttgtgaatgacatcgccgacccgatcggctgagccgaacggccatgcgatgccggtgatggtgccggtgtcgtcgaccgtgaagctggccttgatttcgagcttatccattggctgtctcgtcgttggcggggtcggcttgggtgtcgccgaagaacgcggattcgaggatcggcacgacgacggtgagcagttcggcgatcggccggttgtcggcatatgccgcgataaggtcagcggcctctttcggtgatgcgccgccgccgatcagcgcccagcggatcgtttctgttagatccgcgatggcgaactcgcgtgcgaagacgatcttgcacagccggccgatgccgtggccggtcgcgcgctcaagctggcgcgtctcgttaagcggcaaggcaaaagggcgctcgccgtcgccgaagaatgcgacgtgcgtcatgcggcttcctcgccgttggcagggttgtcgttgtcggcgggcggcgcgccgggtgtgatgttgggatttgccagcgtgtcgccgccgtcgatcggcggcagattgagcccgctgcgaacctcgttcgccgtcatcgcgcccatctggcgatatgcctgataggtctttgcacgggtcgcggcattcgaagtcaaaaggtcgtcgacgacaaactcgacataatgaccggcagcacgctcttccgacgacagcagcacgcgctgataggctgcttcccattcgtccagccaagggcgtagcgttagcgtcaggaacgattggaacatctcttcggcgttcgaccatgtggcgcgggaaagctcgaaaagcaggtgcggcggcacgcggaacaggcgcgcaatctcgaccacctgttccttgcgcatggtttcgaaaaacgcgggatcaagcggcgagtatttggcttcgtcataggtccagccgccatcaaggaacatcggctcggtgaactggccggacgctgttgccgtgcgataggcttgcttgatcgccttgacttccgccgcgccgctttcgccgcccttggccttttcgtgcttgaagatcgcagtcggtcgagcgccgcctgcgaacacgcggccggcagcctgttcgatgtcgaccgctagaccgatcgactcgcgcccggcagtgatcggcgagatgccaagcggcacttcgacatgcagaatgtcgcgatagtcgtagcggacttcacggccttccttgtcgcgatgcacatagaccggctcgccgctgtcttcgcattcgatcgacgtggcgttcgggtcgagccggatgaactcgacgacgcggccgtcgacacgattggcgaaggcatagccgttgccgcgcaatagcgcgtctgccgtcagttgcgagcgcaacttgccggctgaagtccagtcatttgcctcatcatggacaaggcgataggcgggatgatccttggcggtctgcttgccgccgtccgcttcccggaacagcttcgcgggcaatgagccgatcgcgctggttatgagcgtgaccgctgaatagaccgctggcacgcgaatagcggtcgacgggttgatgttctgaccggaaatcgtcgggctgcttccgaagatttcgaacaccgatgaatcagaaagcggaaccgctttcttttcggttccgctcgctggtagccaactcagaagatcacgccaacgcatatgctacaattccatttcaaggatattgtaacagtgttttagataggaaaatagtctctataattgactaaataggaatcttttccattgattttcgtgatgatttatgatctagcttcgatcgtcggataccgcactttgttcaccaacgtcgcgcgccgcttcagtgagccgctatgttcggttccgtatcggccggtcatcgttggcttgtcgtgtccgacgacggtcccgatttcttcgtccaagaatccggcgtcccgcgctcgaccgatgaacgtatgccgcaagctgtatgtcacgatgtcggtgcccgtcttgacgccgatcttggccagatagcgattgaactcgcgcgagaaggctgccgcgacctgcccttcttcgggaatgtcgacttccgggaacacctgcttgtgcccggcagcggccatgcgctggcaatgctcgacaaagcccagcttggcgagttcgtcgtggatcggcacgacacgcattgagcccttggtcttggttctcttccggccttcgccttcttcggtgatatgcatgatccagacgccgtgagtctgccgcacgtcgtcaacatgcagttgcgcgatctctccgggcctcgccccgctgtagagcattacatagggaatccagtaacggtgatcgcgcactgcgacgttgccgggcttgtcgacatcgcgccaaacgtcacttttgcatgtcgtgaagagcggcgacgtgaacagggcggacagcgcgtcatcggtgaaggtgcggcgcttgttcgccggcccgttctttttcggcagcatgtccgtgaccgggttcgccgctagatagtcgtgcacgacgagccaacgacagaagccgctgaggctggccatgtagcggcggatagtattgcgcgtgatcgcaggcttgggccgctcaagcctgttgttggccgcgatgatctctttgacgctcagcccctcgaacgcggctgtgtctgccgccttgacaggccactgtgtaagcaagtccttccattcgcgcaccatgcgcctgtcgatcttggacacgcgcacgcgcggccctacgaagtcagaaaaatgctgcacgtcgcggcgggcctgcttgaacgtctccggccggatgctattcgggttctcggcttcgtatttgtcgaacagcggcatgatccgctcgccgcccgcgtccggcctgtcgggcatttctgccggctcgaccacgatcgggtcgctaggcttgccggtatagtcgccgcgatcgcgctcggcatttcgctcaagctgctcgatgtcggcgcgcataagcttgtggcaaagctcgcgatagagttcgctgccgttttcgatggtgaagccgtgcttggcgaggaagcgatcggcgtctggttcaatgaggcgcgtgtcgccagacgccagatcagaccgcaatctgtttagccgggctgcccggcgtctcgccgcccacgtagccttgttggcgagagtttcgacttcggccatggcgttgatcatggcgatcggaccagccttgtgagcgcctgagcggatcgcggccactccggccttctcaatggcgtcgtcgatctgcgctgtcgtcggacggctggcgcgttcccgatcgccttcgtccatcttggacgtgtagtgttcccagacggcaccggcgatgtccgcgtcggtcaggtcgcggcgtcgacgcaactcgtcgaaagtcgccatccattcgtcgatcacggccgcctgccggcgcgtggcctccttgcgatccttcgtgcgcagcgaaatccatttctgcttgcagcccatggcggtctgaaggtcggtcgggacgttgagaactacgtagtagacggggccgcgccggtgcaatttcgccatgattttcgcgccgttttcgagggcatctattagcaccatctattagcagtagccgtttcgcaaccccttgaatcataatatttttctgccgcatcaacgacttgagttgccttgaaaccttagtagctgaaagtccaggttccccagccacatctttgaagagctgattttattgtacttttgcgcgaggcgtcgaagcctgcccgtggccggcgccgtgattgtcggacgttgccatagcgccatctcgaccttgatgctgcggggtttcgcgggcggatcggcaccggccgtttccaggaccatccggcctgatttgttcctgggttgctggtgattgcgaaccgcctcgacgggcacttgccggagacggaccgtccctcgcgccccgttacggcggcaaggcgaaccggaacaccgcaccggaaatcgcgcctcccgcgagcgcgccccacacgagcggattgtgcgcgttttcattcgccgtcgagccggcaaacagcagcggcgcgatgcagaccgcaccgatggcaagaccgagccccgcccagccccagaccggccacaaacgcagtttcttgaacccgaaccaggccaccgccgccagcaccagaagacccggcagcgccagaggcaatcccaaaacgaccgtccagaccacgccgagcacgatggcaccagcgcttccgcccccggcgacgagccagaacccgatggtgggtaggccggcggccgcgagccaggccgcgatcgcggcaaagatccagcgccgcgagggtggacgtcgttccagcgctttcatgaatttgacactcccttttcggaaacctcctcgccgatgccggtgcgccgacgcatacatgacgaccggatcgactgggacgcgttccctcaccgtgcctacatgccgtagtcgaccgagaagccggtcacacaaaggtcctcgtcggtctgcccgggataaaccgacgtgatgcgcagctcgaaatagcgcgggtcggcgacgcgccagggaagcgcgatggtctgttccgtggcgttgtcgccgagcacgatttcggccctgcgctgcggttgctccagcccgtaggaaaaggcgaccagttccatcgtgcgtatgcgcgcatgattgcggaaggtttgttgcgacttcgcgtagccgttgcgtatccagaaattttccggcggggcggcgtcctccaagcgcacgatgatggattcgccgatcccgtctccgtcgacgcaccaggccgtggcatcgtcccaatcggtcaggcttcgtatgtcgtagactgtgccgcccctcggctgccgggcgctcgacacgcagatgctctgcgtctcgaaggcctgggtaagacgggtggttgcgcacaattgcccggcctcagccccggccgggccgaacggcaaggcgccaagcatcgacaccccgccgacaagccaaatcaccatgcgtttcatgcgcgtgctccggaacattggcattggtcgcccaaaccatctgcacggcgcggcgggagggcaactagaccagttgcactaatgacccgccggcattcgatgttaagaatccggaacgacgctgcagtggaaagaccatgcctccggttcatatcgtcatcgcggatgaccacccgctttttcgggaaggcttgcgccggctcgtccaaaggacgttgccccatgccgagatcttcgagacgtcgcgcttcgacgccgtcctggcacaggcgcaaaccagggcacccgaccttttcgttctcgacctcaattttcccggcttcgagccccggcggtcgatcgcggcgctgcgcagcgcgtttccaaccgcctccgtcctcatcatctccatgtcggacgacgacgacacgatcgaaactgtcatgaaggacggggccgacggtttcgtcagcaaggcgatcaatcccgcggcaatcgccggcgccgtgcgcgacatactcgaggggcagatcgtcattctggggccgcacgacgccgacgacgacatccaggagaacgcttccccgagcgccgccgaattgccaccccggcaaagggaggtgctccagctgatcgtacagggaaaatcgaacaaggagatcgcgcgggaactggacatttcccccttcacggtccgcatccacgtttcggccctgcttcgcacgctcggcgtgccgtcccgcgcggcggccgccgcgctcgggcgcgacatggggttttgaggcacggcgcagagcaatttcggcaagggtgcgaaacggcttccgcgcccgcaattccatgaaatagatagcgagaccctctgtgcgatccgggtctcgccggatatgctctaatcgcgggtgctcagggcaagcgagaccagcgatgcccgcaactgcgcgggcggggcgggttttgcgagaagctgcacgtcgtcgagcccggcaatacccaacgcctcgtgatccagcgtgccactgacgacgatggccgggacggttttgccggcctgttcgcggatggccgttatcgcctgcgcggcattctcgttgccattcatgccatgattcagcaggatcaggcccggcttcgatcggcccaggcgcgcggccgagccttccggcgcaaccacgcagccccagttctccagcagcacctcggtcgcctttcgcgtatcgccatcgcgatcgacgagatagacttccagtcccgaaagcagatgcgcggccgtccagcggcccttgaccgcttcgcgacaggcagcgacccgcttcatggcgccgatttcgaccagcgttccatgtccgggcctggtttccagccggcaatcatggccgagaagttcggcgaaacggacgaccagcggcaatcccaggcccaagccctgcacgcgttcggcgtcgtcgcccgatcggtagaattcgtcgaatatgcgtggcctgtcggcttcaccgatccccggcccctggtccgccaccacgacggcgatgccgtttttcctgtgccgcacacccatcagcaccgtgctgcccggcgcgtatttcgcggcgttcgagatcaggttttgaagcatggtcgtgagaagccgcgggtcggtctcgacccagacactggtcggcgaaacgacaatcgccccgcccatgcgttcgacaagcggcatgttctgcttggcgagacgattaaggacggcgttgaggtcgacggcctccgtcgaaaccctcatccgccccagatccaggatcgaaaaatcgagcagggactggaacagctcgctgagcgaggtcaacgacaggtcgatcttgccgacgatgtcgcgggcgtcccggtcgagttcgttttcgcgcaacaggctgatcagcagattcatcgtgtgcaccggctggcgcagatcgtggcttgcgtgggcgaggaaacgcgtcctggcctcctgggccatgtcggcgcgttttttttcgtatcgcaattgatgaacctgccggtcgagcctctcgacaagcgcatggttggaggccacgaaccggtgcattcgcgtggcgaggatggtgagcaccgcgccgtagaggacgatcatggccgcattcgcctggcccagcctcgtcgcatccaaggccagatgcgcggccgccaggccggggaccgacgtccagatgctgagcaggcacgatcgcatcaccgcgtgctgcgacgacacggcgccgagcgccgtcccacccagcgccagcgtgtagagaagcaggttgtcgaaccccgcttcggcggccacgaacgccccccaggcccacagcagcccgacggtcgcggtcagcgcggaatgaaaccaggcggcgatcgcgagcgcgcgcggcgggacgtccggcaggcgctggccatactggcacagtcctgcaagcacgagtgaaagagtaatcatgccggtcagccacgcctgggccgccagtgacaggttctgctgcgccacaaacgcaagcaggacgacaaagacatggatcagccagcttctggcgccgatcgaaaacaggtaacgggtcttccacggctcgggagacagaagccccgcaaccgttatgcctggcgcgcgcgccgcgccgccgacactttccttcgcaccgtccaaaatgccccgtcgccctgtgtccgaacctgtggcccgcaacgtttgcgaccatgcatcgtcacgggccgggttccgctcaccctagagacggtttgtggcaggaatcaacccgcggcagcggcccggcgatcgaccgcgccagtcaaggcacgaccaacggccaaacgacgcgcgccgccccccctcatcgggccgcgcagacgcgtcgatgccggcgacggcaggcgcaagttcaattagtgcagccgacctaattgtgtgccgctgccgatttcgtttctttcgcaccgtcgaaaacacaaggacggagttctgccatgacactcaacctggacaacacaaaacgcctcgcagccgccgccgcgctggcctcgttcacgcttgccttcacaggctcggcgcatgcgggcagctacaagctgagctgtgtcgattcggtcaccgggcagtccgtctcggtcaccgtcgaggcatcctcgcgcgccgccgcgatcgacaaggtccgcaacgacccggcctattcgaattacgacaagtgccagtaagacggcgtgaccgcgcagccgggcctacacggcattcggcgatgcgtgtgggctgacgggccggccccgtcagtcccgccttgttcgccctgcctggcggtgtgccggtgccggcccgccaaagcccgccagcgggctcttgcccaaacgccgttaaataaaacgcgtcggctccatcgcgctgcggcaggcatgcggcagctcatttcgggcccgcgcccgatgtggcggctcccgcacggacgatccggcgcccagcgcccaggcgtttcccgccccgccatatgacggcgcgactgccgagagaccaaacaaaagcgcccgccctttctgcaagcaggaggtgcgagcgccttatctggtgctatctcagcttgttaacggctggactgcgatttctgaacgcttgttccctagttcatcaaagacccgaaatcaaacaaaaaggagaggccgcccccctccttcaacccgggttcagaaatcgcagaccaaccgtaatcacacgctcggccttgcttaatccaatgaagcaagagaatagtataattgcaattgaaacgcggtgaaacgcgcgtccgccgcgattgatcgctttgcgtatctcttatttccgggaacgatctggaaacccaggcacaaaattgatttatgagaccaaattgtcatccagctaaaaatacatagaacataaggggagcaaaaatgaggacactcggcctcgatctcggcaccaactccctcggctgggcgatcattgaaacgcgcggcgagccaggtgagggtgacgagggccgcatcgtcgagtgcggggtgcgcatcttctcccaagccgagatggcggggcgcgacccgcagtcgaaggcctcactggccgttgcccggcgcgaggcgcgcggcgcgcggcggcgacgcgaccgctatctgaaacgccggcagcgcctgctcgatctgctgacacaatacgggctgatgccggccgacgacaaggcgcgcgcggcgctggtgcgcgaccatggcgatggcgcgggcggcgatctgtcgacgtccgtctatgcgttgcgcgcccgggcgctcgacaaggcgctgacgccgcacgagatcggccgcgcgattttccacctcaaccagcgccgtgggttcaagagcaacaggaaaaccgacagcaacgatgccgaacagggcaagatcgcgacagccatcagcgctttggacgcgcagatgatggaggcaaaggcgcgcaccttcggcgaatggctgcacatgcgccgcgcgcgcgggctgtcggtgcgcgcacgcatgaccgccgacggcaagggttacgatttctacccctcgcgcgccgcactggaacgcgaattcgacctgatcatgcgttgccagaagcgcttccatccgaagctgctggacgatgccgtggtcgacaatattcgcgacacggtgtttttccagcgcccgctgaagccggtgaaaccgggcaaatgttcctacaatccggccgaaagccggctcgccagggcgcatccgctgttccagaaattccggcttttgaaagagatcaacgagctggagatcatcggcgaggaccagcggcatatcaagctggcgccggaacagcgcgacatcctggtgctggcgctgcgcaccggcctcaacaagcagggcaagatgccgttctccaaactgaagaagcagcttggcctcggcaaggaggtgcgtttcaacaaggagacggacaaccgcaccgacctcgaaggcgatgtgatccattttcgcatgacgcggccggactgtttcggcacccgatgggctgacatgccggcggacgagcaggcgaaagtcagcgaaatgctgcgcaccgagcccgaccacacgcaactcgtgcaatggctgcgcacgcaggccgggctggacgaggcgcgcgcgaaagcggtggccgacattccgattcccgacggcttcggccggctcggtccgtcggcgctggccgcgctcatcgacgcaatggaaaacgaggtcgacgagaacggttttgtcatcaccgaggcggcggctgcgaaaaaagtttacggccggaccaattccgaagtcgatccgaaccgtcggggcgccgcgcgcttgccgaaataccaagacgttctggaacgccacattccgccgggaaccggggagccggacgatccctacgacgagcgcatgggccgcatcaccaatccgacggtgcacatcgcgctgaatcagttgcgccgggtggtcaacgcgttgatcgccaggcacggcaagccggatcgcatcgccatcgaggtcggccgcgagttgaagctgaacgagaagcagcgcgaggaaatcaaccgaaccatcggccgcaacaccaaggcggcgatcgaacgcggtaagaaactggtcgagacccatggccaggcgaataccggttacaaccgtctgcggctggaattgtgggaggagttgaaccagaagccggagaaccgcgtctgcacctattgcggcaagccgattgcatgccacatgctcttcaacggggagagcgatatcgatcacatcctgccctattcgaagacgctggacgacagcaaggcgaaccggctgctgtgctgcacggcgtgcaatcgcgagaagaagaaccgcgcgcccgccgacgtaccgcaatggaaggcgcgctatcccgagatcctcgcccgcgcggccacgctgccgaagaacaaacagtggcggtttgccgaggacgcgatggcgcgtttcggcgaggaggaaggtttcctcgcccggcagctgatcgacatgcaatatatttcgcgcctggccttgacctatctggcgagcctctacggggccgagcaggtcgacccggacggggttttcaagcgccattcgcgggtacgggccctgcccggtcggatgaccgagatgctgcgccggcaatgggacctcaacgccctgctctacgaccacaacatcgccggcgccgacgtgaccaaaccgaaaaaccgtctcgaccatcggcaccacgccatcgacgcggtggtgatcgcgtgtaccacccggtccctgatccagaaactggcgaccgcctcggcctccgccgaggaacgcggcgcggagcgcgtggtggaaaggatcgcgccgccctggccctgtttccgcgacgatctgcgcaaggccgtccacgacatcaccgtctcccacaagccggatcacggcaccgtcggccgcgccggttatgccaagggccgcgggcagactgccggaaagctgcacaacgataccgcctatggcccgaccgggcagaaggacgagaaaggcaacgatctggtcgtgcgccgtatcgcgatcaccgacatcaagaagcctggcgacatcatgaagatccgcgccaacgaccatggccactcggaactgcgcgaccggctgtgggaggccacgcgcgatcttgagggcaaggccttcgaggaggccgtgctgaatttcgtgagcaacgacgccaagttcaaatccatccgccatgtgcgcgtcgtcgagccgttgaagacgatcccgatccgcgaccgcaaggggcgggtctacaaaggctacaagggcgacagcaatcacagcttcgacgtgtggcagggaccggacggcaagtgggcgagcgaagtcgtgtccaccttcgatgcccaccagcccggttggcagtcggcgatacgattgcagcatcccaccgccaagaaagtgctgagcctcaagcagggcgacatggtcgctctcgatggcgagaacggtcgccgcatcctgcgcgtggtgaagttctcggaagccggttcgttgacactggccgaccacaacgaggccggctccctgaaggggcgcgatgccgacaagggcgaccccttcaaatatgtctatctcagtgcgtccagcctgagaaagaacagggcgcgccaagtgcgcatcgacgagatcggccaagtgctcgatcccggcgcctggtgggaaaggcgcgacggttaaccaaaggcacagcctcgccgggcgcgcgacacgctaaagtggtaggtttcggccatgctgcgcgtggttgatctgtccagcgaaggcctgcatgtggccgttcatcgcggctttctcacggtccgccgggaccgcgaggaggtcgggcgcatcgcgctcgacgatattggcggcgtcatcgcccacgcgcacggtctgacctggtccaataccgtgttcactcgcctttcggaacgggctgttcccgtcgtcctgtgcgcgcagaaccatgctccggtggcctgcgtctggccggtggcaggcaaccacctgcagggcgcgcggctgaacgcgcaggcaaatgcgccgcgtccgctggccaagcgcatatggcgcgacatcgtcgtggcgaaaatacgcatgcagggttcggtactggcctcagtcggcgcggagccgggcgctttcgccatgctggcgcgtaaagtacgctccggcgacccggacaatgtcgaggcccaggctgcgcggcgctattggcaagcgctcatgggaccggatttccgccgcgaccgggcggcggagggtgccaattccctgctcaattacggctataccgtgctacgcgcgacgctgagccgggcgatctgcgcggccgggcttcacccctccattggacttcatcatgccaatcgcggcaatgcgttcgcgctcgccgacgacctgatggagccttatcgcccgcttgtcgaccgggccgtctacaatctggtgcaggatggttgcctggatgtctcctcccaggccaagtccgcgcttgcggccctgaccgcccttgacctgctcgcgccgcgcgggatgagcccgcttcacgttcacgccgcgcgcctcgcccagcaacttgcaggccgatcttgcggcgccgaagacgatttcgacctgcccgtgccaccggaaccgctgacgatggcgggcctggcgcgtcggggcgacgcgacatgaccacgctttatacgcagaaacggggagagcggacgcagccgtcctatatgtccgcttacaggctgatgtggatgctcgtgactttcgacttgccggtagacacgaaaaagcaccgggcgcaggcgacaaaattccgcggattcctgctcgatcaaggctttgagatgagccagctttcgaactatcttaggctggtcaacgggcaggaccagttcgacacctatgctcggcgcatcgaatgcaaccttccagagcgcggcgatgtctttatctttcagtttaccgaccgccaatatgaaaacatcgtcagatttagcgatcaaagccgccgaatccgcaagaaaaacccggaacaaatcgcccttttctagcaaaaatgacgtgttttgcagccggatccccccccaaaatccctgccggaacagagttttggggcgtcatccaggctagcagttcagaaatcgcaggccaaccgcaacggtcgggctctgcaatgcaagcccggcgtcaggctagcagttcagaaatcgcaggccaaccgcaaccacgcgcgggcgtcaccaatccggctctccaggctagcagttcagaaatcgcaggccaaccgcaacaggggggcgagccccatcagccccatggtcaggctagcagttcagaaatcgcaggccaaccgcaaccgctggacgaatggatgggcgctatgatcgaggctagcagttcagaaatcgcaggccaaccgcaacggcgcgaggatgcggtagccggcagccatcaggctagcagttcagaaatcgcaggccaaccgcaacccgcatctcgatgctcctgccgggcctcggaggctagcagttcagaaatcgcaggccaaccgcaacatagtaacgtccgcgaagatgacgcggttgaggctagcagttcagaaatcgcaggccaaccgcaaccgagcgtgccccataccgatttgacggtcgaggctagcagttcagaaatcgcaggccaaccgcaacatgcgccccgttcaagaacgtgtgtgggtgaggctagcagttcagaaatcgcaggccaaccgcaacatgtggacttgtcggtaaaccgctgcgagcaggctagcagttcagaaatcgcaggccaaccgcaacaatgaaagcggcgccccgttgtaggtttcaaggctagcagttcagaaatcgcaggccaaccgcaactgcagtgcctggcgatagcatccatttcggaggctagcagttcagaaatcgcaggccaaccgcaacgaaaaagggttccaaggtttatgtggaaggaggctagcagttcagaaatcgcaggccaaccgcaacatgaaggagaggtaggggcgtgcagcgacgaggctagcagttcagaaatcgcaggccaaccgcaacccggtcacgtagctggcggggcgaaactcgaggctagcagttcagaaatcgcaggccaaccgcaacgattggccgttgaacgtcgttgaaagtgtcaggctagcagttcagaaatcgcaggccaaccgcaacggaaaccggcagcattcgcgccgatgccccaggctagcagttcagaaatcgcaggccaaccgcaacggatggcgcgagccatctcacgcttcaacgaggctagcagttcagaaatcgcaggccaaccgcaacgccccggccacgttttcgccttcaatttcgaggctagcagttcagaaatcgcaggccaaccgcaaccacgtaagtcttcctgtgtcacatgcgagtaggccagcagttcagaaatcgcaggccaaccgcgacagcgggagaggtcgccccgccggtggaggccgggttccaggcacggcgatggcgcttcaggccggtgcggcacctttttcctgcggtgcggccagcagcgccgcgccgacgaggcccgattcggggccgagcccggccacccgcagctcagggcacagtggcgccgggcgccacaggcttgcgtcgagcgcgcgcctgcatgcggcgagataggtcgggctcgccgacggcatcccgccgcccagaacgaccacttcgggatcgagcacattggccaggaagcccagtgcgcggcccagcagcgcgccggcgccggcgacaacaccgtgcgcgcccggctcgttcgcttccgcctcggcgatcagcgcggccacggatggcacggccaggccggccgcacgcgcgcgcgccaacatgcccgcgccgccggcaatgtcttcgacgctgagcggctcgcggcgcgcgtcctcctcgaccaggtggctcatgccaagccccatcgcccggccgcgacaccctaaataaggcacggcgccgcgcatcacgacgctggcaatgccggtcccggcattggcgtaaagccagtcgcccagtccgcgtccgacgccgaaacacgcctcggccacggccgcggcgcggacatcggaatcgatcgtcaaggccggcgcgaacgaaaaggccgcgcgcaactccgccgtcgtccacggaacgcgatgggcgctgacgatctcgccggccgtatcgacggcctcgcagatgccgacccccagcggaaccgcggcatcagccgacagcgcccgcgcctcgtcggccacacggcggagaaaatcgctcccggcacgcgcgcgcgccggggtttccaaccgcacggtacggtcgacccgtccgctgacggtgtcgaccagaccgatgacggtcttgctgccgccgacgtcgataccgattgcgttcatgcgccgtcagctcacacgcccttgtcgcccagtccggggccgacaccgaagacgaagcttgccggttcgccgcgcagattggcgtattggtggcgcgtgccgtcgggaaagaagaagccgtcgcccggattgagctcgaaccagacctggccttccctgtccgggcacaggacatgcaggcagcccgaaagcacatagagacattcgtcgcccttgcgggtgatcatcgaggatttgcgcccaggcagcacggtcgtcttgccgctttccagatgttccgtggccgcgtaaaggccggtgatgacaccctgatcctcggggtcgagttcccaaagcaggtccgcgtcgcgcaaggtcttgatggtcgcggtctgcttttcctcgtcggcggccatcggccagcggccgatgaaacgctcctggcgataggtcgactgttcgagatagggacgggtgcgggcatagacgcccgacgtgccggtcgacggcggcggcgagaaatattcgagcacgcgcaccggcttgtcggacaggctgaaaccgtgatgccaggtgtccttgcggaagaagatcgcctcgccttcctggacgatgcgaacctcgccggtttccggattggccgcgccgaacgtgcccgacagcacgtaaagcacctcgtcggcgccgaacacggtgcggtaatcttccgaatgtttgaaacccgtgccgccggccaggctgaagacgagctggtggatcttgtcggtggaggcgtagatcaggtcgtcgaccagtccggctccggcatcgccccacacatgacgcgtaacctcggcataggggatgtgggtcggcctgtcgaaaacaggccgcggcgacgatttgtagcccattggaaactctccgctgaagggtgtttcaaggcgcgagcggatcgccccttgtttttgtaccgtccggacagtacaaagaactatgagcaagcgcaagacctctcatccgacggtccaaaaattgctggacaccgccgagaccatcgtcgccagggacggcctcgtcggcctcacctacgaccgggtttcgaaggatgccggcgtcgccaagggcacggtgctttatcacttcgcctcgaaggaagacctcatcaccgcgatgatcgaacggctggtgtcgcgcttcgacgccgcgctgtcgcacgcgatgggctccgatcccgacgcgagcggacgggccgtgcgcgcctatatcgcagccacccacgaaggcgacgccttcaccggggaatatttcgaccgggtgaacggcgccatcaccgccgcgctcgccaacacgcccgaacggcttgccgccgtccaggcccagggccgccgccaccaggacgccatcatcgccgactcgcccgatcccgtgctcgccacgatcgtgcgcatggcgatcgacggcctgtggttctcggaaagcctcggcctgatgaactacgaccccatgctcaaggcggcggttctcgcccgcctgaagtcatggacctacggcaaggagacgcctgccgcccgcaacacaccccaggaacaacaacagggagaaaagaatgcaacgtaatcacgccaaaccgcgccacggcctcgaccgccgcagcttcatcgccgccggcaccgcggccgcggcaatgctgacgcttccgcgttcggccatggccgccacgcaattgtcgtggatcggatggcaaggctacgatgcccccctcaaggccgatgactttctgaagaacaacgacatcgacctgtcgaccacctatatcagctcgaacgaggagatcatcaccaagctgcaggccggcggggccggtcaactcgacctgatctcgatctatttcgggcacatcccgatcctggccaatgccgggctggtcgaacccatcgacgaagcgcgcgtgccgggcatcgagaaaatcttccccgaattcctcgacgtcgacacgatccgcaaggacggcaagctctacgccgtgcccttcacctggggcaccttgtcgatggtctacgatcccgccgcgatcgccaaaccggcctcgtggaaggactgcctgaaggacgaatacaagggcaaggtctcgcttaccgacgacattaccggcctgatctcgacctgggcgccgatcgtcaccggcaccaagacgccgacccgcctgacgccggatgagctgaagcagacgatcgactttctgatcaagatcaagcgcgagcacgcccgcaccctgtcgcccaactacggcgaggcgaccgacctttacgctcgcggcgaggtcgtcatttcggcgatcggctgggacgcgcaggtggccttcgccgccgaaaaggacaagcaactggctttcgtacgcccgcaggaaggcgtgatggtcttcatggatacgctggccattccgagcggtgcgcccaaccgcgacgccgcctacaaggcactgtcgcaggcgatctcggcgagcggacagacggtgatggcgtccgatctcacccaggccgtcgtcagcagcgacgccgtcccgctggtcgatcaggtcaaccgcgaagtctatcagtacggcgacttcgaaagcctgttccaaagtgcccgcttcaacccgttctggccgctgcaggacgacggcgagcacgccagctacgaccagatccaagaagagtaccagcgcttcctgcgagcctgatcgatgcacgcaacggcaccccaagacccgatcctgcttctggcgggattgggccgacgctacggccagagcgacgtggtcaaggatatcgagcttgcgatcccgcgcggatcgttcacctcgatcctcggcccgtccggctgtggaaagtcgacattgttgcggatgatcggcggcctgacgctgccgacttccggccggatcgagatcgacggcgaggacgtcacctacctgccgccgcagaagcgccccaccaacaccgtgttccagagccacggcctgtttgcacatatgagcgtgcgcgaaaacgtcgccttcggcctgtcgctcgcccgacgcccgcgcgaggagatcgccgagcgggtggtcgacgcgctgaagctggtcaggctcagcggcttcgaagaccgccccgtcgatcggctgtccggtggccagcagcagcgcgtggcgctggcgcgcgcgctggtgatgcgccccaagatcctgctgctcgacgaaccgctctccgccctcgacctcaaactgcgccaggcgatgcaggaggagttgcgcgccatccatcaggacgccggcggcaccttcatcttcgtcacccacgatcaggccgaggccttcgcgctcggtgaccgcctcatcgtcatgaacaagggccggatcgaacaggcaggaccgcccggcgaggtctatgcgcgtccgcgcagccggtttgcggccgaattcgtcggcgacgccaattttctggccggcgagcgcaaaaacgggcgggtcgcgctcgctatcggcgtagaattcgacctggccggcccggacggtccgctgcacctcatgctgcgccccgaggcggcgcgcctgcacaccaccgacaagggcgggcccgaagacggccggctccgtgtcgcgggcaacattgtggagatcgtggatctcggcccattcgcccaatgcgtcctcgaactggaaggcgggcacaggatcgagattgccggcatccccagaaccatggtcgacgagatcgccgtcggcggcagggtcacggcaagctggcccgaggccgccatggtcgacgtggcgccatgaccggcgcacgcatgccctcgcgtcgcctgcgcgccgttctgcttgccgcccccgccttcgcgatcctggcggtgctgttcgcagtgccgatgctgctgcttttcgtcgtgagtttctggcgcgtgcgcaatttcgcgctgacacccgacatgtccctggccgcctacgcccgcgtcttcgacacgtatggcgacgtgctcgtctcgacgatgataaacgggggcctgaccgcgctgatctgcgtcgggctcggcttcctgttcgcctatgccgcacgctttcgcgccggccgctggggcgatgccctcatcctcgtggcgatcgtcacgcttttcggcggctatctggtcaagatctacgcctggaaggcgatcctgagcacggacggcttcctgaatgccatcctgatcgcgtccgggctgagcgcccagccgctcgacacgctgctctacaatcgcggcgccgtgatcgtggcgctggtgcacttcctgctgcccttcgccatcctgccgatctacggccagttgcgcaacgtgagcgacatccagatcgaagccgcgcacgacctgggggcaagcgggcgccaaacgttgatgcgcgtcatcgttccgcaatgcagaaccgggctgttcgccgccttcgcgatctcgtttctctacgccgccggcgactacatcacgccacgctttctgggcggcgggtcgggctcgatgatcggccagttcatcgcccaggaattctcgacccgtttcaactggcccgccggcgcggcgatgtcgttcgtgctgatggcggcgagcctgttggtgcttgggctggtgggcgccctattcgtcaggagaagaccgtcttgagaccgcttggcgctgtcctctggttcgccgtgatcgcgacactggtgctgttcatgctcggcccgctggcaatcgtcgtggtgttttcgttcaattccggggcgctggtcagcctgccgctgaccggtttcagcctcgactggtaccggacgctgttttcgtcggccgagttctgggccgcgttccagaacagtctcgccgtggcggtgccgaccgcgttgctggcgacggtaaccggcacgatgacggcccttgctctcacccgcaagagcgcagcggcgagcgtcccgctgctgacggcgctttcggtgccgatcatgatcccgccgctcgtcgtggcgatcggacttgtcgtgctttacgtgcgctggctgtcggtgccgctcgggctcggcgccgtgatcggcgggcacctgcttttgacccagccgctggtcgcactggtcgtcagtgcccgcatggcgagcttcgaccgggtcgcgctggaggcggcgcgcgacctcggcgcgagcccgtggcaggccttccggcacgtcacgctgccacagatcagggcagcgctggtcggcgcggcgctgctggccttcgccatctcgctcgacgaattcatcatcacgatcttcacgatcgggtccggcaacacgctgtcgaccttcgtctggggcaagatgcgcacctcgctcgacccctccatcaacgcgatcgccaccctgcttctcgtcatcacgatcggctcgaccgcgatcgcgttgcggatgacgcgctatcgcggctgagcggaacgcggccgccgacgcccctcaatagcggcgttcgaacaacggcgtcttgcgtgtcgccttctcgaacgtgcccggcggcacgaattcgatctgcggattgatttttagggtgcggtgcagcgcagccgcgatgcggcgaccaagatcctcgagatcgccggcaccggtttcgggggcatgttcgatccgcagtccgagcggcggaagcacggtcggcggcggcgcgttgagcacgatgcgcatgtcgccggtgacggcgggggcgaactcgctgacgaccgacttgatcgcggccggatagacgttgacgcccttgacgatcagcatgtcgtcggagcggccgacgagcttgacgcgcggcccgcgaaagccgcaggacggacattcatcgagcagaagctgaacgatatcgccataggcgtatttgatcgtcggacaggcctcgcgctgaagcgatgtgtggaccatctcgccgatcgccccatgcacgagatcgaccggcgcgcgggtcaccggatcgatcagatcctgatagctggtgcacagttcgggcgcgatgccgtgcaggccgtgataggcctcgctgtcgcaggaatggcccgaggcatggccggccggcgtccacacgtcataggcacgggcgccgtatgtctcctcgatgcgcgcctttacgcccgggatcgtcgcccagctttcgccggtcaggatcagcccgcgcaaccccagatcgccaacctccatgccgatgatctccggcgcccgcgcggcgagatattcggccagcgagggcgtgcaggacagccattgcggccgcgtcagcgctgccatgcgcagcatcacctccgtacccgcgcgcgcgtcgatgtcg

SEQ ID NO: 284 - DNA, 23282 bp, synthetic construct
  source 1..23282: mol_type = other DNA
  misc_feature 1..23282: note = Synthetic
tgcgctggatcgtctggggcaggagcgtcctgtcgtcgaaggcgatcgagacatcgtcgaatatcaggcccagcaacggtttcaactcgctcatgacgggcttaaggtagagttcgcgcgcgctggagcgggcctcgtccagcgtcgcggaaagcttttgcaggacggccacttccgtctcgaacgcctttacgcgggcctcggtggcgcgtagccgctcggcggtctcgcgccatgtctcttccaccgcctcgtcggattgcgtgcgaatctcggcgttcaggccggagatcgtttcccgcagcgcgttgatttccttcgtcgcggcttcgtcgaccgagcgtgttcgcctgagcgtcgcctcggcggattccaggtcgatcgccgcgttgcgcaatttttccgcatccgcctcggcagcggcgcatatccggtcgcgttcggcgaaggcgtcggacagggcgcgcgcgtggtcctcacggtggtcttcggggccgagaaaggcctcgatctgccccgcttcggcgttgatggcggccagagccgtctccatagtcatgaaagcgttgtcggcgctcgctcgcagcggctccgcttcgcgcagggactgcctggccgcggtgcggcgttcctcggcttgagtaagcaaggcgcggacctgcgtggggtcttccttcagttccaaaccgtccgccgcattgatcatggcgtcggcggcgatctgctcgcgcagcgtcgccagaccttcaggcgcgagaagcgacagccggccccgcaattcgcccagttcggcggcgatctgttgcgcgtgaagatgttcggcgcgcgccgccgcaaggctttcggcgtccattgcggcgagcagcttgcggcgtttgtcttccgcctgcttcaggcggtcgtcgttccgggctgggcggtgcgagcgcagggtgatggcgccgaggcccggtatcgaaagctgcgcctgttcgtcatagccgcacgcctcgccatccgtcagcggagcgccgtccatcgtgacgcggcctgtcgctcccagttcgtagcgcaccgtgaccgtcggacgggcggcttcttcgagcgcgcgcagtttcgcgatctcgatttcgagggtctgcagttcttcgatggtggccggcgtcgccttgatgagcgccagcttcgcttcgccttcttcgaccgcgcggcggaaggcttccgccttgtcgagccgttccttccgttcggcgaggcgttcccatgcttcacgcgctttcagcaccgtctccagccgcgccagccggtcccgcatttcctgctcgccggtctcggcagcctcgatggccattcgcgccttttctatcgtctccgcggcttggcggcgcttggcgacgatttcggcgtggcttttctccgcctcctgccgcttcaagcgaagcgccttcgccttttccagattgtccgtgaaggttttgagttcgcgcccggcggcgtcccggcgctctcgcgccaaccgcaattcagcctcggccagtttcagcgcgtcgctatgcgccttcgcggcgtcgaaagccgcctgcgccgcctcgatcgcctttctccgcgcatccctgtcttcagccccgtcgatttcggccagacgcttctgggccgccgtccgctcatccagcgcgctgcgcaggcgaccgacatcgtccgccagtcgccgctcctgcaaggcgagggcgtcgcgcgtatcgatcgccgcggcgtagcgcccaccggatttcggcctgcctgtgggggtgacgagttcggcgagcgcgctagcggccgcggccatgacgcctgccatgcgtcgtccgccggtgacggcctcgacctcgccctgaacggattcgagcaggctggcccggacctgcttttcgctttcttcttccgaacgcgtgcgtttttcgaggccggtcaggccttgccgcacccacaacaggccagtcggtcccgcgacgccgccctggatcaggcgggcgatgaaattttccgcctcgtccgcctgcgccagcagccggcccgtcttcagatcgaccacgcgcgccgagcggccgctataatattgcttggtgatgcggaagcggccttccccggtcgcgatgtcgacctccaccagggggctgccgccgctatagggccgcaagcgctgcacttcggcggggacgccggtatgcggctggaaaaacagcgcgtgcaacgcttcgaagctggtcgatttgccgtattcattggccgcgcacagcacgttgacgccgtcgccgatgccttcgatggcgacgccgcgtccggcgaaacgcttgacgttgaacaggcgcagcgccgagattttcatgacgtcaccgtttgcgcataggaataaagacgcgccagcgcggcgcggctgatttcgcgctcctgcgcggagcggctttcgtcctcggcctcggccagaagcctatcggccgcgtcgcgcagcgcgccggcacagtcgatcaggtcgagatcctcgacggcgtattccgttgcaaggccggtttcgtccagctccagaaaggcgaaatccggctccgcctggttgatggcttcggcgagcgccgagcgggcggggaggcggctgcggccggtcgcgacgacgcgggcgagcgtctgccggcggcggcgcgcttccggcagcagggccgccagcgcgggaaggggatcgtcgccgtcgagcaggtgcagctccagcgtgcgccagtcgaagctcgccgtctgcaatggtgtcgcttccggcggcgcggatgggccggcgatgttcaccaacagggcggttcccggccggtcgtgcttgaagcggtccggttcgggcgttccgctgtagcgggtccgcgcgtcgacctcgaccgcgccgtgccagtcgccgagcgccagataatccagccccgcgcgccgcgcccggtccggcgtgatgacgtcggatgcgctcgcttcttccgaaaaattctggaccgcgccatgggccagcccgattcggatcgcgccgtccggcgtcgccgcgccgtccatccattcggtcaggtcgcggccgggccgtcgcgtcgtgcagggcgcgggaaggagaatgacatcctgcgtgagaaggattggccggggctcggtggcgagaataacgttttcgggcgcttcggccttgagcgtcgcccaaagctgcattgcctggagcgaatcgtggttgccggggaggatcacccatcgaacgtccgcatgatgcgccatttcggccagcgcctgccgccggacgtccgccgccggcgtctcggcgtcgaacgtgtcgccggcgagaaggacgatgggcgcgccctgctcccgcgcatggccggcgagccgtgcgataaccgcatgccgcgcctcgcgcagccggctcggcaggtcgcccgagaaatttccgaaacgcttgcccagatgcagatcgctcgaatggatgaagcggaacattgctatcctgaaggttgagaggttgcgatatgccggcgggctctggcgatcgcctcgtcgaggcgcgcacgggagacggcggttagacgctccacacccagcagccgggcaaggtcccgcgccggatcgggttcatccagcaagccgggattgtcgagcgccgcggcggcgagttcggcgagcggcatatctccgatggatcgacgcgtggcctcgtcagctggttgccggcagggtaggatatcggcgatggttccttttctccagataaattctccgctcgattccatggtcctgtccgtatcgcgcagatgaagatcgatgcgttcgcggatttttggacccgttcgcagccagccatgggcacgcgcgatgcgctgtgcaaggacatcggcgcgcaaggggctttcaacctcgatcaccgccttgatcatgtcgcgcagtacgtcccggtagcccaattcaaaaaaccgatcgggatcggtcggaaagaccgagagatcggagatgcggtataggcacgtggcggcgtccgtaccttgggatatgtatgtcgccggttcctcgcaaacgccgtaagccgccatcatcttcgccggcgcaaaatcggcctcggcgaccaccggcggcggaagcggatcaaaagaggcgtcgtcggcgatttcctcctctgcctccatttcggattccgtctcgtgaggagaggcgctctcctcctgttctgcggcatgacgagacctgctatcctttagcagcacttcaaggctggcatgcagccgctccgcgcagccgatggcgtcgaaccaccaatcggtcgaccagacccttaggatgttccaacccaggcccttcaacacctgttcgcggaccttgtcacggtcccgcgctgtagccgaactgtgataggcggctccgtcgcattccacgccggccagataaccacctgcccggtcgggatggaggacgccaagatcgatccggaagccggaaacgcccacctgcggcgtgacgatccagccacgttgccgcaattgctcggcgacggcctcctcgaagggcgattcgaaatcgccgtccgtcacggtttcggccgcaggcagagcgatcgcgccgcgttcggcgtagtcgaggaaagtcttcagatggtgcacggccagcgccttggtgcggcggggatcgatctggtctgcggtgaagccggagaagacgacgagctcctgtcgcgcacgggtgacggcgacgttgagacgtcgctcgccgccgtcgcgattgagcgcgccgaaatccatcgccagcttgccggcggcgtccttccagaaggtgatcgagaacagtatgacgtcgcgttcgtcaccctgcacgttctccaggttcttgacgatggtcggttcgacgcgctcttcggtgaagaaccattccagctccgggtcgcgccgacgttcagcgtcgagaagatcgagaatgagcgattgttgctgggcgttgaaggtaatcacgcccagtgtcggacgcgcctcttccggttgtttcaaccagctcttcatgcgggaaatcgcctcctgcacgacagcttccgcctcgatgcggttggtccggctcttgccacggtcatagacgccgttcgcaactttgtgcaaccgtacagcgcggtcctcgacaacgggcgaagggaaggtgaccagctggttcttatagtaatgatggttggagaaggcgatcagcgactcgctccggctgcgataatgccatttcaggtcacgcaaggggacaccagcggcccggacctcatcgagaatgctctccagatcctgctcgtgctcgaccacgtcctcctcgtcttcgttgcggccgaagaagttcgtcggcggcaattgcttcggatcgccgacgatgacggtctgcctcgcccgcgcgatcgcgcccaccgcgtcccaggtagtgatctgcgaggcttcgtcgaagatcaccacgtcgaacagcgcctggtcgggcggcaggtactgggcgatggaaagcggcgacatcagcatgcagggcgcgagcctggaaaagctttgcggcatcttgccgatcatgtcgcgtatcgattggctcggccgttgcagctccatctggtggcgcagcagtccaagctcggaattacgcgaaacgtcctgcacggagggcaatccatgcgcgaccgcgccgatgacgcgccggctggcgtgcgagcgcaccagatcgtcgatctcgcggaattcctggatggcgttctcatgctggaagcggcggaaatcgcgcaaaaccggatcgccgtcgagcaccttgggcagccaccagcgggcgtagccgagccgaaacgacgcgcgcgcctcgccagggtggatagcgtcgctttctataagctccaccagcgaagacaggttggaggcgatggcccgcttcctgacaaggcgcaatgccgaccagtcgcgcagcagatgccgcgcttcgacaagcgcgccgagctgctccttcagcgtcgcgaggtcgggttcctcgcattcggcaacttcttcctgcccggcgacatttgcaaaacgccggcgcgcggcctggaaggcttgcgccgctaccagaaattcgtcaccggcctgccgcaccatgtcatggtcaagcattccgtccagacaggccgcgacggcgcggagcatggcctgcatgtcctccgcgccccgccccggaagccggagcgcgtcgcgcaattcgcgcgccagggcaagaatctgcgccacggcggcgatgtcggtggacagcccgtctacgggcaaggacttttcggccagcaggttctgacctatcgccgacaggcattccttcatgcgccgcagcaatggaatatcccgctccggcacggcttcgccttgcgcagcgtagctttgcagaagtttttgcaccttgcgccggccgagcgccgaccggggccagaacgaggcgttggcctcccgcaattggcggtcgagcgcgtctgggtcgagatcacggatggaagccgcgccataggaggccgagaggcctccttcggcttcgcgataggctgcgatcgactgcgcaagcttgtccagagcctcggcgcagcgcgcgaaatccttgtcgaaagcgatgctgacgtcatgcccccgactgttctgaagagccgtcgccaaagccgtcagggccgtgatctccgtccgggagcacggttcctgcggcttgaggccgagcgctgcgagatattgcgtcagggattgggcgagcgggtcgatcgtggctcgcagcgcctgcgccgccgaaagaagatcgtcctgccagcctgagctccactcgctggcgtcgaccagcgccagcgccggccggcgctcgacattggcgtaggcgaggccgagttcagcgctgagttcttcgagcgcgcgcagtgtctgctcgtcatgagcgtcccgttccgtccaggaaaaggtcggggctggcgcttcggcggccttgagcgcggttcccagcgccagatagggtgtccatccgttcggatagcgtttgtgcagggcctcgacataggcgttcaacgtgtcgcgtcgcaagcgcagacgctcattgacctcgacccatgcggtcatgtccggtcgctcattatgttcccaggcggccttgagctggccaaggaaatggcggcggtccgacttgttcgaatgcagctcgatgcaatgatgacccaggccatgctcgcgcaggcggcgatagaccacgtcgagcgccgccgtcttctccgcgacgaacagcaccgtcttgccgaccgcaaggcaattggcgatcatattggcgatggtctggctcttgccggttccgggcggaccaatgatcacgaaatcccggccttccgccgcggcgagggcggccgccgtctgcgacgaatccgcgggcaggaggcagacgatgtccgccggcgcatagacgcgatccagttcgcgttcgtcgcggaacggcgccgtctcgccgtccgcccgaaaggtctgctccggcgaatcgatcaggtggcggacgaccctgttctggcgcagggcgtcgacgcgctccgtcaggtccttccacatgaggaactttgcgaaggagaaggtggatagcgcggtttcgtcgacgacctccatgccgggcacgtcgcggaccgcctggcgcatcatggccaggacgcccggaacgtcgacgccgctttgatcgaggggaagatcgccggcgaattggggaagcttcaggtcgaagtcgcgctccaggaactggagcagcgtcgcgttgaagcgcggttcgtcttcatggtagcggatggcgaagcgcgaactggcgctgcggcgttcgagcttaaccggaaccagcagaagcggcgcacgatagctacgttcgtcctccggcttcttcttccagcgcaggaagccgacggcgaggaacagcgtattcgcgccgccttcggcgaaatcgttgcggacctggcgatggagatcgatcagccgggcgtcgagctcccgggcgacgagagtagaaggaagctcgtcccttttcagcgcgtcggcggcgaagccgcgctgaatatcccggccgtgcacgtcgcgataaagcgcggcgtcccgttcgccgagcgggttctgctcgggcagcgatatgatacgaacagccgcgccgtcggcgagtcggtcctccagataggcgacgtcagtgcagagaaacgggatcgttttcttggaatcgggaaaattgagcagccggttgcgaagcgtcaagtcgagcagtttcttccgccaacggtcgatgcggcccgcggccgtggtgggtttcacctccacgatctcggccggcgccgcgcccaggctgggtggggccgggagagggaggtccacgacgtccgtcgtctcctcatccacgctgctacggcggatcggctcatgggaagccagcggtgtgacgcctccgctacgcgcgcgccggacgtcgagcgccgccacgaaggagcgggcttcctcttcggcgaggcggcggttgagcgcctgctgcgccgcttccatcgtcatgggcggacgatgggttacgccggtagtttcgaagacgatcagctcccgcgaggccagcgccttgcggacttccatctggtcggcttcaagcgcgttggcgaaagtgcgttgggtcagccagacaccgaccgccgcatggccgtcgaacagcaggatgaccggattcaagccggccgcttccagcgctgcggcgaaaaggagcgtggtgtcgaggcatgtggcgagccgttgctcgccgatctggccggggcgtctgatcttctggccgcggctttcgaagctggcgggcggctccgcataatgcagatccattccggccaccgccgaatagatagccgccgccagcatataggcgcgctgcgggttttgcgactgatagccgtccatcccgctgggatgtccatgcgtggccagccgctctgctgcagagcggagaacgggagccacgcctggatcattcggcatgacgaaagccggaagcaattgcgccatgtcggcgacgccaccccattcgtcacgggcgagcagccggaccgacaggcgcttttcgtccagcatttcgccgtgcgaggacaggcgcagcacgatctcgccgcgttccgcctcgttgaggccggcgagataagcggcgtcgaactcgatcttcctgtcgctcaagggaagcttgtcgccgggcgcgagccggtcgaccatccacgtcttcgcccgcagaaacgccggcgaggcggtcagctcgatccggcaattctcgatatagccgtcgccgccgttttcgatcgaaatggatcggacgaccggtatggcgttctgataggacgcgtaggtgaaactcgcggcgatatcggcgacgagggccggccttttggttgcctcctcagcggaaatatcagaattttctaaaatattatcatctatatgcatcttggcccccccgagtcggggcaagctagcaaagttcctcgcaatcaaacaacgtcttttgcgccgttcgctaataaacgcatggtgaatgagacgaagcctgcttcttttttatttgccttcatataagctatatgctagtcgtcggatgttcagaaatcgcagtccagccgttaacaagctgagatatgcaccaaataaggcgctcgcttcggcgggcgctttttcgttgagcgtttctggaataatcaagcgcaagtttttatggcctgagttctggggccagctccttcccgttttaaaaaatgtctctttgaaacgaaaagggagagctgaagctctcccttgctttgttcagaaatacaggccggtcgcaaccacagatcattgcttacccaatggtaaggtcatcttgtttgtccaacataacatgcaacgaatcgctttgcgtggtctgcaccgcaggtgggtcggcccgacggcatagatatgcaaaccgaattcgcgttgacaattttcttacaatttgacacgaattgcaataatgatttgtgggggataatcatatgaagaccttggggatagatcttggaacggcctcgatcggctgggcgattcttgatgaagcgagcattatcgccagtggcgttcgtattttctcgcaatccgagatggctggtcgtgatccgcagtcgaaggcgtcattggcggtggcgcgtcgcgatgcgcgcggagcgcgccggcggcgtgaccgctatctaaagcgccggcggcgcttgctcgatctgctgacagagcatggattggcgcccgccgacgagaaatcccgcaaggcgctggtgcgtgaatacgaggacggcaaggacggcgatttgtcgaactcggtctacgctttgcgggctcgcgcgctcgacgaggcgttgactccgtatgagatcgggcgggcgatctttcagctcaatcagcgccgtggcttcaaatccaatcgcaagaccgacagcaacgatcccgaacaaggcaagatcgccacggcgattcatgtgctcgacgcgaaaatggacgaggacaaggcgcggactttcggcgagtggctgcatatgcgccgtctcaaggggctttccgtgcgcgcccgcatgaccgcggatggcgacagctacgatttctacccgtcgcgggcggcgctggagcgtgagttcgaccggcttatggcgagccagaagcgattccaccccgatttgctgaactccagcgtgatcgacgatatccgcaaggtagtttttcaccagcgtccgctgaagccggtccagccgggaaaatgttcgtataatcaccgagagagccggctgcctaaagcgcatccgctgttccagaaatttcggcttctcaaggaagtcaacgagttggaaatcgtcggcgaggatcaacggtacgtcaagctgacgccggcgcagcgcgacgtcctgacgctagccctgcgcaccgggctcaccaagcaaggacgtctgccattctcgaaactgcggtccatacttaaactcggaaaagaagtgcgcttcaacaaggagaaggacaatcgcaccgatctggaaggcgatgtgatccatttccgcgtgtcgcgcccggactgcttcggtaaccgttgggctgcgatgccagtggaggagcaggccgccgtcaccgagaaattgcgcacggagccggattacagcgccttgctggattggctgaagaacgaggccgggctggacgaagcccatgccagggcggtggcggatacgccggtgccggacggattcgggcgcatgggaccgtcggcgttgtcggcgttggctgacgccatggagcatgagatcgatgcgcagggttttgtcatcaccgaagccgaagccgcgaagcgcgtttatggccgcaccaattccgaagccgatccaggccgcaagggcgtagatcaactgccgaaatatcaagaggttcttcagcgccatattccgccagggacaggcgagcctgacgatccttatgacgagtatatgggtcgcatcaccaacccgacagtgcatatcgcgctaaaccagttgcgcaggctcgtcaacgcgctgatccgcaaatatggcaagccgaataagatcgccattgaggtcggacgcgaattgaagctgaacgaaaagcagcgcaatgaggtcaatcgcgagattgggcaaaacacccgcgcggcgatggcgcgggggcagcagctggtcgagatcttcaagcagccgaacaccggctataaccgtttgcggctggagctttgggaggatttgaaccgggaacagccattgaagcgcctctgcacctattgcggcaaggccatcgcggctcacatgttgttcaatggcgagacggatatcgaccatatcctgccctattcgaagacgctggacgacagcaaagccaaccgccttctgtgctgcaccccctgcaatcgtgaaaagaagaactatgcgccggcgaatgtgctgcagtggcgtgaccactatggcgagattctggcgcgcgccaccgcgctaccgaagaacaagcaatggcgcttcgcagaggacgccatgacgcgctacgaggcggaaggcggttttctcgcccggcagctgacggatatgcaatatatttcccgtctggcgctgacctatctcgcccatctttacgactatgaggagccggatctcgatggcgtctacaaacgccacgaccgcgtacgcgcgctgcctgggcgaatgaccgaaatgctccgccgccagtgggccctcaacgaattgctgcacggccataatctcgccggcggcgacggcgccaaggaaaagaaccggctcgatcaccgtcatcatgcgatcgacgccatcgtgatcgcttgcacgtcgcagtcactcatcaaccgactttcgacggcggcgggcgaggccgaagaacgcggcgcggcgcgggtcgtcgagcggattgatccgccatggccgagttttcgcgaagatgtgcgcgaggcggtcaacgccatcgtcgtcagccacaagccggaccatgggacggcgagccgctcgggctacgacaaaggccgtgggcagacggcagggaagcttcataacgacaccgcctatggcgagacgggggagaaagaccataacggcaacaatctggtggtgcgccgcatcgctatcagcgacatcaagcgttccgccgacatcatgaagatcaggaccaacgcccacggccattctgaattgcgcgatcggctctacgaggcgacgcgtgatctcgaaggcaaggccttcgagcaggcggtgacggccttcgtgaaacacgatgcgaagttcaaaggcatccggcacgtgcgcgtcaccgaagtgcagaatccggtctggatcacccatggcggcggaaaatataagaaaggctatctgccgggcggcaacgatcgtttcgacgtatgggagctgccggacggcaaatgggacgcagaggtagtgacgactttcgacgcccatcggcccgacttcacgccccgcatgcggatcgagcatcacaacgcacgcaagatcatgagcctgaaaaagggcgacatgatcgcctatgatgatcccgacagcggaaagcgcgtgatcgccatcgtgcggaaattcgaccagcgcaacaagcagctctatctcgatccgcataacgaagcgggcaatctcgaccagcgagagaaagagaagacctataagccgcttcggcccatgcccaaccctttgaaaaaatatcggccgcgccaggtccgtgtcgacgagatcgggcaggttttcgatcctggtccatggtgggaaaagcgaagcgattaaccaaaaattagggtttgcgaagcggaagaatgcgattgtgctaatctcccgcaatgcagcgtgtggttgatctctcctctgacggcttgcatgtggccgtttatcgtggctttctcacggtctccaaggaccatgaagaaataggccgggtggcgctcgacgatatcggcggcgtcatcgcccacgcccatgggttgacctggtccaatacggtgttcacgcgattgtcggagcgggccgttccggtggttctttgcgcagccaaccacgcgccggtggcctgcgtctggccgctggaaggcaatcatctgcaaggcgcgcggctgaacgcgcaggtggacgcctcgcgacccatggccaagcgcctatggcgcgacatagtggtggccaagatacggatgcagggcgcggtgctggcgtcggtaggggcggaggcgggcgcgttcgacatgctcgctcgcaaggtccgttccggcgatccggacaatgtggaggcgcaggcggcccggcgttattggcaggcgttgatgggagcggattttcgccgcgaccaggcgggcgagggaacgaacgcattgctcaattacggctatacggtgctgcgcgcggtcgtgagccgttcgatttgcgccgccgggctgcatccggccattggcttgcaccacgccaaccgagccaacgccttcgcgctggccgacgacttgatggagccttacaggccgatcgtggaccgcgccgtttacaatcttgtgcgggatgggctcggggaggtgacatcgcagacgaaagccgccttggcggcgctgaccgcactggacttatcggctccgcacggcatgagcccgcttcatgtgcatgcgacacggcttgcgcagcaattggcggcgcttttcggcaaggagggcggggctttcgatttgcctacgccgcccgacccgctcgtcctatcgggcctagcccgaaagggagaggagacatgaccacgcttcatacggaaaaacggggggagcggaccacgccgtcttatatgtccgcttatcgattgatgtggatgctcattacattcgacctgccggtggacacgaaaaaacaccgcgctgaagccacgaagtttcgtcaattcctgcttgatcagggctttgagatgagccagctttcaaattatctccgactggtgaacgggcaggagcaattcgaaacctatacaaggcgaatcggagccaatttaccggagcggggcgatgtcttcatctttcaattcacggaccgacagtatgaaaatatcgtccgattcagcgaccagagtcgtcgtgcacgcaagaaaaatcccgaacagatcgccttgttctagggaaagtaatctgatttttgatgcgcttctacccataaagcactgtaaaaacagtgctttatgggtaggtggagcttagcagttcagaaatcgcaggccaaccgcaaccaacgatgatcgtgaagaacgccaccgtcgagcttagcagttcagaaatcgcaggccaaccgcaacttgcgatttgatttgtcgccggagatcggcagcttagcagttcagaaatcgcaggccaaccgcaacgatgcaacagttccaacaccggaggcgacgagcttagcagttcagaaatcgcaggccaaccgcaacgcaaccagcacggcgcgattgccggcgcgaagcttagcagttcagaaatcgcaggccaaccgcaacatgtcggccagcgaggcggtgcagttgcagagcttagcagttcagaaatcgcaggccaaccgcaacatgtcggccagcgaggcggtgcagctgcagagcttagcagttcagaaatcgcaggccaaccgcaactgccgcacgccgcggcccggctgggacgtagcttagcagttcagaaatcgcaggccaaccgcaactggagcaggcgctccgcgtcaccatcgccaagcttagcagttcagaaatcgcaggccaaccgcaacagaacacgatggcgggtgccgcgcgcatgtagcttagcagttcagaaatcgcaggccaaccgcaacggcagggcaaggctaaaaccttggacggcgagcttagcagttcagaaatcgcaggccaaccgcaacctaccccgtcggcctctacgacgtgaagaccagcttagcagttcagaaatcgcaggccaaccgcaacgatgcgaggcgagaagccgtttacgctcctagcttagcagttcagaaatcgcaggccaaccgcaactgggcacagccggggaagatcgcgattgccagcttagcagttcagaaatcgcaggccaaccgcaacaccggcattaaaaacaaagcggatatggacagcttagcagttcagaaatcgcaggccaaccgcaactgaaattcctcaagcccggtggacgccttaagcttagcagttcagaaatcgcaggccaaccgcaacaaaatcttgggtctgctcggaggttcccgcagcttagcagttcagaaatcgcaggccaaccgcaacggctgtttgggaacgtattggctcggacggagcttagcagttcagaaatcgcaggccaaccgcaaccacaagggagacccggaactgttctgggacagcttagcagttcagaaatcgcaggccaaccgcaaccaaatcgttggcattaaaatacgtggatgcagcttagcagttcagaaatcgcaggccaaccgcaacaggacgtgacgccgtccgtcatgcagcgccagcttagcagttcagaaatcgcaggccaaccgcaacaatagcgttcatgatttcggtttcgcttggagcttagcagttcagaaatcgcaggccaaccgcaaccgatcgcgtcagggaggtatcgcagatgcaagcttagcagttcagaaatcgcaggccaaccgcaactaggtgcgggtgtccttccaagcatgaagcagcttagcagttcagaaatcgcaggccaaccgcaacatgtcgaagaacttatagacaagctggtcgagcttagcagttcagaaatcgcaggccaaccgcaaccgctgaattatgcgtggcatatcgaaaagcagcttagcagttcagaaatcgcaggccaaccgcaaccgccatgatagttcctatggcgagggaataagcttagcagttcagaaatcgcaggccaaccgcaacccggccgtcctcgtggcgcaggtcctggccagcttagcagttcagaaatcgcaggccaaccgcaacgcccggacgctttttacgaaaccgttccgcagcttagcagttcagaaatcgcaggccaaccgcaacgaaattccttgccgccaacgacggtctcggagcttagcagttcagaaatcgcaggccagccacaacgtcccgctccggctccgctacacagatgggactctatgagccctggcagattaagaagcgcaaattatagattaaaaaatggcggagagggagggatttgaacccccgatggagttgcccccatgccgcatttcgagtgcggtgctttcaaccactcagccacctctccgcgttttgcagcgccgggaaagttcaaggaaccgtgccggttgcgagcatttttagcgaatgccgagcgtgcgaaggctcaataacggcacgatggcgaatagacaagagctaatttgcgtcgcggcgtgaaaattcttgacttttccgcaggcctgtccctataagctcaacccatcaggcgtggagcagtccgcgcctgttgtcttgattgggattcgcggcctgtttcgcgcccgatcgaaggccaaccgactgataaaaagacggcccacgccatggcgaaacccgccggacgcgcgagagccggaccgaacgacccgaaaggataaaaaatgttcgcagtcatcaagactggtggcaagcagtaccgcgtcgccgcaaacgatctgatcaagatcgaaaaggtcgccggcgaagccggtgacgtcgtggaattcaaggaagtcctgatggttggctcgaccgtcggcgctccgctcgtcgaaggcgcggtcgtcaccgccgaagtcgtcgagcagggccgcggccgcaaggtcatcgcgttcaagaagcgccgccgtcagaactccaagcgcacccgcggccatcgtcaggaactgacgaccatccgcatctcggaaatcctcaccggcggggcgaagccctccaaggccgcgccgaagaaggccgcagccaaggccgccgagtaagtccaagagagattaaaggagaacaccaatggcacacaaaaaagctggcggttcctcgcgcaacggtcgcgattctgagtccaagcgccttggcgtgaagaagttcggcggcgaagccgttcgcgccggcaacattctcgtgcgtcagcgcggcacccagtggcatccgggcgccaatgtcggcatgggcaaggaccacacccttttcgcgaccgtcaacggttccgtgtccttccgcacgaaggccaacggccgcacgttcgtgtccgtggacccgatcgcggaagccgcggaataaagccggacagtttcaagcgccggcgtcccatcagacccggtgcatgaggcgaccagccgaaagatcgagagggaagatggggcgccatcttcccttttcgcatttcggaggaaaaaatggtcgtcgaaagtctggcggaagcgcccgccgaggaatgtctgaggcccgagggccggttcgccgatgcctcgcccggttcgggctccggcctgaactgtcccgttctcgtcaccgagaggctggtcctgcgtccgccgcatgaggaggacgtggacgccatcgcccatctcgccgacaacgcccgcgtcgccgccatgctcgcccgcatgccgcatccctatacgcgtgaaaacgccgtggatttcgtcacgcgcgcgcgaaagggcgagatgggcgacggcgtctacgccgtgacgcaggccgagaccggcgtgttcatgggctgctgcggcgtgcatccgcacaagcacggcgaggggctggaaatcggctactggctgggcgaacccttttggggccgcggctacgccaccgaggcggcgcatgcgctgatcgatctggccttccgcgccggatcggtcgagcggctgcacgtgtcgtgccgggtcggcaacgaggcgtcgcggcgggtgatccacaaatgcggcttccagttcgtcggcagcggcatgatggattcgctggcggccgggaacgtcgccgtcgagcgctacgttctcgaccggcgcacctggatgggcctgagaagctggacgtcgtgaaacggcgccggccggcgaccatgcgtggtcatggtttgcagccggccggttttgctgtaattgcaacaatcgcatgcgcagacgcgccgcccgcgcgacgggcgccaaggggttagggttcatgaaatttctcgatcaggccaagatttacatccgctccggcagcggcggcgcgggggcggtgtcgttccgccgcgagaagtttctggaattcggcggcccggacggcggtgacggcgggcgcggcggcgacgtttgggcggaagcggtcgatgggctcaatacgctgatcgactatcgctaccagcagcatttccgcgccaagaccggcatgcacggcatgggccgcaacatgaccggcgccaagggcgacgacgtggtgctgaaggtgccggccggcacgcagatcttcgaggaagacaacgagacgctgatctgcgacctgaccgaggtgggccagcgctaccgcctcgccaagggcgggaacggcggcttcggcaacctgcatttcaccacctccaccaaccgtgcgccgcgccgcgccaatccggggcaggacgggaccgagctcaccatctggctgcggctgaagctgatcgccgacgccggcctggtcggcctgcccaacgccggcaagtccaccttcctggccagcgtcacggcggccaagcccaagatcgccgattatcccttcaccactttgcatcccaatctcggcgtagcgcgggtggacgggcgcgaattcgtcatcgccgacattccgggcctcatcgagggcgcgcatgagggcgtgggcatcggcgaccgtttcctcggccatgtcgagcgcacgcgggtgcttttgcatctcgtctccgcgcaggaggagaatgtcggcaaggcttacaagatcattcgcggtgagctggaggcctatggccacggcctcgtcgacaagcacgaggtggtggcgctgtcgcaggtcgacacgctcgaccccgatgcgcgcaagaagaaggtcgcggcgctgaagcgcgcctgcggcaggcagccgctgcttctgtcggcggtgagccacgaggggctgaacgacgcgctgcgcagccttgcggcggtgatcgacctcagccgcgccgaggaagccggcgcggccgaaggcgcgcagacgaccggggactgaccgcccatgttgaagcagctcagggattatcgccgcatcgtggtcaagatcggctcggcgcttctggtcgaccgggccgcggggctgaagcaggcctggctcgaaagcctcggccaggatatcgccgcgctgcacaaggcgggcgtcgaggtgctggtggtctcttccggggccatcgcgctcgggcgcaccgttctgggcttgcccaaaaaagcgttgaagctcgaggaaagccaggcggcggccgccgccggccagatcgcgctcgccaaggcctatgccgacgtgctgggaagccatggggtcaagtcgggccagattctgctgacgctgtccgacaccgaggagcgccggcgctatctcaacgcgcgcgccaccatcgacacgctgctgaagctaggcgccgtgccggtgatcaacgagaacgatacggtggccaccaccgaaatccgctatggcgacaacgaccggctcgccgcgcgcgtggcgacgatgatgggggcggacctcctgatcctgctctccgacatagacgggctctacaccgctccgccgcacaagaatcccgacgcgcagttcctgccgctggtcgaagcgatcacgccggagatcgaggcgatggcgggggcggcggcgtcggaactgtcgcgcggcggcatgaagaccaagctcgacgccggcaagatcgccaacgccgccggcacggcgatgatcatcacctccggcacccggctcgcgccgctttcggccatcgaccgcggcgagcgggcgaccctgttcaagccgtcgcgcgcgccggtcaatgcatggaagacgtggatttccggcaatctggagccggcgggccggctcatggtcgacgcgggcgcggcgcgggcgctcaaatccggcaagtcgctgctgccggcgggcgtcaaggcggtcgacggccggttcgagcgcggcgacacggtggccgtgatgagcgaggacggatacgagatcgcgcgcggcctgatcgcttatgattccgacgacgcgcgcaagatcgccggtcgcaagagcgacgagatcgccgggattctcggctacgaggcgcgcgcggcgatgatccatcgcaacgatctggtggtgcgcggcgcggccgccacggtcgaggaggcctgagacatgctggacaaagccgacatcgccgccgttatggcggacgtgggccgcagggccaaggccgccgcggcgccgctcgccatcgccggggccgagcgcaagaacaaggcgcttctggccgcagccgatgcgctggccgcaaacggcgacgccgtgcttgaggccaaccggatcgacctcgccaatgcgcgggccgccggcatggcggcctccttcatcgaccggctggcgctggacgaggcgcggatcgcggccatcgccgagggcctgcgcgccgtcgccgccttgcccgacccggtcggcgcggtgatcgccgaatgggaccgcccgaacgggctgcatatcgagcgcgtgcgcacgccgctcggcgtggtcggcgtgatctatgagagccggcccaacgtgacggccgacgccggcgcgctatgcctcaaggccggcaatgcggtgatcctgcgcggcggctcggattcggcccattcctcggccgccatccacaaggcgctggtcgccgggctggaagcggcgggcctgcccgccgacgccatccagatcgtgccggtgaccgaccgcgcggcggtgggcgaaatgctgaagggcctcggcgggaccatcgacgtcatcgtgccgcgcggcggcaagagcctcgtggcgcgggtgcaggcggaggcgcgcgtgccggtcttcgcgcatctcgaaggcatctgccatctctatatagaccgctcggccgatctcgacatggcgcggcgcatcgccgtcaacgccaagatgcggcgcaccggcatttgcggcgcgaccgaaacgctgctggtcgaccgcgcggcggctgaaacccatctcaagccgatcctcgacgacctcgccgccaagggctgcgagatccgcggcagcgatgaagtacgggcgctgtggccggcggcgaagccggcgacggaggaggactgggcgaccgaatatctcgacgccatcatctcggtggcgctggtcgacggcgtcggcggggccatcgaccatatcggccgctattcctcgcatcataccgaggcgatcgtcgcggaggatgcggcggcggccgagcgtttcttcaacgagatcgattcggcgatcctgctgcacaacgcctcgacgcaattcgccgacggcggcgagttcggcatgggcggggagatcggcatcgccaccggcaagatgcatgcgcgcgggccggtcggcgtcgagcaactgacttcgttcaaatatcgcgtgcgcggcagcgggcagaccagaagctgatgcggcccgctctcgatccggccagattgcaggcgctttatccggacgttgcggcgcgcttcctgcgcatgccgccggcggagaagggcatggcggtggggctgttcggcggctcgttcaacccgccgcacgccgggcacgcgctggtggcggagacggcgctcaagcggctcggcctcgaccggctctggtggatggtcacgcccggcaatccgctcaaggaccgcagcgagcttgcgccgctggccgagcggctcgccctcagcgaggccatgacgggcgactcgcgcgtggaggtgacggccttcgaggcggccttcgacgtgcgctatacggccgacacgctggcgctgatccgcgccgccaatccgggcgtcgatttcgtctgggtgatgggcgcggacaatctcgcctccttccatctctggcagcgctgggaggagatcgcgcgcacattccccatcgcggtgatcgaccggcccggctcgacggaggcggactatctggcggcgccgatggcgcgggaattttccgccgcgcggctcgacgaggccgaggcccagcgcctcgcccgcacgccgccgccggcctgggtgttcctgcacgggccgcgctcgccgctctcttccagcgccatccgccgcggcggcggcaaaaagtgaacgcgccggcggggccgggtccttgaaagcagggggcgactctgcctatcttcaaggtgcggcgcttatattgccgcggcgcgttgttcttgtcggaaaggaaagacactgagaacagcacttcagaagaaggcccttcatgcgccttcgccggtcgggatgaacgagacggatctcgtgtcctcgaccttcgacgcggccttggccagtctcgagaactccaaggcggaatccatcattcccatcgacattcgcggaagatccaccatcggcgattacatgatcgtcgcgtcgggccgttcgcatcgtcacgtgacggcggtcgccgaccacctgttgcaggcgctgcgcaaagcgggctgcaaggacatccatgtcgaaggcctggacggcggcgactgggtgctggtcgacaccggcgacgtcatcgtccatctgttccgcccggaagtccgcgacttctaca

SEQ ID NO: 285 - DNA, 24575 bp, synthetic construct
  misc_feature 1..24575: note = Synthetic
  source 1..24575: mol_type = other DNA
aaacgtgttcccgattacatcaacaagtatttcaagaacaccaacttcatgctgctctatccggttcagtcggccactacggataattatcacaacgacatggccaacgcctcactgcttgcctccatcaggaatctcggcggatttggcgaagccctcctttcgacggtaaagaaaagcgacccgtctgagtaacggatgatctcaacaaattgtgctaattcatctttttcacgttaattaatcgtatttttgcaaaaaagaactcaatgaatactttcggaaatattttcaggcttacatcgtttggagagtcccacggtgaagccgtggggggagttattgacggttgcccgccggggatcgagctggatttggaattcatccaaaacgaactcgacaggcgacgcccgggacaatcgcgcattaccacaccacgggtcgaatcggataaagtggtttttctttcaggaatcttcgaaggcaaaacaaccggcacatccatcggttttatcattaagaacgaaaatcaacactcggccgattataacaacctgaaagatatttatcgcccttcacacgccgattatacctattttcaaaaatacggcatccgcgatcaccgcggcggtggccggtcatcagcacgagaaaccatagcccgagtagtggcgggagctgtggccaaattgtacctgaagcaggccggtgtatcggttaccgcctacacttcacaggtaggtgaaattaaactggacaacaactacaaacaatacgaccttaccactatcgaagacacgcccgttcgatgccccgataccgaaaaggcgaatgagatgatcaaccttatcaaggaagtccagtacaaaggggataccatcgggggggtggttacctgcgttatacaggggacacccgtaggccttggcgagccggtctttgggaagctgcacgcggcactgggctcggccatgctcagcattaacgccgtgaaaggatttgagtacggacacggcttcgatgtgagtcgccggggttcggaaatgaacgattcatttttcaacgacaacgggaaaataagtacccgcaccaactattccggcggtatccaggcgggtatttccaacggacaggatatttatttccgggtggccttcaaacctgtttccaccattttaatggaacagcaaaccgtggatgtccacggaaacgacacgaccattaaggcccgcgggcgacacgacgcatgcgttcttccccgtgctgtgcccatcgttgaggctatggccgccatggttatcctggactactacctgctggctaaaatgtaattttcctgtcgcccatttgcctttacaaagattttttgcatctttgcaaattattgtattttaacaacagggtctgtcccgaaaataaaaaaatgattttcacaatccataatatacagataatcagattatgcttgttggcatttgaggtaaaaatcactttttgaggagactaaatacaagataccctactgtaagtgatgaacacggatttgatgtggcaaaaatttatcaaagaaagagacgatctttctttctctcttgtatacaatacctatgtggaagtactgtatgcctacggaattcacttgggctttcgtgacgaactatgtaaagatgccatccaggatgttttttacaacatatatgtaaagaaaagcgaattaaaaaaagttaaaaatcccacggcatatctttttaaatcttacaaataccgccttatcgaccttgcccgtaaagaagcaaaaattgaaaccatagactcgtgcagcgattcttttacactagacatcaccattttagacaatataatcgatgcggaagaatcgatcctcctgaagaacaaggttaaaaaattgctggaatgcctgtcggggcagcagcgcgaagccgtgtatatgaaatacatgcttggcctgggttacgacgagataagcgaaatattgcagattaatcccgattccgtaagaaaattaatgtaccgctccatggaaaaaataagacaaaacatcgataatgaccaccccgaatggctacccttgttcatagtcctgttcctcagcttttagctatccctacaggttcccctcccctaaaaaacattaattttatatttttttcattttttttgtccacaaatgaaaaaaataaacgtcctatatataaaacaatatatgtgaaaaacgatcggtattttcttttcaacgaagattttatacaatggagacttttccggacggaggagcaaaacgaacaatgggggaaattcaggttagagaatccgcatcttgagaaagacctggacgaagccatgagacggttcagtgccctggaaatgaatcgcgtctctttgtcggaagatgagaaagatgcaatttattctgccgttatacaaaacatccgtaaacacgaaaagcggaagtaccggctgcaagcctggtcggtagcaactgcggctatccttgttgttgtatttttatctaccttgtttattcagctgaataaagacaatgggccggttcctccggtcgaaaatagcatcattatggggcaaaccctgccaggagaggaagtatatctgatctccggcaaagaaaaaatcaatattgccaatcaatcggacatcctgctgaatcagaaaggcgaggtccaggtcataaataataaaaatgcaggagaagaattggctttgagtcctacaaaaatgaataaattagtagtccctttcggtaaacagtcaaatcttatattagctgacggaacaaaaatttatttaaattccggaacgcaggttgattttccttcccgatttgatgaaaaaacaagagaaattcatgttaacggtgaaattttcattgaagttatgaaagatacaaaaagaccgtttgttgttcacaccgaccggatggacattcaggtactcggtacatcatttaatgtatcggcgtatcatgacgatataggagcaaccgtcgttttggtaaatgggaaagtttccgtaaaaacagcacagcaagtaatggaaatgctgcccaatgagaaagcggaactaacaaacaatcaaataacaaaagaaacggtggatgtctctgaatacatcagttggacaaaaggtgttttggaattttatgaggcctccgtttcggagatactcaaaaaagtaggaagatactacaatgtgcaattcgaaagcagtccggacattccgctcaatgcccggacatgttcgggtaagctttttctgtccaacaacctggatagtgtgatgacgtcagtatctgttttgtcgtcaaccaactatcgccgggaaaacaacatgatttatatcactaaaaaataaaatgcctatgagaaataaatgaagaaaaaagaaaaatcggacaatggtgacgcattgtccgatcaaaaaaaattaatcaacaactaacacgtaattaattgtataactaaattcattacaaatgtatggaaaataaaattaaatctaaccaacgtgcatttaaaaagtgcaacagaaccctaaaaatcatgaagttctcatttttaatgctctttttctgctttttcaccattaccgcaggaaatgttttttcgcagcaaaaagaactttctttgaatctacgtaatgttactctaaaaaaagcgatttcggaaattgaaaaagcaagtgactatgtttttcttattacggatgaggtacaactcgaactcaataaaaaagccagcatccatgcgaataaagaatccattcatactattctggaggcactcctgaaagatacgtcattggaatttaccgtcgtggaacggcaggtttctgtctataaaaacaattcttcaaaaaaaacagaaccagctgttgagaaaattaaacaacaaaaaaaaactatctccggaacaattaccgatgtacaaggaaaacctgttataggggctaatatcctggaaaaaggcactaccaatggcactgttactgatatagatggcaacttcacgttgcaggtagatgaaaacgcgatacttcatatttcttatattggttatttagcgcaggatgttccaacagcagaagaaagtaatttcaaaatcattctcctcgaagacgttatggcacttgaagaggtggtagttaccggtttcggaatagaaaagagaaaaaaagcgctcggctattcagtcacggaagtatcaggggatgatctgacagaagccagggagatcaacattgcagatgcactggcaggaaaagtagctggtgtaaatgtaagcaacgttgctacaggagcttccggctcaagtcaaattcttatcaggggtaatacatctctctcggccagcaaccaaccgttgtatgtcattgatggaattcctatcgacaatagtcagttgggtgttcctggaacctggggaggcagtgactggggagatggcacctcgagtttgatgaaccccagtgatattgataacatcagcatattgaaaggaaatgccgctgcagctctttacggttcacgagcatcaaacggagtaatcctgatcacatccaagaaaggtgataaaagagatggagtaggaatcgagttctcaactaaccttgtactggaagatatgattgactttacagattaccagaaagaatatggtcatggctttaacggggcaaaacctacaagtcagtccgaggcgttgagttatggactttacagttacggggcaaaacttgatggtagtagtgtaatacaatatgatggcgtatcgcgtccatattcatacgttggcagcaatttgaaaaaattctaccgtactggttcaacatggacaaatacactgacactaaccggaggaaatgaaaataacgcttttcgttttactgtctccaaccttgataacagaggaattgttcctgaaaatgatgtgaacagaaaaaactttagcttaagtgttaacggactgtattggaaaaaattaagtgctttagcaaaagttgattatattattgaggatgtaagccatagaagtgaaatttcagactctccagggaatgtgaactatacactattctcactgcccccaagtatagatgtcactaattttagagggacaaccgataagctcggggctaatgaagaggggactgaattgcagtttaacagtaatgtgtatgtaaataatccatattgggtagcatatcaatacaaaagaagtagcgaaaggaacagaataataggctctttggctttgaaatatgattttactgattggttgtatcttcagggtcggttaggaagagactggtctcattttttcagaacatacctgactccatacggaacaggttacataccccgaggccaaatgtgggaagagagattcgtgattaccgaacttaatacagatgtaatgttgggatgggatcatggattcaatgactttaatttaagcggattcgtcggaggcaactatatgtgtcacgactacgactacatatttaccggaggaaatgattttaacatcccttttttccatgatatatctaatgttgcaaatcaaggtattggtagcaatgtacaaaaatatggagtaaattcacttttaggatcagctgagatatcttataaagataatcttttccttaatgtaaccggcagacaagactggttttctactcttgacgctaaaagtgttttgtacccttctgcaagtttaagctggatattttcggatgcctttaatatgccccaatggatgacttttgggaagttacgcttatcctgggcacaagtaggtggtggtgtagacagcccgtatcagacatcattaagctatagtctgctgggaggtggataccagggacaacctgccggacatatctcgcaatcaactgtacctaatactgaattaaaaccatataaaagtactgaatatgaaatcggaacagatatccggctgttcaataacaggttgggtatagatttcacctattatgacaaaaagacggaaaacgatatattagcatctacaatatccagagcatccggttattcttcggcaagagtgaatgtaggagagatatctaataaaggagtcgaattattgattaattcaaccataatagaccgtcgcaactttagatggaacacctctttcaatttcgcttacaacaaaaacgaagtgattcgccttgccgaagacattcagacacttacaatggcagaaagccgaactcaaagtgcttatttggccaatattgtaggacattcttacagtcagatatacggttataaattcaaaaccaatgaccagggggtgagggtatacgattcaacgggaaggcctataagaacaacggagttgtacccattaggaagcggtattagtccgactacaatgggattgaataactctttaacttacaaggacttttacctggattttctgatagacatgaaactaggcggtcatatttatgcagcaagtgatgcttacggttataccagaggatttcataaaaacacgcttgtaggccgtgaatcaggcctggatgtttcgggagtagatgaggagggaaatccgttctcttatcatattgcacctgaaaatttacgtacttattatgccaggatttatcaaattacggaagagtttgtacaggatgcatcatttatcaaaatgaggcaattggtgttgggttataatcttcaacctaaaatcctcgcaaaaactccatttaccagtgtgaacgtatctcttgttggccgaaacctgttgcttttgtggcgtaaaactactaatatcgatccggaatctaattttattgccgggaatgctcagggtctggaaggatttggcgtgccggccaccagaagtttcggcgttaatctgagcgttaaattctgattgataaacttcacaaataaaatttaaatttactatgatacgattcaaaagaactttgataataattataacaggtataatgcttttagttacgtgcactgaggatcttaaagatttaaatatcaatcccaaaacctccgatgagatgagtgacggctatttatttacttatgcccttaatgttaccggaggaaggcaatatacagcaaaaagagtcaacctgtttttatgcagcacctttatacaacaatttgcaaacctatctacgggtgattatggcgttggcgataagtatctgtatagcaacacattctgctcagcatactttgatgagtcttatcctcaggcagtaaaagaactgacaatgcttatacataagttgaaggatgatccggaaatggtgaacaatttatccatggcaagaatatggagggcagttgtttttcacgttattaccgatctctacggagatgtgccgtattctgaagcgggacttggatatttgtcacagaattatacgcccaaatacgatactcaacaaagtatttatgccgatatgcttaaagaactggaggaggctgttgctgctttcgatacttccaaacctaactggggagcagcagatttgatttatggtggagatattgccaaatggaaaaaattcggttattccatgatgttaagacttgggatgcgcatgtcaaaggttgatccttcaagtgctgctgggtgggtacaaaaagccgttgcaggaggagttatgatcgataatgatgatatagcctttgttccgcgcagtgaaagtggaagccgtgaatataatcaaaatccaaatagttggccattccacgaaacggattgggatgaaaagatcagcaagactcttatagattttatgctcgaaacgaacgacccacggatagatgtaatgtttgaaaaaggtagcgcaaacaccgttcattacggcatgccaaacggatacgatcatagcacgataaaagcttacgaagggcttgaaaatgacgaagaactcgatctgaatatttatagcgatgtcaaccccattttagttaatttgggagctccattgatatatatgacttacgcagaggttgaattcatgcttgctgaggcatccgaaagaggttggggaggtgtaaccaatgctaagtcacattatgataagggagtaaaggcagccatgcagatgtttacgttgtatgatccttcattatctgtaagtgatgaagcagtaaacacttaccttgctgctaatccgtacaattcttcatcaggcttcgagcttataggtgagcagtactggattgcaacatggatgaatttctatgagagttattcaaactggagaagaaccgggtatcccgtgctgacgcctgtaaactatcccggaaatgaatcaaacggacagataccaagaaggataagatactcttcaagtgaatattccgttaacccgtccaaccttgctgaagcaataagctctatgggtgctgatgctttcacaacccgcgtatggtgggatgttgcacagtaaacatagtaaacaaagacaaccgaggagttcaggtatcccgtctcctattcctgagtgggatacctgaaccctatggcgaaaaattaacaattataaaacaattgattacatgtgcgttgatattggccttttttccctgcacaaccgaaaaagagctgcgtatccctacgtatgatatccgtcatgaatccaatacatttttcaccttgcctacgacggaatccgacttcaaggtgctccggggaaaagaagttctggaaaaccgactatgggctgaggcataccaaaacgaggacgtggaattcattcgggtattgcatgcttatgcatggccgggtggaacgctccgtttttgataactataaaaacgaaatcctcaacgaagtaaggaatgcgagaaaacttgatgccatttacctgggtatgcacggagcagagggaaataaagtcgtagtcttaaagacgctccattcgtttgtagagattcgtgattttaaggaagctgggctaaatcctttggacaggaatatgacctggttagcaaaataaattctatgaacaatggctgaaggctacattggccattcttgtctgacaaagaaaaaggcgggttaccccgccttaaatattttcacaacggaataatccttattgtgaattgctttcaatagtgagcaaagataccaatttgttgtcagatgtgcaactttttcagaaaaaaaagttaactttaccccatattattctaatacattttattacagtaaattaaaaatttctatcaattcgttgttgtgtggacagggtcttttcttaaaattacgggaacaagtgtgggcagcttttttattttcaggaaaggagataaaatcgaaaaacctgctatatgatctgaaaaaagtgaatgacacagttttattggaacgtgaactggaaaacaaatacgaccgtttcgctatcaaaatgttgaaagatggacggtttctcggttacattgctgcttacgaaaatattgtaatgaccatgctgatggatcagggtgtacaacttggagcatcggtaagctccgtaaccgaaaacataaatgagacgagatatcttgacaaagttttttccgttcagttattcaccaaattaccagttccttataactatttagaaataaataatctgcgaacaaaacgggcggatgacgctgtagctatttacaggaaaggaacattaataaataaggagaaactataaaatttctccttaaaaaagcaattcacaacattcttctcatacatcatataatctatgagatttgtaatgaaacttgaatatgcaaattggttttttgcataagtgtgaggattggtgcacacacaagtaaatattgtcatatctactttcaagtttatttggcaaagatacacattattttcgtaattatgagaagaatgaaaatatatttatatctttgcattgataaaatattcaaaaacattaaattaacatgaaaacaattttaggattagatgtgggtaccaacagcatcggttgggcacttatcgaacatggccctgagaacagaaagggaagaattatcggaatgggaagtcgaattatttccatgggcgcggagttgagtaattttgagagaggacaggcccaaaccaaaaacgccaaccggcgcatcgccagaggggcaagaaaactcaataaaagatataagcaaagacgcaataaacttatttacgcgcttaaagagttgggaatgctgcccaaccagattcaattagtaaaggatttctttgatccgaacaagatcgataaaatcagtatcaaacccatcaaaaagagacaaccacaactaacggcttttgatttgttggagctaagggtgaaagccctttcagaaaaaattgaactaaaagatttgggtcggattatctataaatataatcaactcaggggatatgcaggcggaaatgcggagccggacaaagaagacaataacgatgacgcagaatatcaggaaaagaaaaacgaaaactatatcgcttttgcaagagtcttgcaattaggcattcccgaagaggtaaccataaaaaacagaaaattcaacaaacgaaaaatatcgattgaaacggatgatgggattcttgacggcgaaacctatctggattcgttaaaagagaatgattccctggaattgcaagtgaatatcaggcgttccaaatcaggagaatccattaccgtaaaattgcccgataaaaccaactggcgcaagaaaatggaaaacctggagaaagagttgaaagaaaaatccaaagaattgggccgggaggtttatatttcggaacacttgttcgatattgtaaaggaaaatccaagagcaaaaatccggaacaacgttatcttacgttcgcgttatgaaagtgaatttgacgcaatttgggattcccaatataaagtaaatgaggattttaaaaggttagtggataataaaaagttattgacaaaaattttatgtttcatttttccgggaacgtcaaagactcaagagcaattccgtgctgaaggattagaaaaaggtttaaaatatgtcttgaaaaatcagatcatattttttcaacgtgaactcaaagatcaatcacacctaatttctgactgccgttttgaacccaaggagaaggtggcgcccaagagtcatccaatatttcaggaatataaaatttgggaacaaatcaacaagttactcataaataccaaaacagaagtaggcgtaaaccgtaaaggagaacaaaaatatacatacatagaccgtccgattcccgcttcgttgaaagtaaaactattcgatgaccttcaaaataaaaaggaaatatcctatggtgttatctacaatgaattgaaaaaaaaatatgagttgcgcgaaaaagttgattttttaaatggattgaacgtcaaggcgaaactaaaaggcaatgagactaggatcatgcttcaaaagtccttgggtaattacctttgggaggctttgaatcttgatgccattgagcgacaaacggagctttggaatattctgtatcatgggaaaggaaacgaatacgacatccatagcgaaagaacatcccgggtgttgagatttttaaaagaatacggtcctggaattgataacgtagaagatacggctattcggatttctaagataaaattcagccgaagctattcgaatctaagtttgaaagcgattgaaaaactattaccgctggtaagggctggaaaatactttgacaacgcattttcaaatgaaattcattcaagaatagtcaaactcttaaatgaaaatgtggaagatccttttgaaaaagccgcacaggaattcttagaaaagaacagcatggttttagaagaaggtggtatcgtaaacgctatggccgtaattttagtgtatgggaagcataccgctaaagaatttaccgaagatgaacttgtaaagactccaaccgggatatctttcattaaaaatggttcgcttcgaaatcctttagcagagcaaattatcaacgaaactttggcaatggtcaaagatatttggaggaaatatggaggcaaacccgatgagatcagggtagaattggcgcgtgaactaaaaagcagcgctgaagaaagagccaaaatttactccgtcaatcaaaaaaatcagaaagcaaatgaagcagtaagagaaaaacttatcgagttgaaagaagagctttcgattgccaatatcgagaaatacaaactttggctttctcaggaaaatttacaggaagagtatattaaacattattccgatccgtctaaatccgaggtagaaaaattaaagctctgggaagaacaaggacatgtttcgccatacaccgggcagccgattccgttaagtcatctgtttaataaagctcgatacgatattgaccacatcattcccaaatcccgttactttgacgattcctttacaaacaaagtaatctgtgaaaaagccgtaaacaccgataagggcaaccggacagccatggaatattttgaaacgggatcaatgacccaaaagattttcagcaaagatgattttatcgaccatgccaataaactcttcacaggcagaaagcgaaaaaatcttttagcgacaaaagttcccgaagatccaattcaacggcaaataaaagacacccaatatattgccgtaaaagtaagggaagaactgaacaaaattgtgggcaacgagaacgtagaagccacttcgggaggcgttaccgattatttgagaaatcattgggggctgaccgataaatttaaatcaatgctgaaagagcgatacgagaacatacaaccaaaattatcggaaattgcctacaacgagtatgtaaaaaacattcaaacaaaacaaaaggaatatgcggaaaagaatattccgtttaatgatatagtattgaataacgaactgtttgttgaaaaattcaataaggaatttttcaaaaagaaaaacaataaactcgtaataaacggttggagcaagagaatagaccaccggcaccacgcgttagacgcgctaattattgcttgcacgcagccgccacatataaagcggctgaacgatttgaacaaagtgttggaagattggttaaaaaaaaataaagagacgtttttgcctgattttaacggctctaaagcagaattgctggatgaagtgttaaacctggacgagaacaagcgtaaaagtatcttcaaggaactggataaattcaccgacattcaaattccctggcaaggattcgtggaagaagcagaagaaggattaaaacaaattatcgtctcgcacaaacccaaagacaaattactgttgcagtacgatgaaaaaggaaaccggcagataaaattgcgtgggcaactacacgaaggaacgctctatggcaaaacaaacggaagggaaagctaccgtatccctctgttaaaactggcaggaaagaattttgcaaccgaaaaaataatcgaaaaaatcgtcgatccgtttctaaaaaagcaaatccgggaacatctaaatcaatataaagggaaaaaagatgaagctttttcggccgaaggcatattagacttgaataacaaattagcggagcgcaggggtaaaaacgataatccggcacctcacacgccagtttcgaccataaaaatatactataaagaccctgacaagaataaaaatgcaaacgatgaagaaattatcacacttcaaaaattagaccgaagcaaggcttttaataattccttatatgtgaagaccggcgacaattatcttttcgccgttatggaaaaagattacttcaacaagaaaacgagacagacagaaaagaaaagagttttcgatttgataacttttttcgatgcagccaacttattgaaaggagagtttaacaaatcttccgataaaaacactttcgacaaagaccttttattcaaaaaatattttgaggaaaaaaatcaggcaaaattattgtttaccttaaagcaagatgactttgtatatttgccggaagaaaatgaagatgttgtttttgataaggaaagccctttgtttgatgacttttggaatgattcaggggtgagaagtaagaatgtctatgtggtgcaaaagtttagcggcaaacaaatctacttcattaaacataccgtcgccgatatgataaaaaagaaagtagaattcggctcacaagattgctatgaaatagcgaacggaaagtccattaaagagcactgtttcaagctgcatgtcaaccggttaggagaaatcaccgacattatcaatcatgatgaagtcgctgaaagtttcaaacagacacaatcatcagttgttcatgagcctgaagttgtttaccaaacaaaaaatgtgcaattttttgattctttaagcgagatggataatgaagatgcaagatttatggccatgtcgtcgcccgaacaacacctgaaaaatgcaacggaattgaataagaatatttttcaagaaaaactatcccatccgatggataaaaaacttagattcagggaataatggatatcttttttaaagaacatcgacaattgctccggttacttgtcaagcgtaatgtcagctttatccttattggcgggtacgcggttaattattacggatacgagcgtacgaccggagatatggatatctggctggagttgggaaacgaaaataagtacagggttgtacttgcattaagagatttcggtatcgaggacagcgatttggagcaattgactcggatggactttgaaagtgcaccgcctgttttttttattggcgaaccaccgcgcagagtcgattttttaaccgtcattaataatgtgaagtttgaagatgccattgcggaggcaaactatttaaagatagatgatttccaaattccggtaatcaatctcaagcatttaattctgtctaaaatcacatccagccgtctaaaagacaaggcagatgtggaagaattacaacggataaatcgttatagaaaccaagataattgagtcggcatgataaaacgcacactctatttcggcaatccggcctacctttcattgaaaaaagaacagttggttatccaacttcccgaagtggtaaagaacagcgatttatccgaaaaattcaaacaggatgccgtgagtaccattcctatagaagatattggaatggtggtattggataacaaacaaataaccgttacgcacggagttatggaaaaattgttggcaaataactgtgcactaatcacgtgcgacagcaaccgtatgccgatgggattgatgctccctttatcgggaaataccacgcaaaccgaacgatttaaagatcaaattgaagcatccgtaccgttgaaaaaacaactttggcaacaaacagttgaggctaaaatccgtaatcaggcgtatttattagagaaaagcacaagcagcattgtgagaaatatgttggcttgggccaacgatgtgaaaagcggcgatcccgacaattacgaagcacgcgccgcggtgtattattgggcaaatcttttccctaaaatccaaggctttacacgtcatcgcgaaggtatcgcacccaataatttattgaattacggatacgccgtgctccgcgcagtgattgcacgttcgttggtggcgagcggattattgcccacactcggcattcatcatcgtaacaaatacaatgcctattgtctcgccgatgatattatggaaccttatcgcccgtttgttgattcggtgattatagatatcctgaaaaagaacgacgatatttcagagataagcaaagagcacaaaaccctgttgctgaatattcccgtgttggatgtcgttatcaacggacagagaagcccgcttatgattgctgtggcacagactaccgcatcattgtatcagtgttttgccggaaagatccggaaaataaaatatccatcgttcgaatagcactaaatttaaaagttttatgcaacgttttagcgaatatagaattatgtggataatggtgttttttgatctccctactgaaacgaagaaagaccggaaaatctatacgaattttcgcgataagttgataaaagacggatttaccatgtttcagttttccatttacctgcgtcattgtgccagtcgtgaaaatgcagaagtacatattaaacgcgtgaaaagttttctgccacctgccgggcaaatcggcatcctgtgtattactgataaacaattcgggaatatggaattatttattggtaagaaagaaaaagaaataactacaccataccagcagttggaactgttttaaaaataaaaaatcctgcatgacaagcaggatttttaccggtaacaacatctttttttattcctaacttttagtgtaaataactgatattctacggaaatacacgtattcagttgttccgaatatcaaagatactaattattgaaagcaattcacaacgaataaacttgtaaacaagcatatgccgaggttgttccgaatatcaaagatactaattattgaaagcaattcacaacttagtagccattttgaagaacagccacagcgttgttccgaatatcaaagatactaattattgaaagcaattcacaacggcacgttacatttgcaataggcgggatcggttgttccgaatatcaaagatactaattattgaaagcaattcacaacacaaaataacatggtgatatggcgaagaaagttgttccgaatatcaaagatactaattattgaaagcaattcacaacacgtaaacaaggggttaaccgcacaggatggttgttccgaatatcaaagatactaattattgaaagcaattcacaacatatgtgacgggaacccaaattcgagatatgttgttccgaatatcaaagatactaattattgaaagcaattcacaacaaatgatgagcaagggaaagatttcatccggttgttccgaatatcaaagatactaattattgaaagcaattcacaacagaaaaacgaagatggagacttcagttacagttgttccgaatatcaaagatactaattattgaaagcaattcacaactttatcagctttataaagttgtttatgatagttgttccgaatatcaaagatactaattattgaaagcaattcacaacacttcttagcgtggatatccctcaaaaagagttgttccgaatatcaaagatactaattattgaaagcaattcacaacacgtaaacaaggggttaaccgcacaggatggttgttccgaatatcaaagatactaattattgaaagcaattcacaacacacccgcccccaccatcaaccgcaagtacgttgttccgaatatcaaagatactaattattgaaagcaattcacaactacatgaatcccttataccctaccctgtaggttgttccgaatatcaaagatactaattattgaaagcaattcacaaccttaaaaacactccggaaaaaagacaagagggttgttccgaatatcaaagatactaattattgaaagcaattcacaacaataaccacataatcaaaaccacccgtaccgttgttccgaatatcaaagatactaattattgaaagcaattcacaaccgataaactcatccatctttttgctaatcagttgttccgaatatcaaagatactaattattgaaagcaattcacaactgtgaattcaccatcacagatataagaccagttgttccgaatatcaaagatactaattattgaaagcaattcacaacaatatgcggcatcgtacacgggggatatgtgttgttccgaatatcaaagatactaattattgaaagcaattcacaacggttgcttgattttgttctctgttgatactgttgttccgaatatcaaagatactaattattgaaagcaattcacaacgcacggtacttcctttccaaacgaaataatgttgttccgaatatcaaagatactaattattgaaagcaattcacaacgcaacaactgccggtattgcattttattcggttgttccgaatatcaaagatactaattattgaaagcaattcacaacggttaatcaaacaggctcatctgtccggtgatttcatccagcaagtcggcatcgttgatgttgaggggttcttccgcttcaatctcaactttcaacggtttgtctttttcatcctcttcgggttcaggaaaacgtgttggctctaactccttcacctctttcacctcgtaattggaaatccgtttccctttggctttaaaacttttcacgccaataaattcttccacatcaatttcaagcggctcgcggaaaccatcaccgcctccgaaaatggcttctacacgcggataaactacatcggtcagcaaaaacaacttcgaatcgagattatctcccaagaaattggctgccttatcggttgcatcaaacgtaaaacgcttcaaataagcatacccttggtcggcatcgaaaagagcagccgaccatatcttgccctcatcgtacttctcaatgcggagaaaatcgggttcaaaatggttgctcaagtcaaagttacaggtataaaaatctccgttcttattgacaaccaatatcttatccgaccctaaaaactcacccagatacaagccctcctcatcgtagttaagccgcagcacgtctggatcgaaccaaaccttccgtcctcccagtgttgagagtcctttttgtttaagcataatgcgatgtacgtcggcttttgtcagaatatttcccatcgctcccctacccttgatggcgatctcgctgaaatccttctcaaactgtaaaatccgttgacggggtttgggtttcaggatgacccgcacggtctcagcttcgccgttggggtttgcgctgaaataaacgatgcgtgaagcagtctttccctgcgtcacatcataatccttgtctcgtgtaactcctgttaccgggaaacgcttgatgtaatgtgcacccgatttcccgtgacggtaaatcacgttataaatggttctcttatcgttcttcttaaagacgttagcatataaaattccttttcccacaaacattttatcgctaacctttaccactttgtattttccgtccttgaagaaaacgatgatgtcgtcaatatcggaacagttgcagacaaattcgtctttcttcaacccggttccgatgaatccttcttcacgattgatgtataatttttcattggcttccgccaccttaacagcttcgatattctcaaaactgcgaatttccgtacgtcgtggataattcttgccgtacttttctttcagcatcaggtaccacgagatggtgtaatcggtcaggttatccaaatggtggttgatctcttctatctcgcccctgaacctggcaatattctcttcggccttgtcggaattgaatttcaggatacgcgccatctttatctccatcagcctcaggatatcctccgatgttatttcgcggataaatgacggcttgtacggttccaggcgcttatcgatatgggcgacagcaatctccatattccgggcattctcaaactcattgtccttgtaaatgcgctcttcgataaatattttctcgagtgatgcaaaaaggagggcctcctgtttttcctgtttttcaatttccagttccaaacggagaagctctttagtgcgatcggtggagatgcggagcacatcgctgacggtaagaaaatgcggtttgtcgtcctcaatgatacagcaattgggtgaaatattgatctcacaatccgtaaatgcgtatagggcgtcgatggtcctgtcggacgaaaccccgggagcaagctgcacatgaatctccacatttgcagccgtaatatcgtccacttttcggatctttatctttccccggtcgtttgctttgatgatcgattctacaacagaagccgttgtttttccatacggcaggctagtgataaccaatgtcttgttatcgagtttttttatcgaggcacgtacttttaccgacccgccccgttcgccatcgttgtatttctccacatcgatatatccaccggtttggaagtcgggaaacaggctgaacttcttcccctgcaggtatgcaacagatgcatcgcacagttcgttgaagttgtgcggtaaaattttagaggtcaggcccacagcaataccctccgtgccttgcgccagcagcagcgggaacttagccggtagtgttacgggctctttgtttcgcccgtcgtacgacggtttccattcggtagttttggcattaaaaagaacctcgagagcaaattttgtcaagcgtgcttctatatacctgggtgcagcagctccatctccggtatgtacgtttccccagttaccctgacagtcgattagcatgtctttctggccaagctgaaccagtgcatcgccgatggaggcatcaccgtgcgggtgaaactgcatggtaaaaccgataatgttcgccaccttgttgtacctcccgtcatccattcgcttcatagcgtgaagaatacggcgctgtaccggcttcagtccgtcagtaacatgcggaaccgcacgctccagaatcacatacgacgcatagtccagaaaccagtcctgatacatccgggaaaggttcatgggggagtcttcggctagccgggtaataattcggggattggagtgttgcgaagaatcggaaagaagaatatcgtcctcttccggattcatttgcatatctttatcttcaaaatcttcttcgttgctatcttttaatgacatatactgtttcaggttgaaaaaacattcaaagttaccttttttttgcgtgatttacaaacgaaagccaagggcatttctattttccgtcatgtggacaattctcggaaaaattacagtggatgtgtgtttttttgatgccgggtaaactacttccccaaaaatgtgttattagtaaaaggaaatactagttgttttagtctcgcatacattaatgattaatatacggctaaagtaaaactcaaaaattaacaacaaaacaaaaactatggaaagaaaaaaattaaatcaaccggtgaaattttctttagtaatggtcatcgccctcgctcttttacaaggctgtggaagcgttcccttcactggaagaagacaattaagcctggtttcgaacgaacaggtggttgcacttagcttgcagcagtaccaggattttatgcgttctgcgcctcttgaaaggagtacgaccaacgccgagatggtaaaaagggtgggctcccggattgccaacgccgtggaaacattttacaagaataacggttatgaatctgagttgcagtattatcagtgggagtttaacttggttaaagacaaaagcgtgaatgcatttgccatgcccggtggaaaaattgttatctacgatggattacttccggtgacacaaacggaggaagctttagcagtggtggtcggacacgaagttgcccatgtcattgcccggcatgctcaggaaagaatcagccagcagatggccctgcaatacgggggagctgttgccggcggccttttaggcaattcggtaggggcacaaatcggtcaacaggtattcggtcttggcgctcaatttggagtgatgatgccgtatgcccgtaaacaagaatacgaagccgatgaaatagggctcattgtcatggccctggcaggatacaatcctcaggcagcagttcccttctggacgagaatggcacaaagttctcaaggtggtgctccacccgaatttcttagcactcacccgacggacgaaaagcgtattgcacgtattcaacaaattatgcccaacgtacttcagtactataaagggactggcgttcagaacacgacgagtgagcccattaaaacccaggctcctgttcccacaaaaacggaagaagcaaaaacttcgaaagagtggacgttttagtccggataatacctcaatgacaaatttagttaaggggtcgctatgcgatccctttttttgggactgtcaccagcgaggggaaatcatgttttaaagatcgataaagtagctttaatacaaaataatggctaactttggccaatgtgaaaaaaccaatagaccattcaccttggattactttaaatattcgatttattatgaacaagacaacctctaagtttagcagagacacacgcaccgagcacgatcttatcggagctatggaaatccccacagcaagttatttcggtattcaaaccctccgggcagtagaaaactttgacattagccgttcaaaacttcatcattacccccagctcatccggggtttggcagatgtgaaagcagctgcagcactggccaacaaagaacttgaattgttaaaccccgtcattgccgatgccattgtggaagcctgcagggaaattaaacacggcaaactccacgatcagtttgtggtggatatggtacaaggtggtgcaggcacctcaaccaacatgaatgccaacgaagtaattgccaaccgggcattggaaattctagggttcgagaagggagattacacccattgtcaccccaacaaccacgtaaatctttctcaatctaccaacgatgcttatcccacagcgctaaaaatagccttataccgaagtatcggcgaattgattaacgcattggagaaattgattgtcgttttccgggaaaaagggaaagagtttgcagaagtcataaaaatgggacgcacgcagttacaagacgccgttcctatgacacttgggcaagagtttgatgcatttgccacaactttagaggaagaagtatcacgattgagccaaaaccgccaattacttctcgaaaccaatatgggagcaacggctattgggacaggaatcaactccgacccggaatacacggtaatctgcacccgttacctggcagaaatatcggatattgccgtcgttgctgccgataacctgatcgaagccaccagcgacacgggggttttcatcatgaactcatcggttattaaacggttagccgtaaaactatcaaaaatctgcaacgacctgcgattactttcctctggaccaagaacaggactgaacgagattaacttaccccccatgcagcctggttcttccattatgcccggcaaagtaaatccggttattcccgaagtggtcaatcaaattgcctacaaggtcattggcaatgatttaaccgtgaccatggcatcggaagccggacaactccagctgaatgttatggaacccataatcgcctattcgctgatggagaacatcgaaatgcttatcaacggcatcaatacactgagaagcaaatgtatttccggaatcacggcaaaccaagatcgctgcagggatatggtgttaaatagtattggcttggttacggcattaaatccgtacctgggatatgaagactctacccgggtagctgccgaagcattaagaacaggaaagggcgtttatgatatcgtactggaaaacaaactgattgcccaagaggagttggatgaaatactgaagccggaaaatatgatccggcctcgaagaataaacaagttaaaataaaagttatttccgcagccgatggaatgatctgactaaaatctcgtcggcaccgatcctacggatggcgagataggtcaagataatggcaataaccggcataattgcaccaataccgatcttttgaaactgtaatccggcttcgggattgatattgaaaatcaaaaacccaaaataaaggtaaaatccgaccatcagaaagatattaaaaatagatatccggatttgtaaaattcgggttttgtacaggaaaactgtcacaatcggcaaaagagcgctgatggcaccaatagcaaaaagtgcccaagtggaactttcaaggtctccgctcctgtacattcccatcgcttcaaaaacaacaggatcaccgttatagaaaaaagaagccagaggggttaccgtagccaccagcatacaaactgaggcaagcagtaaaaacagggtttgaattctctgaagcataccgttctgttaaaactgctctttttctttggcaggattgcggtaataaatttccccttccttccagtcttgcagggctatcagtgaaggtttcgggagtttttcgtaaaaacgcgaaatttctatctgttcgtgattttcgaatacttcctccaggttgtctgtatatgaagcgaattcctgtaatttggtatccaggtcctgcttcatctcgacagaaagctgattagctcttttactgattatgcggaccatctcatagacattccccaccggctcggcaagtttcatcacatcacgggtttcggtgttctgaggtgcatttgttcttctgtaatccattttatatgctaattcttagttatattccttgtgttcaattaattgatttatgacggcagcacgtctattttactttgcgccttcttgtagtatctgtcagcttccggcatgtattttccgtttggga

SEQ ID NO: 286 - DNA, 24356 bp, synthetic construct
  source 1..24356: mol_type = other DNA
  misc_feature 1..24356: note = Synthetic
aataaaaattaatatatatgaaaacaaataaatttttacaattaattctttgtttatttttcataataattagttgtaagaaaaaggattcgacttcctataaaatattagagaaaaaacaagaatataaaacttcaaactcaggtagtaaaattaataatgattcgttaaaaaataaaaatatagatatatctaaattttctaaaaaagagaaaacaaatattgataataatattaaagtatgtgttctgccctttgattttactgattattataatatgtgtgttgttgagaatgataagggctgtgaaacaaaatatccgtcttatatatatccagaagataaaaatattcttgaaagctatggagtaaaagaacagccgtccgcctttttcatccttccaagaatacataatttacaacccataattttggcttttactgattctgatatagaaggttatatctttaaagtaatagataataaaaaagtagtttcatcattacaaattggaaaaatggatggagaaaaaattgaagattttattattaaagcaaattatgaaattgagttatattcaagaaaagattccgctgaaaaaagggttttaaaaagaatatatagagtccaaaaaggtggtttgataaaataaaaaattaacaactgtaagagcataagctataataagaaattgtaaaacttttttagatagatttgtataacatatactattgtatttggaaagattcactgtgctaatattttttaattttgattccaatctaataactctactgaaaccctaaaatccattcaaaatgcaacaaaattataaaaaacaagcagctatagaagccgcaaaaaaagtgaaacctcatcaaataattggacttggtggaggtggtactattgcttatttggcggaagaattagccgctgatattcataaggctcaaactctccgttttgtttcctccagtgtagaaactgagaatttattagtagaccttgggctgaatgttatagacgctgcaactcttacttctattgatgtatactttgatgggtgtgatcagctggataaagaattgaatgctttaaagagtggaggaggtattcatacgtatgaaaaggcattggcatgtatggcaaaggaatttatattattaggagatgtagagaaatatactgatcagctcaatataaattgtttatttactgttgaggttgttccttatgcaataggctttattagtgatacattgaaaaaaagctttgatgtccttcatgttgtcgtaagaacagatactgataaaaaaaacatatcaaccaaaagaggaggagctttattggatgtaaaatttcagaatttcccggaattatcagctcttaatcagataaaaatttggcctgggattattgatcattcattgttttataagatggcaacggctgccatactttgtggcccggaagggataaatcatttaagtatttcgtaatagactaaaaattagtttttaaaactatattttatcaaaatataaaaaacatcttatgaaaatataagatgttttttttaccgaaataactccgatttaaatctttaactgccgaatcgtattataatgatctaagcttacgagagtatgtaatcgatctaaagatctattaattccgggtttttcaaaataatttttaatttcaagactatcagttattaagttagtagaacgactagaagaatagaaaataggaatttgataatttagaatcattctcatttcttcttcaataataggttgagcgtgagtttcttctttattaagaagctgtaaagcctgataggttacattttcaatatctgtccatcctttttcggatagtttatttaaaactaatccataacaaagagtaggtttgatcgtaactctcattatatattcctgggttgcaatttcattaaaatagtctagtatttctgtataatgattggtgataaattggatagcatctctcattccctctttaataatagacgtttttttaaaatgaggaggcatagaaaaccagttatcttctgaaataggactaaaatcaaattttccctttaatggaacatcaatttcaaagggaagaacacctgttgaataaacagattttgaaaagacttcattggttatatctttcttttttaaaggctgaaaaatactttcaatatcaacaaaacataagccttttttacttaaaataaaattttcaaaatgagcatcggtggcagataaaaggtagagaaggatggataaaaatcctatttgataattaaataaatggttgtcttcaaaatgatgatctgtttcaatgtattcctgaagtaaaaattccccatgatggtcattgtgaatatgtaggctttcaacggatgctggaaataccgatttaaatttttttataaagttttcgtatataagatagttcctgagagctccttttttgtaaactccttttttatgagtagtatgacattgtacaattcttaccacatcccactgatgatgaggatcagaaagaaacgtagaaagactactattttttgaataatactgcgatatgttttcctgcgtatgaataatatttttctgaattaaagctttaatatgttcaatatgatcatttaaaaaagggaaagaagactgaaaaaatgtcacatactctttagagttttgaaaataaagctcttgtactttactaatgtgctcaaaataatcatattgtattttgaagtatatcggtaaagcccttcttaaatcatcgtataccaagctttctttatcctgcataatcatgcttttatatggctttttttacaattacattttcagacataaacttctttaatacatttttaatgttttcaacatcattaatatgatgagatatagaatgaatagaaaactcttcattggtgagaatgtgatctacaatttctaagctggtaagcggcagactaatattttttgttccatttaatgagttgaataggagagtttgattgtgcaatgaaaattttaaattttttcttttacgataaatatcagaatttttcaggtccaaactaggattccaaagtaaatcattatcaggtagtataatggattgtttaatattttgttcttttatttttgctttaatttttaggacaatttcatggcttagctcgtgctcttttaatgaagctagagaagaggtaagaatatcatgaatattgtctacggtgatttcggaatattgtatactttttctaaagctaggaaaaaattctgcgagctcttctataaataattgagctaattcatattttctatttaataccaatccaaaagtgatatgtagagaaggttctgtttcgttacaatgtccataatggataaatcctctggggatatataaaatagaatctttttctaaagtggtatctaaaagaggagtcgtttcaaaaattttatcagaaacaatggctttttgcctttctaatggaagatccaaaatgggagagtatatcttccaatgttttgatccttcaatttgtaccataaaaacctctgctgaatcaaaatgaggtgaaaatccctgcacattgggaggagtaagaaacgcactgcattcaacagggcattcaaaaatatgctccatttgctcacatatttttttcaaggacaaattaaatgaagaaataaaattgattgtaatagttgcaccctctcgataatctctaatgatttcaggataagaaattgttttgctaaagagattaggaaaaacgagtttcccattttttgtaacttgaatagaatcgggagactgatcaataagttttactaatatatcttgaaaatcatcatacgtaaaggaaatcggtaaatctccttttatagattttgtaaaaggtgatttttcaaaatgattttcttgaattgttctaaatatatccatatgtaaaaaagacgtaaattcaggtttataactgatttacgccaaattaagattaatactgtagtgattcttctaattacgtactaaaatagtaggtaatacaagttgttcatgtgctgctaattgagcggatgccgttaaaaaatcagattctcttatttcactacttgtaggttttgcaggaataacgatgttaaatgtgtcttctgtattaaataaaacagaaaaattaacgttattaggaataggaatacctaatgagtttaaggcttcgttgggatttttttgaagagatgttttgaagtcttcatctgtccatgctttcaaaataagtttggtcattgcagatttaaactctgcttttgagatttctttttccatgaattttgtttttttggtatcttttaaatagtaattactaatatacagtatttagcttatatggcaaataatttaatgctatttatggacggtgtagtgaaatatttttatttattacttttttgtgtaatttttttacaattaattctttttttggtgtaaaatggttagataattgttgtagataaaaagaggtggaaccgtctataaacaagttattctctgtagagagaaaaatagtatataataaaaagaacctcccgaaggaggtttaaaaaacacaaatgataaaaaaaaacctctacttgaggtattcaaatatataaaaaactaatcatataagtgatataattataaagataaaattgaaaaaaaataataaaaattatgcatatctaattattttaaacattttttactacaataactcctttatttaaaataaaaaaaacaagatgttatgtatgggataagtattgaagtgattttttatcagtctgaaaatcaaattgttattttgtatttggatttttaatttaaaatattatttaaaccaaccaatcataaaaatattataaatgaaatacgaaaaagctgttcagtataaaaaagaatttttagaaaaagttcatgagtcaatatctaaatactactatattattattacgccggccatttctaaggaaagtgagcggtatatcggtgagtttttgaggaatcctaagctctttaatgataaaaactctaggaaatattcttccaatgatgattatatagtagtaagctttgaaaaaagtgatgtatatgagaaaaaataggagagactatttacttaaaataggttcgcctatagcttatcggttaaaagaaaaatccccggatttccgaggataaaaaactaataaccatgaaaactcaaattaaacatgagttgcttcttgtattgagaaaattgtgccaatatttataaaataaatatcttttaagaaaattttaacgcttttaagtcctgaatcttaaaaagttataaatattagaagaaaggatggcactctacatcaaaatacattttctatataagtcgttaattgggcagataatatattcgactttcagtatttattactcattatgagtagaatacactaattaaaaagccaactttatatttttactatatatatggacaggtggacttttgtacatcaattctatataaagtcttctatattttcctattgtaagtttttattttagaatattaatgtgaagtaaaagctttacatatcattaaattagtataattttttccatcacaattaggctagaaccaccataaaacctatatttgcagcctaaattttaaaattatgaaagaactaattgaaaaaatcaacacggaatttgaagcatttgctactgaggcaggtcaacaatcagaaaaaggaaataaagcagcaggtacaagagctcgtaaatcagctttagaacttagcaaattgtttaaagaattcagaaaaatttcagttgaagaatctaaaaaataattactagataccggcttattgaagccggtatttttatattacctatttcatatattatattttcattttaaattccttggaattgtttcatatttaatccaatcaatacatcatatgaaaagaaaccatttttttacatggccattagctgttctagctagccaactttcgtgggctcaaataaaaatagaggctaacgaaaaaattaatcctatggtacagaattttgtcaatgaagtcaatacgaattcacaattggaaggcatggcctatgagcttcttgatggaattgggccccgtttagtaggaactcctgaaatgttagctgctaatgaatggactgccaataaattgaaatcttgggatatagaggctaatcttcaacaatttggaacatggagaggatggcagcgcggaattactcatgttgatatgacacatcctcgtattaaatcactatccgcaactcaattgggttggtgtccttccaccaaaaaaccaatagaagctgaagtgattatactccctaaagtttcttctaaatctgaatttgatcaatggctatcttctgtaaaaggaaaaattgttttgatgtctcaatatcaaaaaattgggcgttctgatgaacaaatcaaagaatttggaactcctgaactttatgaaaaattaaaggccgaaaaagagctcgaatctaaaaattttcgggactatatgaagaatattggatatgatatcactacgcttccccaagctttagaaaaagcaggtgccgtgggaattgtagtttccaattggaccggaattatgggtgccagtaggatttttggtgctaaaacaactaaaactcctatgattgatattgaaatggaagattatggaatgctctatagaatggccgaaaaaggggcaaaaccccaaattaaaattgaaacgaattcaaaacaacttccagaggctaaaacttttaataccataggaatcatcaaagggaaagaaaagcccaacgaatatgttgtattatcagctcatcttgattcttgggatgggtctcaaggagctacagataatggaacggggacgcttaccatgcttgaaacaatgagaatattgaaaaaagaatatcccaataataaaaggacgattgttttaggactttgggggagtgaagagcaaggtttaaatggttccagaagttttattgaagataatccggaaatagctaaaggtatccaagctgtctttaaccaagataatggaacagggcgtgtagtaggaatcagtggacaagggtttgtaaaatcatacgattatataggaagatggttgaatgcggttcctaaaatggttaaagatcatattaaaacggactttccttccatgcccgataagggaggttctgatcattcgtcttttgtagctgcaggtattcccgggttttcattgggatctcttaactgggggtattttggatatacatggcataccacaaaagatacctatgataaaattgtttttgatgaattaaaaaataatgtagtattagctgctacattagcctacatggcatcggaagatccggagtttacgagcagagagaaaagagtaatgcctcaagatgaaaaaggagaatctctacaatggcctgaaatgaaaaagcctataaggagttctaaagattttaaataatatcaatatagttcagataaagtttgggcagtcatttatgactgcccaatttatttttatttcacaaaatcatacttaattgtaccctttttctcacttcatcgacatctgtaactttgacttgtacatgttgatggagtttaacgacttcactcacatcagagacaaatccatcttttaattgagaaatatggacaagaccactttctttaatacccagatccacaaaacatccaaaagccgttatgttgttcacaattccgggtaagatcataccaatttttaaatcttttatactctttaccgtcggatcaaactcaaatacttttgccgcttttcttgggtctaatcccggtttttccaattcttttaaaatatctttaatccctaaaataccaatttccggagtcagataattttccggatttatttgggcgactttttctttattagcaatcaattccagcgttttaatacccaaatcttttgccattttttctacaattccataggcttcagggtgtacagcagaattatctaaaggatttttggcattagaaattctcacaaatgcagctgcttgttgaaaggctttttctccaagtcgaggtacttttttcagttgttttctatcttcaaaagctccgttttcggctctataattaacgatattttctgccattttctctccaataccggaaacatagcttaaaagagatttactggctgtattaagatttattcccaccgaatttacacatttcatgaccgtggaatcgagctcattttttaaaagggtttggtctacatcatgctgatattgacctactccaatggatttgggatctatttttaccaattctgctagtggatcagataaccttctaccaatggaaacagccccgcgaacagtaacatcatagctcggaaactcatctctagcaattttacttgcagaataaacggatgcccctgcttcagatacgacaaaaacttgcaacggtttatcgaaggctatttttttgatgaaaaattcagtttctcgacttgctgtaccatttccgatagatatggcttcaatattataggcgtttaccatagacctaatttttttcatcgccattccagattcattttgaggagcatgaggatagatggtttcattgtggagtaagtcacccttttcatctaaacaaacgatcttacaaccacttttgtatcctggatctatggctaaaattcgcttttctcctaatggaggggcaaataataattggcttaagttttccgcaaaaatttcaatggcttttttgtctgccttttctttagcttcttgtaaggcttcattggaaatagcaggttccagcagtcttttataaccatcttttatagctaaagaaatttgagcagaactttcattattagatttaataatggcattttctataaattcaatagcttcctctttgtcaatttctatatttgtttttacgaaaccttcagactctgctcttagcatagccaaaagtctatgagatggagttctgttgagactttcttcccattcaaagtattgagagaacttttgagcgccttcttcatcctttttggattttactactttagaggaaatggtagctttccgttgaaataatcggcgaagatttttacggacatacatattttcattgatccattcagccataatatctcttgctccttgaagagcatctccttcattggcaacttgatcattaatatattgtgcagctaaaaactggatatcattatttttttgactcataatgattttagctaaaggttccagtcccttttcctttgcggaatctgcttttgttttcttacgttttttataaggaagataaagatcctcaagctcctgaatatcgaaactgtcttcgattttttgcttaagttccggagataaagcattttgttcttcaatagatttgagaatggattcttttctttttacaatttcttcaaattgtttattaagctttgaaatgtgctctatttgagtttcatcaagatttccggtcatatcttttcgatatctggaaataaaaggaatagtacaatcttcggataataattgaagagtattattaatgcttttttctgagatatttgtatgattgtgtataaaatgtaccgttgtcattgttaaattttcgaaaggctaaattaatgtttttgaaatgaaaaaggcgagttaccccgccttaaatgttttcacaacggaataatccttattgtgaattctttcaaaatttataatataaaattagtgattttttatttataacagtatcattttttttgaaaattttctttttaaatttattatactaaaaaaaactaattgattatgaaaactattttaggattggatttagggacgaattcgatcggttgggcgttgataaaacaggattttgaaaataaaaaaggagaaattctgggtatgggaagtcggattattccgatgggtgcagagttaagtaagtttgaacaaggacaagcgcaaactaaaaatgcgaacaggagaattgccagaggaattcgaaaactcaataaaagatataaacaaagaagaaataaactgatttatattttgcagcaacttggaatgttacctgagcaagttaagttggtaaacgaattttctgatccaaataaattagataaaatttcaatacttccaatttctaagaatcaacagcaattaacggcgtttgatctactggaattgcgtgtcaaagcattgactgaaaagattgaattagaagagttaggaaaaatcatttataaatataaccaacttagaggttattctgggggaaattcagaaccggaaaaagaagacaataatgatgatgaaagcgaagaaaaagagaaaacgaatgaaagttttgttgttttttctaaaattctgtcgttaggacagcctgaagaaattccttttaaaggaaaaaaactaaataaaagaaaaattacaattcagacagaagacggaattgttgaagctgaaacttttttagatagcttaaaagagaatgattctttagaacttcagtttaatattcgtcgggctaaatctggagatacaattaccataaaacttcctaacaaaacaagttggaggaagaaaatggaaaatatcgaaaaacagttagctgataaatcaaaagaaattggtcgggaatattttatctcagaattgttattcgatgttctaaaagaaaatagatgggcaaaaattcgtaataatgtgattttacgttcaagatacgaatcggaatttgaagcagtttggaaagaacaatcgaaatattatccgtttcttgagagtttagaaaaagataaactacaaaaaatattagaatttatttttcccggacaaaaagaaagtcaagaaaagctaagacagacaggattagaaaagggtttgaaatatgtgattaagaatcaagtagtcttttatcaaagagaattaaaagatcaatcggacttaatttctaactgtcgttttgaacatactgaaaaagttatagcaaaaagccaccctgtatttcaggaatataaaatttgggagcagataaataagttggttattaatactaaaacggaaaacggtgtaaaccgaaaaggtgaaattagatacagatatattgacagaccaattccaactgctttaaaagagtggttgtatgaagaattgcagagtaaaaaagaagtttcttttggtcctattttaactaaacttaaaaaagaattttacctgagagaaaatgtagattttcttaatggtatgaatgcaaaagataagttaaaaggaaatgatacaaaagccattctgcaaaaaactttaggcgagctgtgggatatatttggtttagatgatgcgaaaagacagattgagctttgggatatactctataatggcaaaggcaatgaatatgatttaacaagtgacagaacctctaaagtattagcttttatcggaaaatattcacctgaattagaaagcagagacgcaactgcaattaaaatttctaaaataaaatttagcagaaactactcaaacttaagtttaaaggcaattgaaaattttttaccattagtaagagcaggaaagttttttgatcaaaatttttctgatacgttgagggataaaatcattaaacttttgaatgaaaatgtagaagatccttttgaaaaatcagcgcaggaatttttggacaagaatcaggatgttttatcagatggaggaatagtaaatgctatcgcaacgatattggtttatgatcaacatacaactaaagaatattctaaggaggaattgataaaagaatttactgagatttcaagattaaaacaaggagaattaagaaatcctttggtggagcaaatcataaatgaagctttgattattgtcagagagatttggcaaaaatatggtttcaagcctgacgaaataagaatagagttagcaagagaacttaaaaacaatgcggttgaacgtggtaaaatgtattctgcaaatttaaaaagccaaaaatataatgcagaaatcagaagtaagcttattgagcttaaacaagagatttctattacaaatattgaaaagtataaattatggatttctcaggaaaatatgcaggaagcatatctcaaaaactataatgatccttcaaaatctgaaatagagaaattgaaattatgggaatctcaaggtcacatatcgccttatactgggcagccaattccactttcagaactgtttaatcgtgaaagatatgatgtagatcacatcattccacaatcaagatattttgatgattctctggcaaataaaattatttgtgaaaaatctataaataatgaaaaaggaaacaggacttctatggagtatttcgaagctggttcggtaaatcatcaaatctatactaaagaacaattcattgatcacgctaacaaatatttttcagggaagaaaagaaaaaatcttttagcaacatctatccccgaagatccaattcagagacagataaaggatacgcaatacatttctatccgaatccgtgaagaactgaacaaaattgttggaaacgagaatgtaaaaactacaacaggaggtgtgacagattatttgagaaatcattggggattaactgataaatttaaagtattattaaaagaaagatatgaaactgtattgccaaaacttgcgcaattagaatatgtgaattataagaaagaaacagaaagtaaagctgaggaatacgagaaagcaggtgtagaatttaatgaaccaattttaggcgaaaatatttttattgagaaattcaaaagtgaatttataaaaaagaaaaataataaactgatcataaaaggttggagtaaaagaatagatcacaggcatcacgcaatggatgcactcgtaatagcctgcacgcaacctgcttatatcaaaagattaaacgatctcaatcaggttctgaaggaatggttagataaaaataaagagaaattctttcccggtttcactggtagcaaaaccgagttgcttgatgaagttttgaatttagaatcagaaaagagaaaggaaatatttaatcaactggaaaaattcagagctattgaaatgccttggaatggcttccctgaagaagctgaacaaaaacttaaagaaattattgtttcacataagccaaaggataaattatatgtatctattgataaatttgatattaataatcctaggaaaaaattgatgccccaaataaaattaagaggacaattgcacgaggccaaaaactatggactaaaaaatggaaaagaaacaaaacggatacaattatctgaattatttgataaagaaaaatctgcgacattagggaatttgaataaaataactaatgaatttttaaaaaggattatccttaaacattacgaagaagattataaatttaataataaggacgctttttcagcagaaggaattttagatttaaacaaaaaactctctgaacgaaaagatgaacaaggaaattcaaaaccacatccaccaatttcagcaataaaaatttattacaaagacccggcaaaagctaaaaagaaaaaaattgatgatgaggatgatatctcgttacaaagattagacagacaaaaatctttcaataattctctgtatgtaaaaacaggagataattatctttttgccgtaatggagaaagaagttttcaataaaaaactaaaaaagaataaaacagaacggcattatgatttgattactttttttgatgcagccaatcttttaaaatccgaattcaatgattcagatgataagaaaaatttcagtaaagaggatttgtttaaaaaatattttgaagaaaggaatcaagcacgtttactatttactttaaagcaaggcgattttgtatatcttccgaatgatacggaagaagtaattattgatgaatcaagctctttatttacagattattggagaaacatacctgaaagaagcaaaaatatttatgtggtacaaaaattcagtggaaaagaaatttattttctaaaacataccattgctgatactattacgaagaaaattgaatttggatcacaggactgttatcaaagtttgaacggaagatccattaaagaattttgttttaagattaattcagatcgtttaggaaacatctcaaaagcgtaacactatgatcacccgctccatctatatcggcaatcctgcatatcttaaacttaaagatgagcaaatgaaaatcctttgtccgcaaaccaagatcgagaaaggaagtattccggtggaagatctggggtttctgatgctggatcattatcagatcactatttcgcacaaccttatccagagaatgatgggaaaaaatgtagtagtggtcagttgtgatgcccatcatatgccccacggaattatgctccctttatacggacatactgaatattctgatagggtaaaagatcaattggaggccagtgaacctcttaagaaacaattgtggaaacaaaccattgaatgtaaaatagaaaatcagaaagaagttttgatgaggttaggcaattattatgagcctatgttggaatatcaaagaaatgtaaagtctggtgatatcactaatatggaaggcatagcagcccagcattattggaaatatttgattagtttagattttcttcgtgaacgttttggaaattccccaaatcagttttttaattttggatatgcagttttaagaagcattgtggctagagcaatagtagaaacaggattgcttccggtcttaggaatttttcataaaaataaatacaatccctattgtttggcagatgatttaatggagccttatcgtccatttattgatgtattggttatgcagtggctagaatttaatccggatatagaagagttgacaaaagagtttaaagctcatattttacatatagcaactaaagatgtaaaaatagatggaaaaacaagaccattgttggtagcagtaaaaacaacagctacttcgctttataaatgttatacaggagaaaaacgattgatatcttatcctgaattgatatgaataccgaaaggtttaatgcttaccgaattatgtgggttttagtattgtatgatttgccgactgaaaccaaagcgaatatgaaagatgcaaaccgctttcgtaaaggcttaattgaggatggttttacattgttccaattttcaatgtatgttcgtcattgtccaagcagggaaaatgcagaggttcatattaaaagagtgaaattcatgttaccaaaagcgggaaaagtggctattatgtgtattacggataaacagtttggagatattcaaatcttttttgctagaaatagagaagagccacctcctacatttcaacagcttgaattattttaaattttaaatcctaataaataaaataatctactgtaaaccagtagattattttttgaggttgtgacgtatcactaagataataaattttgaaagcaattcacaacgtggtacatttcatcctaaagtacgtaatggttgtgacgtatcactaagataataaattttgaaagcaattcacaacagcgtcggcgatcctcttagtctctgcctggttgtgacgtatcactaagataataaattttgaaagcaattcacaaccggtgaataagtcttcgaggtaaatacagtgttgtgacgtatcactaagataataaattttgaaagcaattcacaacgaacggaatgatagcattaatgggaggggtgttgtgacgtatcactaagataataaattttgaaagcaattcacaactggatgttctaattttaagtatcctttttggttgtgacgtatcactaagataataaattttgaaagcaattcacaacggcgcgattataaggacctttgagacttcggttgtgacgtatcactaagataataaattttgaaagcaattcacaacccactttagcagcctttgatcttgatgcgggttgtgacgtatcactaagataataaattttgaaagcaattcacaacaagaataattagatatgacgcatgtatatagttgtgacgtatcactaagataataaattttgaaagcaattcacaaccctcgataaaatgataggcaaagagcaattgttgtgacgtatcactaagataataaattttgaaagcaattcacaacggttattgacctttatggtcacttgatcttgttgtgacgtatcactaagataataaattttgaaagcaattcacaacgccgcccatagtgatcattgcacctaacgcgttgtgacgtatcactaagataataaattttgaaagcaattcacaacagcgttaaatttctcttcatagtacttagtgttgtgacgtatcactaagataataaattttgaaagcaattcacaactgaattggatgaagaagctacaccggcagtgttgtgacgtatcactaagataataaattttgaaagcaattcacaacaatgtccttcaatttacagtcattcagcatgttgtgacgtatcactaagataataaattttgaaagcaattcacaacgggaattatattaatcatcgaattgcatatgttgtgacgtatcactaagataataaattttgaaagcaattcacaactgactttataaatttgtgtgttattattatgttgtgacgtatcactaagataataaattttgaaagcaattcacaactccatgaaatagtaagtattcggtttttaaagttgtgacgtatcactaagataataaattttgaaagcaattcacaacagccaagaacgaggaactattttctcgcgagttgtgacgtatcactaagataataaattttgaaagcaattcacaacggaccaattctgacgtaagactacgaagctgttgtgacgtatcactaagataataaattttgaaagcaattcacaactaaccgatttatatttgaatcctgttatatgttgtgacgtatcactaagataataaattttgaaagcaattcacaacctgccaagtcagtaaacccgttctttgatagttgtgacgtatcactaagataataaattttgaaagcaattcacaacgagttgtcacccactcgggaatcaatatccgttgtgacgtatcactaagataataaattttgaaagcaattcacaaccttcgaaagtatctgttatggcttgggcatgttgtgacgtatcactaagataataaattttgaaagcaattcacaacagtgttctcaacagctcaggatattttccagttgtgacgtatcactaagataataaattttgaaagcaattcacaacatctgtagtcattaggtgtatgtttaaaatgttgtgacgtatcactaagataataaattttgaaagcaattcacaacgcacatcggtgattgctcctatcgctagttgttgtgacgtatcactaagataataaattttgaaagcaattcacaacttatggttctacaggtgcaggtttttcaatgttgtgacgtgtcactaagataaacttcatgaatcttccaataacatgaacaaattatctgctaaaattattattagacaaaatttaaacaggctttaaaaagaatgcaagatatagttttttttgagattaaaattttcagaaaataattgaagttattttgtaaatattaaaaaataatttattctataatatagttttgctttatttgattattagaattagtatggatcattgaataaaagtaaatgtaaaaactctcaagctatttttagatgtaggagctattaaataaattctatatatttgtttcacaaaaacataaagatgcaaaatataaaatttttatttccaatgggtaactaccctcccttgaaggattattttttacagaatacccctaccaaagttataaggctaaattttacaagtccttaattttttgttattactaggttttatttagaataagtgaatttataataaaaattacaataagtttttggtacatcattgactatgatgtccaacacaatgtaataaccattccttttcttatccataggttttcatatgataattgctttatggaaagaattgttttctaatttatatcctaatatcactgttgtaaactattttcgacgtatccaattgtatttatcgtataaaataagtttattatacattaaatcctactaatctatttatcctactttctcttctataagggaaagcaataattattaacattttttcgagcatgaccattatatattggacagactttagtggatctgacattgatttatttttttccgtttgccatccacaccttacgccccaaattgtaaaaaagcaaatgaagtataagaataaagaagccgctttatcttatctcttaggaagacttttactttggtatggaacgattgatgttttgggaatcagcgcctcgttaaccctttgttttactaacaacgaaaagccctattttaaagaaggtcctttttttaatatcagtcattcggggaattatgttgcttgtgcgattaatagccagtataatattggaatggatctggaaattacaaagcctatttgttatagtgaatttcaggattattttactcttcccgagtgggattatattgtggattcttcatctcctactcaaaccttttataagctttggacaagaaaagaagctgtcataaaagcggatgggagaggattggggattcctttgaatagctttagtacgttagaagatacgttatattttaattccaaacattttctatttgaagaacttgacttttcttcagagtatatgggccatctcgttgtgatgagtgaaagtgatttttctagtaattcatcggagcatatttctcattttatcccattagaagaacttcttatcaaactaaaaactgttccctttttactatctgatttaaattaataattatatacaacacaaatgaaaaactctcaatttttaataaaactcactccttatcaagaatcattttatcacgaatggatgcttaatccattaaggagtgattacaatatgacgtttgatcaatcgatgtcgggatttctggatattgaaagactcaatgcaagcttaataaaattaataaataatcatttattaatgaatagtaatgttgtggatatatcagatgaactttactggaaaaataggcctttattatctgaagattcccaagttctccagtattttcctcaagagttaagtcgagcggaattattagacttggtattacagcccttcgatcttgaaaaagatcagctagtaaggttttatgctattcaattaaatgatgggaggtataggatagtgtatgtattctctcatattatagtagatggattaagtactaattctttatatgatgagaccagtacttattataatgacccaagctatataagttcagtgagtcttgctgatcaggcccgtttacatgaagaattgagtaatcaatttgatgagcttttcaataaaggcaaatcggagatgaccaatttttggaaaaagcatttggaaggtttagaaaatatcggatttaaatttttacagacaggggcattgaaggaatattcagatcctattgatatcaataagatcagtgagattagatttgaatttgaagaagatctttttttaaaagtaaaacaattgacaagaagttataaacttactccttatacttatggtcaaatgatattggcaatagctcttcatcgaatttcgggagtaggacaagtagggatacattatccaataggtataaaggaaggtcaacgttttatatttggagcccatgtgaatacaataatcaaaggctaccattttacttctgaaacaactctttcagagcttattgatcaaaatctagattatgttacagatttaaagaaaacaaaaggacagtaccttcccattgcagagcttattaggtatgctccgacctctgatgtattagaatttagttttgttcaggccaatcttaaagatatcgctattaactatgaagggttgtatgatatagttattaataatgagttgaatatagacttgttagggaaaattatctttgaacaggaaataaaagagaatcatttaaattacagggttaaatatgatacttttgaattagattcagaattagtttctcaatttatagaaatctacaaaaggttattcgttggagtattacatgatatattggatcataaaatagatacacgcatatcttcttatgagttattagataaagagagttatcaagcaatccttcatggttgtaatgccacgggattagaatacgacacaagtgttacgcttcatgaattatttgagagacaggtagagaagacacctgatcatatagcattggtgtatgaagatgtgaagttaacgtatagagaacttaatgagagatcgaatcaattggctcattatttactacaaaactatcagattaaacctgatgaactcattccattatgtttggaaagatccgaggagatgttaattacaatcttaggagttttgaagtcaggcggcgcgtatgttcccatggatcctcattatcctatggatagaatagaacatattctgagagataccaatgctagactggtacttgttgaagaaaatacaaaagacagattatatgggtacaaggaattaatagatacagaagcagaatcttcaaatctcagtatcattagtctggattcttcagagatggaagactcactgagtacttgttctgcggacaatccaaatacagaagtaagttcaggtgatttatcttatgtcatttacacgagtggaacgacaggtaaaccaaaaggagtaatgatcgagcataagagtgtggttcgtttattcagtgctacggatcattggtatggatttacggataaggatgtctggagtttattccattcgtatgtttttgatgtgagtgtatgggagatgtggggcgctttacttcatggaggaaaattattgataccaagtgtagaacaaactaaagatttatatttattttttgatttatgttataaaaataatcttacggtattatgtaaaaccccgacagccttttaccagtttatagaagtggctttatctaaggatgtagaactctcagatcttcgctatgttatctttgcaggcgaggctttgaactttgcttctttggaaccttggtatggtcgttattctcaagttcctcttttaatcaatatgtatggtactactgagactacagttcatgcgagttatagagtgcttgattcgggagagttagggaattcctctatggtaggaaaaagtattccggatcaacggatttatgtgttggatgcttatttacgtccagttccagtaggagccgtaggagaattatatataggaggggctggtttatcaagaggttatttaaatcttgcagaacttacctcagagcgttttctaccaaatcctttccagagtgaagaagagaaagagagaggttataatggacgtatgtataagacgggagatttaggtcgctatcttccaggaggggatttagaatatataggtcgaaatgacttccaggtcaagatcagaggatatagaatagaattgggagagatagagaatggattattgagttatgaaggtattcgtcaaagtattgtactagcaaaggataatagttcagggttaaaatacttggtaggttattatgtatcggataccgcggtaaatcatgaagagctatctgcatatttatcaggtcttcttcctgagtatatggttccttctgtgtatgttcatttagaagagtttcctcttacgattaatggaaagttggatcgcaaggctttacctgaacctaacttcacaggagataaagaatatatagcaccaacgagtgtccttgaaaaacaaatggtagagatctatagcgaggttttaggtttagctgtagaaagtatcggcttacatgatgatttcttccgattaggaggagacagtatcatcagtatccaacttgtgagtcgtttacgaaaacgattattgttatccttaagtgttaaagaagtctttacctatagaacggtgtatcatctttctgagctattagaaagtcgaagacatgaagaagggctatctcttattacagaacagggaatattagaaggtgaagtttcattattacctattcaggaatggttcttcaatgaggtagaattgggagaacatttcaaagctttccatcattggaatcagtcctttatgatttatgtccctgaattggatataaatatcttgcagaagagtttattacaattagtagagaagcatgatgccttacgtttgtattatcctaagaatgaagatggttatattcaaaagtatagaaaagaagctctatttcctgatttgagtatacttgatcgtagagatttaagtgatgaagaattagtagaagtctttacctcttggcagagtggatttgatatcattgaaggtcctttacttcatgtaggatatatccatggatatgaagatggaagttgtcgtgttcatttctgtttccatcatcttattatcgatgcagtaagctggcgaatcttaacagaagatcttcagacgatgtatagatctcttatggaaggaaatacaacaccagcgtatgtaaaaggaagtagttaccgtcagtgggttgatgtggttaagacttataaagaggatagtcctatctcccgagaagaagagctaacgtattggaatagtattatagagaatacgaagaacagcatgactcgtatagagagtcttagtagctctagctatcatcattccgatttggtattggataaagactccacgggttgtttacttcgagatattcatggtgtctatcatactcagatcaatgatatccttttatcagctttctcattagctctttgtgatttcacgggtctatcagctcatggtattttgttagaaggtcatggaagagaggatatctttccgggcatggatattactgaaacagtaggttggtttaccacgatgtatcctatagtgttagagagaggtaaagatgttctctctacaatagttcatacaaaggagtctttgagaggtattcctgataatgggataggttatggaagtcttataggctatacagatggaaatcttcctagaattagttttaattacttgggacagttggatcaacaggaacctgtatcagggagttggcatatcgtaggggagaatagtggaattcctataggaatagataattcagattctcatcttctcaatatcaatggagctgttgtaggaggagaattgtattttggattaagaggctacttcagtgaagaagagatgattcgtttatctgcattatttaaaggatatttagaacaactcgtgaatgagttatcagggatagatagaagttaccttacattgtcagatgtggatgatattctgagttcaagccagttagattctattcagaaagagatagagattgattctgtatatttagccagtagtcttcaggaaggctttatctaccatgccttaagtcagggagatgtagatgattcttatcgggtacagcttttatgggattatcatggggcggttgatttggagaagttaaaggagtcgtgggaatatgttcagaagaagcattcggtattaagaacgagatttgactggtcagagtctattgttcaggtagtagataagataagctctgtagactggcgttgtatagatctgagtgggtatgatgaaaaggacagagaagataagatcaaagctattgttcagaaagacagagaagaggaatatgatctttccaaatcaggactctttagagtctatctatgccaacattcagattctcattatacctgtatcttcagtaatcatcatgctatcttggatgggtggagtatgcctgtactgtttaatgatattcatacaagctaccttagattattgaaaggagaagtagtagcttctatggtagatatatcgtatggagaatccca

SEQ ID NO: 287 - DNA, 24266 bp, synthetic construct
  misc_feature 1..24266: note = Synthetic
  source 1..24266: mol_type = other DNA
tatattattattttcgaaataggtttcagcggcataaaaatctcttgcctctattctccataaaagttttgaacgaatagctctatcataattaatggaatatccaaatgttttaaaaccattttgaaaatttgcaggaataataacattatcagtatctgcataatattcaactcgtgcagccaattcatttttttgagatggtttccattgtagaatagctacataactataccaggtgtaaaatgaacggctgtgtactgatttttgttgaaagcctatatcaaatcctgttgtaatgccccattttggggttagttgaaatataccatacaagttatgaaaataacgcattgcacgaatactgtcgggtaaggtattccctataaatgaactactattaagcgtaatattggcagtaggattaaaggtaatttgatgcccaaaagcaggggtattattaccatttatccggctaatattttgccagccgtttaacaataatagggccatataccattttttgttattggttgtataggctacccgtataccggtttcataatacggcgaattctcggccaaaatacttctggagagtgtccaacaatctttaccaatggcaccttcaaaaccgatatgtgaagcaaaaataccggcatctgcccaaacatcctttttgcggaatagttttatacccacattggcttcaaaaatatttttcattacacctttctctgttgcaagattggcattcatataggttccggttgcaaaagccaaatttgcccttaccttattttcagtaatagcagctttcaacaatccaagattcaaatttacctcattgtgctggttgtagctatataaaaaagcaggtcggttatggttaggcggattagcaaaatcataagcataatatacatccaaatagccactaagttgtagcttttgattcaatgaatcgttttgggcatgggcataacctgttattatatacacggatagcaacatcattttcttcatgtactgttcattttacattcctgtaggcatatctgctataacgctttaatgatttgtcagggaatctaaagcaatgttaagcgccaatacattcacagattcggggccaaaaattcctaacaaaggtttatcggtatgctgccgcaccaatgattcaataatagatttaggaatatgtcttatttgtgcaattctgtttacctgtatcatagcagattgcacagcaatatcaggatctaaaccgctaccacttgcggtaaccaaatcagcgggtatagccgatgcaggaacaccgggatgatggatttggaatgaatcaacattttgttgtactgaaagcaaataatccggattattaggccctttattacttgcacctgccgctgctgcattataattcaccgcagaaggtcttgaccagaaatatttatcatccgaaaatttttgtccgatattccggtacatttttttcccatgtaccatccatacagcagcttctcctttatcaggcgtaatttgagcaacgcaccacactaatgctgtatacataacagaaaaaagcagcaagcaaaccaatgttaaacgaatggcaggtaataaatagtatttcataaaattgtttatataaagtttgcaacaatgatatcaatgattttaatgcccacaaaaggaacaataattccgcccagtccgtatatcagcaaattacgccgtagcagtgcgcttgcgccaataggtttataagccacaccgcgcaatgccagtggaatgagcagcggtataataatggcattaaaaataactgccgaaagaatggcactttgcgggctatgcaaatgcataatattcattccctgcaaggcaggtatataggtaatgaacaatgcgggtacaatggcaaagtattttgcaacatcgtttgcaatactaaacgttgttaaagtgccccttgtcattaataattgttttccaatttcaaccacttcaatcaatttggtggggtcattatccagatctaccatattaccagcttctttggctgcctgtgttccactgttcatagccacccctacatctgcctgagccaaagccggtgcatcattggtgccatctcccatcattgcaaccagcctgcctgaagcctgttctattttaatataattcattttatcttccggctttgcttcagctataaaatcatccacacctgctttttcggcaataaacctggctgttaacgggttatcgccggtaaccattactgttttaatgcccatcttccgtaaacgctcaaatctttctttaataccggttttaataatatcctgcaattcaataacccccattactttttcattttcagtaaccaccagtggtgtaccgcctttacttgaaatggattgaacaatggtatgcacatcttcaggaaatgtatttcctgcattttcacaaatttttctgatggcatctgctgcaccttttctgatacgcatatcacctacgtcaatacccgaacatctggtttctgcagtaaatggaatgaaacgcgggttgttgatttgtaacatcacagtatctaatgcggctaattcaataatcgatttcccttcgggggtttgatcggaaaccgaactcattacaaccagttgcttaaaataatcgggatcaacatgggtagccggataaaattgcgttgcttttctgtttccaatggtaatggtacctgttttatctaacagtaacacatcaatatcgccggcagtttctactgctttaccacttttggtaattacattggctttcaatgcacgattcattcccgcaattcctattgcggataatagcccaccaatggtagtgggtatcaggcaaacaaataaggcaataaaagcggcaatcgtaatgggtgtatgcgcataatctgcaaatgattttaaggtaactgttacaatgataaaaaccagtgtaaaacctgccaataaaatggttaatgcaatttcgttgggtgttttttggcgtgaagcgccttctaccaaagcaatcattttatctaaaaaactttcgcccggttcactggttacctttactttaattgtatcgctgagcacttttgttccgcctgtaacgctgcttttatcgccaccagcttctctaattacaggtgcactttcaccggtaatagcactttcatcaatggttgccaggccttccacaatttccccatcggcaggaataatatcatctgtttcacatataaaaatatctcctttttttaatttggaagccggaacaacaatcacttcattcacatacatttcgcctaccggcaatattaatttggcaggtgtgtcttctcttgttttccgcaaactgttggcttgtgccttaccccttgcctcggcaatggcttcggcaaaattggcaaacagcagggtaataaacagtaataaggtgattaccaaattgtacgttaaacttccctgaccatccgctccgccggcaatccagatgcatactcctcccattacaacggttcctacccaaacggtaaacatgactggatttaaaatcatggcggcaggatttaatttcaggaatgactgcttgaatgcaccggccaataatgctttatttagaaattgtttagatgcagtatgattcattttaatatatttttagtgaaaagaaaaatattcagcaacaggccctaaagccaaagacggaaaaaatgataaagctgcaacaattacaataacggccattaccattaacccgaatgtaaccgtatcggtttttagcgtaccggcactttccggaatatattttttttgtgccaataaaccggcaatggctaccggcccaatgatgggcaaatacctcgataacagcattacaataccatccgcaatattccaccagggagtattagccccaagccccgcaaattcgctaccgttgttggcactggcagaagtaaattcgtataacatttcgctaaagccatgaaaacccggattagaaagccagcccgcatattcagcaggatgatgcgcatacaaataagccgaaatggctgtacccgataatattaaaaatggatgaattaaagcaatgatcatcgctattttcatttcttttgcttcaatttttttacccatcagttcgggtgttctgccaaccattaatccactgataaatactgccaaaatcatgaaaatataaaagtttaaaaagcctacgccaatacccccgtaaaaagcatttaccatcattcccaacatggtacacatgcctgcaagcggcataaaactatcatgcatcgcattcacagaaccattactggttactgtggtaacaattccccagtatgcagatgcggcagcccccaaacgcagttctttaccttccatattacctaaattttgttcaattcccatttttgcaatggcaggattgcctgcagtttccatcacaagggtgggtgctaataataaaatgaaccccaccgtcattaccccaacaattaaccaggctaatttttttcgtttcagcatatagcccatggtaaatattaatgcaataggtaataaagcaatagctattgtttcaatcatgttagtgaaatagttaggattttcaaatggatgagccgagttaggcccgaagaaaccacctccatttgttcccaattgtttaatggcaacaaatgctgctaccgggcctctgctaacctgaactgtatcgccctgcaatgtagtaatggtatctttacccttaaacgtcatgggcataccgtttaataaaaacagaactgccattataaaagcaataggtaataaaacgcgggtacaacttcttacaaaataataataataattacccagtggggtattggttgtaccttctttcatggccttaaaaactacaatacatattgccattccgcatcctgcactgataaattggaatagcattaaaactaactgacccagataagacatgcccgtttcaccggaataatgttgcaaattggtgttcgaaataaaacttacagctgtattaaaagccagatcggccgacatggagggattatgatcagggtttagtggtaaatgcgccatattggttaataccaacatggccagaacaaaccagataaaattaatggagagtaatacttttaaatgctgcttccagctcatttctatgtttggatcaacacctgatattcgataaatcagttgatcaattggattgaaaatgggatctaaccaggtgctgtttcctgaaaataatttacccatatacctgcctaacggaatggctaacaataccgttatcataaacatggctattatgccatacatttcagtactcatttgcattgtttaatttagtttagaatatcaatttgtgcactgtaaaatgcagcaatgtgcctgtactgctgaacatgcattatccaaaatatacagcacatttgccgtattaaaacttttcaggatgaattaaaacataacacatgtatacaaatacggctactgctacaataaataataaaagcataagtttaaattttttcgaaccaatgaatgattgctttaaacagcagaaatgctaacaaaccggtaattagtaatagtaaaaactgcatgtgggtattttttatgtttaaaataatagaagcatcctacagtaaattattcatccttccatcttttaaagttttaaacaatggcaaaacaagtgccggctaacataaaatacatgaaaagccttacaggatatgaattataaatataatatactatatatacacactaacaaatcctttcattttgaaagggttgatactatcattttaaaagggtatggctgaagcggaatacaaaaataaaagtatcaggcaactgaacccggtatattatactcttcaatttttctgtacaaggtagttaaggcaatattgagtaagcgtgcagtttctgttttattaccaccggtatattgcagtactttttgaatatgtgctttttcaacagcagccagcgctaatgaagctgctggcttattaccggtttctaaatcggatacctgataaaaatcaaccggtaaggaagcaggctctaatatattattttcagttaaaataacacttcgttcaataatatttttcagttcacggatatttcctttccaggaatgtttttgtaacaattgtatgtatgccggatcaataccggttatttttttattcgttttttccgaaaaatattgtaagaaatgattggctaataatgcaatatcgtcaatacgttcccgtaaggaaggcagttgtatttgaaatactgaaatacggtaaaacaaatcttcgcgaaagcggccggcatttatttccttctttaaatcgcggttggtagctgcaattaaccgaacatttaccctggtaatattattatcgcccactttcagcaattcgccggtttcaataacgcgcagtagttttgcctgcaaatcgaggggcatctcgcctatttcatctaaaaaaatggtaccatcattcgcttcttcaaaaattcctttggtatcttttatggcgccggtaaatgcaccggctttatggccaaataattcattttccaataattctttgctgaaagctgagcaattcactgcaataaaattactattctttctttttcctgcctggtgtatggcctgtgcaaaaacttctttaccggttcctgtttcgccggttaataaaacagtggcatctgtttgtgctacttttcgggcggcttcaatggctaattgaatactttttgaacaaccgagtatactgtttaatgcatatttattatctaattgcttttctaattgttgtaccctttttgccagtttcactttttcaagtgctctgtaaagcaatggaataattttataattatcgtcgccctttgttatataatcaaatgctccattttttatagcttgtacactatcgggaatattgccataggctgtcatcaaaataatttcagaggcagggtacttttgtttgatactttttgccaattcaacaccatgctcatcaggtaatttcacatcacaaagtactatatctatattttgcagttctaatttcttaagcccggtttttccatcgcctgcctgcaatacttcaaaaccttctaaactcaacatttttgccagcagcgttcttaatttaacctcatcatctattattaaaatagtatttgccataaattggtttaactgaaagcagatgaatgattagaatattactgttatataccattacaaatgtaatgcatgtataagtaaacgaaaaaaaccctgccaattgcagggctttttgcttaatgtatcaaaccttccggtatgggtttcttcattaaatatttgtacataaattttgttttcaggttctgaaaatcatcccatttagcaggcaaataaggccagccatgccggccgccggggtacaacatcatttcaaatggctttttggcatcttctaaagcactgattaattgtatgctgttttgcatgtgtacattatcatccatggtaccatgtacaatttgtaacatgcctttgtacctattaacataacgcaatacactgctttttttataaccttccgggttgctttccggtgtacccatataacgttcggtataatgggtatcgtacaaacgccagtcaaccacactgccaccggccataccataggtaaatatatccgatttgtacgttagtgcatagcacgttatataaccaccataactaaagccggtaataccaatacgggcagggtcggcaccggcattatggataaaccatttggccatggtactgtaatcttccatttcccaataacctaaattgtggtataaataatttacccccgcttttccaaattggccactggccctgtgatcgaatgctacctgtatcaatccttcctgcgccaataattcacgattggcagtccagttccatttatcccataccgtgccggcattagggccaccgtatatactaattagcatggggtattgcttcgttttatcataatgtgcaggccaggttaccaaagcaggcagctcaaataaaccatcggcacttttaatgcggatgatttctgttttggcaatggcatactgatccattgcagggcctttggcattacccagttctgtaactgttttaccatttacatctaccaatgccatacgggtaggcgtttgtgtattgctataggtggtaataaaatatttaccaccgggcgaaaaattgatactgtgactgtaattgccaaatgttaaacgttgtggtttaccaccgtttaaactaattttatataaatcaatacgggttgagttttcaataccacgggccgtaaaataaataagctttttagcctcatcaatgtattcaataccggtaacggtaaaattgccttgtgtaatggcatgttgcaaggtaccatccatattatagaggtacagcatattccaaccggttttatcgctttgggcaatatagccgctaccatctttcaaaaaattaattcttccaccaaccctgtcttccaaatcaatccaggttttttgggtttcggtatatacgggtttacggctacccgtttgtgtatttacttcataaacaatcaggctatcttgtttccggttcatccagggcagccataagctattgttgctgttgcgccaaatgggccagccaaaatactggtcatctttttcattaaaattagcccaggtggtagtaccgccattggggctaacaaaacctattttaacttcggggtttttatcgcccacttctgggtaacgggtatattctacataaccatgttgcccctcgctgctgtatatggggaacataggcaccatactttcatcaaaccgggcataggcaatggttttgctatcggggctccaccaaaaagcacggtaatgcgtggggcggccataaatttcttccaaatacacccaactggcgtagccgtttaacgtggtagtgctgccgttaaaagttaattgtgtttctttttgcgtggctatgttataactgtataaattgttattttttgtatatgcaatataattgctatcgggcgaaaaggtggggtttcgttcctgcgccgtatcgttggtaatgcgggtagggtttccattaataaacaaatacaaatcgtgattcatttcggtaaccgttttacctggttttaattgggcaggtgcagtatacgaaagcattttacccgaaggaatatcgtataaaaaggttttggcattatgaggttgctcgccccgctgcaataacaaaacctggttatcgttcagccattccaataccgagggcaaaggttggtaaaacccttgcggtgcttttccggtaaccaattgcgaaacaggtatttctttttgctgggcagtggtgtatagtattgttaaacaacagcaagcaatggtgccaaatattcttctcatgtgtttgaattttgcatgaagataaatatcctcatccttttttacgataccattcaaaaaaaagtgacaaaccactgtattatcgggcttttttcgaaaattgttcgaccgttgttcgactccggcccataaaaaagcagcaatgatgcgggttgtatcgaagtagtgtcgaacctgtatcgaacttgtatcgaagaaggccgggagtaagggagatgggggtacaattatttaaccggttgaaaaggtaaaaaaaataattttaaaaaaagagataatattttttttatgtatacataaaatgtgtagtttaggggaagaaaaaagtagccccaccttttaaagtggggcgacttaaatgttttcacaacggaataatccttattgtgatttgctttcaaattagatttcaaaaataaagaaataattgcaacatgaaaaaaacaattttagggcttgatttaggcaccaattcaatagggtgggcgttgatagaacaggattttgaaaacaaacaaggaaacatattgggaatgggcagtagaataattccaatgggcgaagaattaagcaagtttgaacgtgggcaagctcaaacaaaaaatgcaaatcgacgaattgcaagaggtattcgaaaactgaataagcgttacaaacagagaagaaataaactcatttatgttttggaaaagttagaaatgctacccgagcagattaaactatccgaaccttttactgatccattaaaacttaataaagtttcaattctgccaatacaaaaaaaacaaaagcagtattcagcactggatttgttagaattaagagttagagcactaagtcaaccaatatcccagaaagatttgggtaaaattatttatttattcaaccaactacgtggatatgctggtggaggaaatgaacctgatgatgaaaaagatgaagaaaacgaaactgaagaaaatgttagaaacgaaaatgatagttatgtaacagttgctaaaatactttcaatatctgaccccgaaaaaatcttgtaccaaaaaaaagaactcaataagtacaaagtttctattgaaacagaagatggtatattagaaggagatacatttttagaagtacttaaagttggcgaaacattagagctgctagttaaaataacaaactcaaaaaagaatggaagaactctaagttttaaacttcctaacaaaacaaattggcgtaagaaaatggaaaatctggaaaaagatctgacagagttatcgagagaaaaagggagggaagtttatatatcagagtattttttatctattctcaaagagaataaatgggcaaaaataagggacaatgtcattcttcgttcccgttatcaatctgaatttgacgctatctggaaggaacaaagcaaatatcacaaaatacttaatacactttcgcaagataaattaagagaaatccttcaatttctttttccgggaaccaaagcaacacaggaaagatacagacaaatagggctagaaaagggactttatcatattattagaaatcaaataatctactatcaaagagaattaaaagaccaaagcagtcttatttccaattgtaggtttgaaaaaggtgagaaagctgttgcaacaagtcatccaatttttcaggagtataaaatttgggagcagataaataagttaaccattaataccaaaatggaaaacgggaaaaatagaaaaggtgaaattagatataaatatgtggataaacccatcccatcctcattgaaagaatggctttttgatgaattacaagataaaaaggaaataggatttggagtagtactaaataaactaaagaaagaatatggtttacgtgatggaattgatttctttaatggcatgaatcctaaagcaaaattgaagggaaatgaaacaaaactgataataaaaaaagcgttaggtaatcagctctgggatcagttggatttaaaaaaaataaacaaacaaattgagttatgggatatattattcaatgcaagaggaaatgaatatgatattgaaagtgagcgaacctcaaaagttttagtattcattaaaaaaagttcaaatgatatttcaaatcctgaacaaacagctattcaaataagcaaaataaaattcagtcgaaactatgcatcacttagtctcaaagccattgaaaaaattttaccgcttataagatgtgggaaatattttaattatgaattttccgcttctctcaaagaaactattatcagattgtttaatgagaatgtaaccgatccatttgaaaaagcagctcaggaatatttagaaaccaatcttgatgtattaacagacggtggaattatgaatgcatatgccactatattaatttacggtaggcatactgctaaagaatatggagaaaatgaaagaattaacaggtatcaggaaataaaacgactaattcctggagagctaagaaatccgcttgtggaacaactggtcagtgaaactttaatggtagttaaagatatctggaaacaatttggcaagcctgatgagataagactggaacttgccagagaattaaaaaataatgcagaacgaagagcaaaaatttacaaggcaaataatgaaaaccaaaaggcgaatgaagaggttaaaaatttattgattgaattaaaacaagaaataacacttacaaacattgaaaaatataagatttggctatcgcaggaaaatcttgcagatgaatatttgaagcaatataaagatccttcaaaaactgaaattgaaaagatgaagttatggcgagaacaaggacacatttcaccatataccggtcaacccattccactttcagaattgttcgacagagagcgatatgatgtagatcatattattccgcaatcgcgatattttgatgactcttttgctaataaagtgatttgcgagaaatctgtaaacaaagaaaaaggcaacagaactgctatggaatattttgagacggggtcatttattcagactgtcttctctaaagaaaattttgttaaccatgtaaacaaccagtttaaaaactaccctgctaaacgtaaaaatttacttgcaacgaaagtaccggaagatcccattacaagacaaatgaaagaaacgcaatacatatcagtaagagtaaaagaagaaattaataaaattgtaggtaatgaaaatgtaaaaaccactacaggaggcgttactgattacctacgaaaccaatggggagttacagataaatttaaaaaactacttcaagaaaggtatgaaagaatgaaagagactcttgctgaactggaatacgaaaaaaggaaaaatataatccaaaataaagaagcctacattgagtcgtttaaaaaagatctaattgcttttaaaaacaataaactagtgctaaagggttggaataaacgtattgaccacaggcatcatgctattgatgcattggtaatagcttgtaccgaacccagtcatataaaaaggctaaatgacttaaacaaagaattgcagacatggttggaatcgcatagaaacgaaatcttaccgaattttgaagggtctccaacagagttactagatgaaatactcaatcttgaagaatcaaaaaaagaagcaatttttaaacagattgagaaatttaaagccattgatatgccatggcccggttttcctgaatcggctgaattagaaattaaaaaaattataatttctcaaaaacctaaagataaacttttaattcaacccaataaagaaggaaaactacaaataaaaatccgaggtccactacatgaagaaacattatatggaaaaagtaaatatattgaaacttaccgtataccattaacgaaattgggtaacaaaaacattgccacagagaaaataattgaaaaaataacgaatgattatttaaaaactattttaaaagaacatcttaaagattttgataacaaaaaagaagaagctttttcgacagaaggaattttgtatttaaacaaaaaattagctgagaaaaaaaattctcaaggaaaagttgcaccacacacacctatttcatctataaaagttttttacaggaacccctccaaaataaagaagaaaaaaggagatgaagaaccggaagaagcacttcaaaaattagaaagaagtaaggcctttaacaaatcgctttttgtaaagacaggtggcaactatctatttggtattttagaaaaaaacaatgagcgtatttttgatatcataaccttttttgatgcagtcaatattttaaaagaagaatttaatagatgtcctaacaaacaaacatttaataaagatttagttttcaaaaattattttgaagcaaaaaatggtgcaaaattgttatttactctaaaacaaggcgatcccgtttatatgccttctgatagtgaagaggtaataactgacccctatagccctttatttaaaccgttttgggatgataaaacggcgcgtagcaaaaacgttcattatgttacaaaatatagtggaaaacagatttattttattaggcacaatattgcagatttaataataaagggaaaagaatatggaagtcaaaatgcctatgaaattattaatgggttatccattaaacagcattgtttaaaactaactattgaccgccttggcaacatacaacccatgccaattatgtaacaacaatcaataaaatatgtcaccgcttcttcccggccaatattatcatatatacaaccatgcgaatggtgatgataatcttttccgggaagaagagaattatcgtttcttcctgcaacaataccatcaacatatagatgctatagcagataccttagcgtggtgtttgatgccgaatcattttcatctgctggttaaaataaaaaacgaagaggcgctgctgcaaacttttccaaagttcgaaactttggaaaagttgctgtcgaaaaaattttccaacttctttagcagttatacgcaggcttttaataaaatgtaccaacgcagaggttcgctttttattaaaaattttaaaagaaaggaaattactactgctcaatatctacaaacaatcgttgtatacatccactgcaacccaattaaacatcattttgcaaaagaaataactgcatggccctggagctcctaccaacatatacatacgcattttgaagagcttcccttttttcgagaaatcttcgaaaataaaaatagttttcttaaacaacatacacttaaacatgaacgttttattaaatacaacgaattggaagaatcgctcacccggtaaattatgccagcatgcttaaacgcaccctctgcatagaaaacccctgccacctaaagtgcaacaatgaacaattggtaattagttatgccgctattaaaggtttggaagacaggcacgataaaagcgtacccattgaagatgtgggagtactggtgttagaacacccccaaattaccattacccattttttgttaaacaaactagttgctaataatattgccgtaattacctgcaacagcacccaccaccctaccggcatgttattgcctttagaaagtcataccctgcaaagtgaacgtttcaaggaacaattggcagccagcgaacctttgaaaaaacaattgtggcaacaaaccgtaaaagccaaaatcaataaccaggcagccgttttaaaaaaatggcatataccccatggttatttaaacaatgcccagcaaagcgtaaaaagtggcgatgccgataatgccgaagccaaagcagcggcatattattgggcacatttgtttccggaagcctggcagttttttagaaaacgggaaggcccaccacccaataatttgctgaattacggatatgccattatacgggcagccatggcccgtgccattgccggagcgggcttattgcccacactgggcatttttcaccgcaaccgctacaatgcatattgtttggccgatgatatgatggaaccctaccgcccttttgtagatgctattgtacgcaacattattcacgaaacatcggcagttgaggtgttaacgcaacccataaaagtgcaactgctgagtgtgttaacacatgatacaaaaatagaagcacaaaacagccccttatggattgccatgcaaaaaaccgctttctcgttaagtaaatgctataatggcgagcagcgaaaactgctattccctgaatttttgtaaacacaccaaccccgccggtatataaatatattctcaatatacaataataaacttattaatggcgttgtaataccagtacatgcaattgatgataccagatagcagttaaaggatatgcccaaacataaaaacctttctgaacgttttaatgcctaccgtataatgtggataatggtatttttcgatttacctaccgaaaccaaaacagagcgcaaaacggcacaggattttagaaaaaaaattatggccgatggctttgtaatgtttcaattctccatatacctacgacattgccccagtatggaaaatgcaacggtacatataaaaagggtaaaaaaaatattgcccgaaaaggggcatataggtattatgactattaccgacaaacaatttggcatgatggagctatttcaaggtaaaaaagaagcacctgcccagcccataccccagcagttagagttattttaaaaccccaccaccaacgcaatagaaaagcaaaaaggctgtactgcttatggcagatacagcctttttagtcatttttttctttctattttctttgaaaacccttacaggcattgcatttcagcatttactgttgttatcaaagatctgataaaaagaatttgaaagcaaatcacaacggaaaaataccttgtgaactatgatgagaggttgttatcaaagatctgataaaaagaatttgaaagcaaatcacaactacaaactgcatccaatttatcaatggtaagttgttatcaaagatctgataaaaagaatttgaaagcaaatcacaacatcactcgattttatccgccaaataccattgttgttatcaaagatctgataaaaagaatttgaaagcaaatcacaacaaactttaaaatgatttgtaaataaaaacgttgttatcaaagatctgataaaaagaatttgaaagcaaatcacaacaaagttttttttgttttattttgaaaaaatgttgttatcaaagatctgataaaaagaatttgaaagcaaatcacaacacccaaagggtggtcaattgattgtattaagttgttatcaaagatctgataaaaagaatttgaaagcaaatcacaacgtcgccgttgctatcaataggctgtctgggttgttatcaaagatctgataaaaagaatttgaaagcaaatcacaacataagcagtgagtaatctacggcggcggtgtgttgttatcaaagatctgataaaaagaatttgaaagcaaatcacaaccaacttgttattgcattgccacgaagatttgttgttatcaaagatctgataaaaagaatttgaaagcaaatcacaacacgaagtatgtacattactgtgtaacgtggttgttatcaaagatctgataaaaagaatttgaaagcaaatcacaacattgtcttgaaaaacaataggatgaactttgttgttatcaaagatctgataaaaagaatttgaaagcaaatcacaacgtttatttcgtttatttcatcaaaaccggcgttgttatcaaagatctgataaaaagaatttgaaagcaaatcacaacaatgcagatgtaattcctttttgtattcaggttgttatcaaagatctgataaaaagaatttgaaagcaaatcacaaccatgaacttgcgcaacagcgtttcttttttgttgttatcaaagatctgataaaaagaatttgaaagcaaatcacaaccatttgccgtgcttaaaaacacttctgaacgttgttatcaaagatctgataaaaagaatttgaaagcaaatcacaacgcgctttctgttaaaactaaaacggttgtgttgttatcaaagatctgataaaaagaatttgaaagcaaatcacaacaaataataaaaaacaaacaagatgccagaagttgttatcaaagatctgataaaaagaatttgaaagcaaatcacaaccagattgctttgaaaaagcaaagggaagcggttgttatcaaagatctgataaaaagaatttgaaagcaaatcacaacaatgcagatgtaattcctttttgtattcaggttgttatcaaagatctgataaaaagaatttgaaagcaaatcacaacacaaatgttaataactattttttgatttggttgttatcaaagatctgataaaaagaatttgaaagcaaatcacaacagaaaaaacaataatagtattacttattttgttgttatcaaagatctgataaaaagaatttgaaagcaaatcacaacagcgcattaaatcgcttgtagcgctttcatgttgttatcaaagatctgataaaaagaatttgaaagcaaatcacaacaaattgtcgaagcacacgcataaatattttgttgttatcaaagatctgataaaaagaatttgaaagcaaatcacaacctatcttttaaaaattcaaaaagttgctcagttgttatcaaagatctgataaaaagaatttgaaagcaaatcacaacgaacacaaaaagcaaacgctcataaaatctgttgttatcaaagatctgataaaaagaatttgaaagcaaatcacaaccccgcaggctctgttactgttagtgtaacgttgttatcaaagatctgataaaaagaatttgaaagcaaatcacaacgttactttcaattgcctgcctgtcggttgtgttgttatcaaagatctgataaaaagaatttgaaagcaaatcacaactgcttttctaattgcagttccaaagctttagttgttatcaaagatctgataaaaagaatttgaaagcaaatcacaaccttctgtaaaaggtttgcttttcataaattgttgttatcaaagatctgataaaaagaatttgaaagcaaatcacaacacgagccaactgtagtgcttctacgtttagttgttatcaaagatctgataaaaagaatttgaaagcaaatcacaacgaatttgtaaaagaatacccgttgcagttgttgttatcaaagatctgataaaaagaatttgaaagcaaatcacaacctcccagagcaattttcaaggcggcaattttgttgttatcaaagatctgataaaaagaatttgaaagcaaatcacaacatatacgttagttgggccgatggcaaaatggttgttatcaaagatctgataaaaagaatttgaaagcaaatcacaacagttgtagctgttagcagaggtgatgttgagttgttatcaaagatctgataaaaagaatttgaaagcaaatcacaactgatttacattaatggtgacagcgtcatctgttgttatcaaagatctgataaaaagaatttgaaagcaaatcacaactcttcactctgtaatctttttatccagtcggttgttatcaaagatctgataaaaagaatttgaaagcaaatcacaacgaaggcacatgaattaaagggagtagaagagttgttatcaaagatctgataaaaagaatttgaaagcaaatcacaaccatcttactacaagcacaaacgatggatttgttgttatcaaagatctgataaaaagaatttgaaagcaaatcacaacgcttgccggcagttgtttcattcattgcgttgttatcaaagatctgataaaaagaatttgaaagcaaatcacaacaatatggatggaaattaaaaaacggagggagttgttatcaaagatctgataaaaagaatttgaaagcaaatcacaacgtacatttaattgctaatattttagttaaagttgttatcaaagatctgataaaaagaatttgaaagcaaatcacaaccctgcttcaaacacattattatcatttacagttgttatcaaagatctgataaaaagaatttgaaagcaaatcacaacaaagttttttttgttttattttgaaaaaatgttgttatcaaagatctgataaaaagaatttgaaagcaaatcacaaccggggtttgatgatttatgaataactgaacgttgttagtaaaaatcgaacaaaatgtatattacagcctattccctactgaatgactgccaattttataaaaaatgaatcattttcctgcggattgcccccttccaaaaaaagctattttccgcaaactacccatcactaactccaaaccttttacctttgtaatacctaccctttaaacccattaattgaaaatgatagccattgataatgttttaattagcgatgccgtaatagaagaacaatttgtgtgcaatttgaatcaatgcaaaggcggttgttgtgaagatggcgatgcaggtgcaccattagaactagacgaattgaaagcaataaaagccagcattgccgcagcaaagcagtttatgagtgctgcagggctgaaagaactggaaaaacagggcgaagcagtgtacgataaagaatttggctgggtaacccccaccattggcagcggtatttgtatttatggtaaacgtgatgccaatggcgtaattctctgtgcttttgaacaagcgtatatgcagggcctaacccaatggaaaaagcccatcagctgtcacttataccccattcgcatttcggccagtaaaaaacatacggatgtggaatatgtaaattatgaaccaagagaaacaatgtgcagcccggcttgtgcgctgggtaaacaactaaaagtaccggtatatcttttcctgaaagatgcactgattcgaaaatatggcaacgaattttatgaagctctggcagccaccgccgaaaatatacgtatggccaaaaaataattttatgaatgtaaattgcaagtgtttatcagcattaaattgaacgggtatgaacaaaaatgcagcaggttttattgccaaaagtaccattaaagcacccgatttagagcatcgccgaaaaattaatttcaatatagggaaatacaatgctgccgttccaaaagggcaacaacaatttgccaacctgccgttagttcgcgaaaaagccaaaaatattaaatggcgggccattgaacatttagatactttattagaacaattcgaaaaacaaataacagcccgtggtgctgaggttatatgggccgaaaacaccgaacaggccctggctgccattggcaatatttgtaaagctaaaaactgtactactgtggttaaaagcaagagtatggttaccgaagaaattcacttaaaccattttttagccagccatggtattgaaagcatagaaaccgatttaggcgaatatattcagcaattagatggcgaaccaccctatcatatagttacacctgccatgcacaaaagcaaggaagatgtggccaaattgtttgccgataaattgggcgttcccggcggattaaaccccgctgaaattacgcagatagcccggcaaaaactgagggaaaaatatactgcagcgcaaattggtataaccggtgccaattttattctggccgatattggcggtattgcacttaccgaaaatgaaggcaatgcccgtttaaccacagcctggcccaatacacatattgtaattgtgggtattgaaaaagtgttaccctcggtgtatgacctgcctttgttttggcccttactggcatcgtttggtacaggccagcaaattaccgtttacaattccattattaccgggccgcggcaggccggtgaaacagacggaccggaagccatgtatgtgatattattaaacaatggccgcaccaacctattggccaatgcaaaaacccgtgaagcattgtactgtattcgctgcggtgcctgtttaaatgcctgccccgtatataaaaatattggtggccatagctatgaaaccacctacagcggacccattggtagtgtcattacaccgcatttaaatgggatgaaggattacgaacaccttagttttgcctcatccctctgcggtaactgcacacaggtttgtccggtacgtattaacctgcatgaattattgttagaaaacaggctcgaatcggttcaggatggcaatagcttactctcagaacgtttggcctggaaagtatggaaaatggccagcctgcacagaggcatgatgaatacaggcaatggaaagctgaaaaacaaaatggtgcatcaattattcaaaaactggaccaaacacagaaccccattacagtttagcccaaaaacttttaatgagttgtggaaagaacaggcacaaaaacagtagtatacattgcctatgaaagctgctaagcccacacacttgctgtttgcaaaagagccctcgcccaggttaacctatattatagaaactttgttgggcaaacattggcaaattacacacaacctgcacttttttgaaaaatgtaaagccattaaaattaattactctaccttaacggttcagtgcccatgcttgaatgttattccgcacggactgttacaccaaaccgatatacacaaacaacggatatatattgacaattggtttaaaccacccgtttttttttgttttgcgagtgaattaggctttgatatttttgctgcatcattttatttactatcccgttatgaagaatacttaccacatgaaacggatagttttggccggttcccggccaataaaagcttagcctatcgtgaaaattttctccaaatacccttaattgatttgtggttacaacagtttgaaaaaaagatgcaatgcctgtttccggcataccggttaccccaacgctcatttgtatttattccgggttttgatattgatatggcatataaataccattaccggggaatcataaaaaatatggccgaatttttaaaagccatgataacaggaaatgttgaagcaattacagaatcagcacgtgtattgataggtaaccaacgtgatccgttttacgtatttgatgagataactcaaatattagctgcccaaaacctgccggcactgttcttttttttagtgtcacaaaaaaaacatgcactcgataaaaacatagcaccgcaaaaaaaagggatgcggctgcttatacaacaactcagcaaacaatttgaaacgggcattcatttatcggtacaaagcagtatggcaccgaacccggccgcagctaagcaggaaataaaaacccttatcaaccttataaaatcgcccattaccaaaaaccgatttcattacttacactttcatttaccggaaagctatgaacaactgattaaattaggcattaccgccgactattcaatgggatacagtacggcaaatgggtttagagcatcctatgcacaaccgtttcaatggtatcatttaccaaaagaaactaccacccacctaacggtttaccctttttgctggatggatactgccgctatttttcaacaaaagctaacaccgcaggcagcttataccgaattacagcaattaattacaataacccaatcagtaaatggtttttgtatgccggtatggcataatcactgcattagtaatgagcggaatatgagcgtttggaaacaggctttttacaatttttttagaacactttaaattgaggtactacatgccctcggcatcggcaatggtcattgtatgaatttgtacacttctattcactatatacacacccgccagcgtaatcagcgaaccaacaatatttgtaaaagttaaaggatcattcaataaagcagcgccaattaacaaggctacaattgggttaatgtatgcatacaatgcagccaccgaaggtgttaaatgttccatggtatacaaaaatgctttaaaagccaggattgaacccgctacaacaagataagccatggcaaaccatgaagtaagagtaatttgatgaaatggaatatgattaccggtaacaaatgccaggaaacctataaaaaaagaagcagcaaccatttgccaacccaaagcatattgccgatgcatttgtaaagtgttgccggccagcaaaatagtacctacactccagcccagcgtagcaataaaacatagtaaaatgcccttccaataatgcgaggtgttttgatgtatggcattttcataaaataccagtacaataccgcctatacccattgccagccccaaaaaagtggcagggcgtgctatattttttttgaagaaaataatttcaatgagaacaacaaataatggatacatagctgcaatgagtgcagccatacccccggaaatataattaagcccccaggtactcactccattcgataaaaagaacgtaaaaaaacccattcctgctaaaaatacaaattgcctgcgtgtaggtagtggttgccccttagccataaaataacctattatcaataatccagcaatgcactgccgtatggctgaaaattgtaaaccgggtaaggtgcctaccccaattttactggcttcccatgtactgccccataaaataccggtggcagcaaaggcaatataggctttggtttttgtttgcatgatgtataaaaagccactgataaaata

SEQ ID NO: 288 - DNA, 24248 bp, synthetic construct
  source 1..24248: mol_type = other DNA
  misc_feature 1..24248: note = Synthetic
aacgaatgattgacaggaagttttttattgtaaatatttgataaataaccaaataaagagattaaaaagttatttcatagactaattacggatttaaaaaagtttttctctctttctggtaaaagccatcaaaaatataaaaaaactcaaaaaataagcaattcgagctatataatcgccccattttacataaagtgtgagctcgttattgagttgaaactctgcctttaaacttccttgtttttggtaaggcaaataagcaataatgtcgcccctttgattgataaaggcagaaatacccgtattggcacttctggcaatggcacgacgggtttccaccgctcttaggcgcgtataactgagcagttgtttatgtccttgggtgtttttccaccaagcatcattggttaaaatagataaaaagttagctccgttttgaatatatccgttaacaaattcgccataaattgattcataacaaattacaggagcagctatcccagaggtgttattccctttgaaaacactgcgttgcggttgtgtcgtttttagggctactgttccgcccaaatcgataagggtttctccaaaaataggttttaatactccttgatacggaaaattttctacccccactacgagtttggatttgtggtataattctgtatttctttgtttattaactagtaaagcggaattatagtcgttataccaaatgccgtcgcgccaataattgctttgtgaagtcttttgcgaagcgtcagaaaagaaatcaatcatagctaaccccaaaattacgttcagatttgggtttttatttacataggattgcagtaaggtcagagggtaagaatgagacaaatcttgcaaacgaatattgtcggccaaaacggtttcgggagtaatgagaaagtgaacgttatcatctattttatcttggcataaatcaatgagcaattgtatgatttgttcgttggaaaaaacatatttttcggtgtaagggtctatattgggttgcacgactacagccgaaatcttttcacctttttcttgatgatttatatacatcacatacgaaatgatgataggcaaagcaaatagtaaaactacagttcctattccttgggataaatatctcttattacgatattttaaaaaatgatctaaaacaagaaataatactacatttaccgtcagtatccaaagtgagccaccaaaggctcccgtaaattcataccattgtatccaagcgatttgctcggagaaaacatttcctaaatgcaaccaaggccaagatacgtcccaagagagatgaaatttttcaaaagacaaccagatgcaaatcaggaaaatataggctattttaggttttgttcgtttagctacaatgtgaaagatcataaaagtagccgacatcagtagcgtgttggcagcaatagcaaataccgctcctgcttttgtggaataccagagccaccaagtgatgaagatattccaaatcaaaaaggataaatagcttaaaaaaaagacttttcgtttggtgcgttttgctgaagcacgaagttttttttcaacaaacaaaagtgggacaaatgccacgaaaataaacgcagaatatccgtatgtgggccaagccaccgataaaagcaaccctgataaaactgccagtaacaaattctttttcatactaatagaatacgattcttttaagaaaatccgaaacgagctaccgtattgagtttcccgattaagttttgtgcaacagcactcgaatacatttttttccgatatttggtaacaggctgaatacctacaatgctgtttgaaatgaataattcgtcagctttttgaagttcaaagggtgaaatggaagtttctaccaagtcaaattcagtcgtttttttaaggattttcaacaggatttgacgagtaattccgtttaagcaaccatcggtaatgggtggcgtttttatggtattgccttccaccataaaaagattcccgtttaaagcacacgccaaatttttgctgttattgagcagtaaacaattctgataatcattttcttgggcaaatacggaaccaatgatgtgaattgccttattggtatgctttacatttgccaataaatcaggattgatgtaaaaatctttaaataattccacctcataaggttcttgattaagttcaaaaaacggttttttaagttcttgaacttcaatgataaaatctacttcgttagttgatggggtgtacaatccgcctgattttctaaaaacggtaatacgaacccgagcggaagctttttccaatcgattttcttcaagtaacttaaaaacctctccttcaaaaaattccatcgtaaaactaattggaatttccattcgtaaaatgcgcattcctgccatcaaacgcaaataatgctcttcccaaaaaagaagtttttgataaacgtatttggaagtatcgaaaacggcatcgccaaacttaaatgccctattttcagtagcaaaagaagcctcaacaaggcttccgttaaaatttattttcatactacaaaaatatatcaattagatagaacctaatacgtgcttaagttctgctatttgattattccacaacattttagattcctgcatttcaatttcatcatcagcaaaatccgtgatgattaaagatacatctttggtaatttcatcaacaacaatgagcatttcaaaataagaatcgtcttctacgtgtaaccaacgaaatttgaccaattcatccattttttttcgtagaagtttggctttttcttcggcttcatcccatataaaggtgtaaatatctccctgaacatttacattatcagcataccaacctgaaagccccgaaggcgatgaaatatactgatataacaactgtggcgaagcgtgtataacaaactccaattcatactttatcttatctgtatgcataatatttttaatgaaattaaataatcggttgggcaatatataatttttaaattaactatgcaaaataaaagtaatgttttacagcttttatttactatttaaatacaactatatgaaaataaatgtcttacgtgaagaattaaataaaaaagttacaaatcaaaaacagaactacgtttggcgtaaaacaaatctttcattcgaagtaaaaaagctaaaagtaaataaacgccaaaccaagcaccaagtgtagcgaaagtaccataaatgaaaaaaagacgcacatctttagcacgtaagcctaaacgctcagaaagccgcgatgaaaccgcaaaaccatagcgttcaaggaaaaagcgaaatcgggaaaactgcatatttgtttgttgttgagtttcattttgccaaagatactttcttaatttgaaattcagaaaaaaaaatcacgttttatataaattcctatttctttcctaaattcagttgttaatttgcaccgtaattaatattaaaaaataaataagatgaaaacattttctaaaattgttctgattttcgtagctttttttgcctttaatactgtaacggcacaaaatcaaattctgacctttgagcagttgcctcaaaaagctcaaactttcattaaaaagcattttgcagataaacaaatcactactgtttatgaacaaaccgaatttttacaatcaaaagaatacaatgttattttttctgatggcgttgaaattgaattctattctaacggagattgggaagaagtaaactgcaaaaactctccagttcctactgaaattattccacaatctatttcacagtacgtacagagaaacttccctaatgtttttgtaaaagaaattaaaaaacgtagaaatggttacgatgtggagatttctaatggattggatttagaattcaataaacaaggaaagtttgtacgaatagacgactaaaaagagctgtatttttgaatttggagtcacttaattttttaagtggctctattttttggcattatttttgttgcttttccaaaatatataaatttatacttttaacaataaaaaaatacagttatgacaaaaaaaattatggctattatggcttttgtactgctgggaagtaattttctttctgcacaggaaataaaatggatgactatggatcaggctattgcggcacaaaaaacaaaacctaagaaaatttttatggatgtttataccgtttggtgcggaccttgtgttatgcttgaaaagaacaccttcaaaaacaaagatgttgtaaaatatatcaatgataatttttatgccgttaaatttaatgctgaaggaaatgaggtggtaaattacaaaggtcaaaaatttgataatccgcactatgatcctgcaaaaagtactcgaagaaattcatcacatcagtttgcttctgctttgggggtacaggcttaccctacaatgatgttttttgatgaaaatgcagatcctattcttccaatttcaggatatatgaaaccttcacaaattgaaatttttcttaaattgatcgctcaaaacgattataaaaacctaaaaacacaagaagaattttcaaaatatcagagtgcttttaaagggacttttaaagactagtctttttaaaatctaaaatacagagattatttaatacataatcaggagtcaaacaaaaagcccaatttatattgggctttttgtttcttattttgttttaaaaaactacaaaaaaactcattttttcctttttgcggattatttaaaaatcacagatttaggtaagcatacctccgtcaacgttcaatacctgcccagtgatgtaatcacttatatccgaagccaagaaaacacaagcattagcaacgtcttctggggttccgcctcgtttcaaagggatattgtcacgccagccttgaataactttttcatctaattttgcagtcatttctgtttcaataaaaccaggagcaatggcattacaacggatgtttcttgagcctaactccaaagcgattgatttagtaaaaccgagcatacctgcttttgaagccgcatagtttgattgcccagcgtttcctttaacccccaccacactactaatgttaattatagaacctttacgttgtttaagcattgtgcgttgtacagctttggtcatattgaacacagattttagatttacctcaataactttgtcgaaatcttcttcactaatacgcatcagtaggttgtctttggtaattcctgcattgttaatcaaaatatcaatgctaccaaattcggcaagtacttcatcggctaatttttgagcttcttgaaaatcagcggcattacttttgtatcccttagcttttatcccttcttggttaagttctttttccagctcattggcagcctctaccgaagcactatatgtaaatgcaatattagcgccgtgttttgcaaaaatttgagcgataccacgcccgatacctctactagctccagttataatggctgttttgcctgttaataatttcataatactatttaattttaattatatttttctttacagaatatcaattcgattccaaagatactgataaatttttaaatctgttttttaaacgatgtttttaataaatctaatttcgcttttgagagaattttattacgaattgacagatttttttgtactttaataacagatgataattaagtaattatggtgtttaaagcattgtaaagcagatgtgtaggaagccccattacgttattgtacgacccttgaatacttgtaacccctaccgagcctatccaatcttgtatgccataagctccagctttgtcgtaaggcatatatttttctatatagaagttgatttcggcatcggagagttttcttagtgttactttggtggtatctgtcagaaccatttgttgggcggaagtggttaagcctacagaagtaattacttcgtgctgtttatcagaaagtaaactcagtatggcttttgcttcgttgtgcgattgaggtttccctagtgctttgtcttcacaccaaacgatggtgtcggacgtgattaaaatatccgttggagttaatgtatttttaaaaggttcggcttttttctttaccaaaaattcggtaatctcttcccttgttaaatgcttaggataggtttcttctactggttttataaccacatcaaaatcaataagtaaatcttttagaaattgttgtctgcggggcgaagccgaagctaaaataatgtgataatttttaatcttttcgtataacatattctatattaaaacgttatttttcgatgtatatgaggtattttttacggatttttaaaaacttgtttaaatctttttgccaagtttttcggatttcatcttccgtcattttatttacaatttgtttttttaattcaggagttccagcgagtttatcgaaaaaagagttaaaaaaaacagttttaactccaacactttctgtgtgagctttttgaagccaaatcaagttcaattttgattgacgtggtgtagcacttaaatcttcaccatagcaaacttgtccttgatatagtggttttttatctcctacatttggggcaggaacgaaagagaaattcgttttgtttaaataaggtgcaccatagatttgaaattgcatttcggtacctcttcccacactgatatgggttccctcaaaaaggcataggctagggtagaggttaatggctacagcgttgggcaaattcggcgagggacgaacgggtaaatcatacgcctgttcgcgtttataaagcgcaagaggaattacgcgtaaaggagcttttattgcctttgaaagccaaccttcgccattgatcatttgagcatattcaccaatggtcattccgtaaacaatgggtacggggtgcatacctacaaaacttttttggctggatttcaatactggcccatccacataatgcccgtttgggttaggtcggtcaagtacccatatcggaatgttttgttcagcacaagcctccataacataatgaagtgtagagatataggtgtaaaaacgcacccctacatcttgtaaatcgaacaatacaaggttgatgccttttaggtgtgctacggaaggttttttgtctttgccataaagagaaatgattgaaattccagtttttgtatcttttccgtctttgatgatttctccagcatcggcatttcctcgaaagccgtgttcaggagcaaatacttttacaatgttgattttgtgttgcaataaggtatccaccaaatgtgtgtatgttcccaactgagtttttaccactcccgtttgattggtaacaatggctatgtttttatttttgagttccgataggtacaattccatacggttagcgcctaatatcaattccgaaggtgtgggtggattggctactgaagtatttttttgttgattttgtccattatttttgcacgaaaccatcaaaagtaagcaaaaaaatgtaattttgggttttattaaaaatcttgaaacattgaattttgaatatttcatagcgaaacgaattattttctttagaaaggataaagatacagtatcttctccgattatcaaaatggctgtggctgccattgctttagggattgtggttatgctcattgccattgctacaggaggaggcttacaacaaaaaattcgtgaaaaaataaccacctttaatggtcatatccagatttttaagtatgatgctaaccattcggaagtgtcggtaaaacctgtttcgatacatcaagatttttatcctaatttttcagatattcctcaggtgaaacacattcaagccgtagcatcaaaaggagggattattcgtaccgaaaatacgttcgagtccatcatagctaaaggggtaggagcagattataattgggataattttcgccaatatatcacctcaggtcaaatccctgattttaaatccgatgaaattagtaatgaaattattatttccgaatatttagccaacagattaggattacaattaggcgatttttgcaataccttatttcttaaagatgaaaattcacaaatgcctaatcagcgtaattttaaaatttcagcactttacagtagcggatttcaagattttgatgcactatatctttttaccgatttgaggcaaattcagcgtatcaatcgttggcaaaatgatgaagtgggtggttttgaggtatttatagatgattttgaccaaatagaaatcatagggcaacaaatttatgagcaaaccctctccacgttggatactcaaaccatcgtacagaaatttccttttatttttgaatggctcggaatgttcgactttaatatatatctgattatcattattatggttatcgttggcggatttaatatgataacagctattctcgtcttaattctggaaaaaacaccaatgatagggattttgaaaagtttgggagcttccaacaaaagcattcggaagatatttttattcaacgctgcttacatcatttccttaggattattttttggtaatgttatagggctaatattgttatatttacaacataaatatggctttataaaattagatcctaacacctattatgtttcacaagttcccatagatatccatcctttaactattgttattttgaatgtaggagtactgataatctgcttattgatattgttactacccacttatattgttgctaaaatttctcctgccaaaacaatgaaattttcataaatgttttatttccagcaattttcagcacttttttcgccccatataagtgttgccaaatacggattgtcaataaacggattacgattgccttgtgcggcttcaataacgttatttctatttttttcgatgtatgaaacagggtcttctgcgttccattttagtaataattctatacttcctgttgaaatatcgcttcccatattttcgttgtatctgatattcaagtagagtaccattctggctacatcgcctttccattcatcaccaggataccaacctcccccgatttgtcttgcttgtccttgtccttgagtgaaaggtaaattaccacgattgctattgaccttagtatcacaagcgcgtagatgatgtaagtcagcctgggcggtgctttctatttttgatcttggatacacgtgttcagtattgaaagtttgtgggtgataattacttccttcgtactccttccaataacgtttctctcctgtatataatagtactacctgattttcattgtcttgtgaacgatctgctttataaagataagcgtgtctttcaggatatttcaaaaaggtagcgtgtttgccgatggttagtgtagcgagtgcatcgcgtagttcttggtttcttttggaaaaatcaacgtctttgtaataagatttcaattcagaaggaatattaaaagaggtagaggtgttcccatttgaagaagtagtaaacgaaaaatctactttggtgttgcctcctttgccatcggttgctgtgacaaatccttggtaggttttgttttgagttaaatgagtgaatgtatagtttaatcggttaattgtcgcgatgttttttccttccagctcgatgatatattgcacattatcgccgtcagggtcaaccgattggctccacgaaatggtagccacttcttggtttacaattgtattttcaacacgaaacgattcaggggctcgattattttgttgttcattgctgttacaagcaatggcaaaaattactataaagtaaaaaatatttttcatatcaattttatggtttgcattgcaaagatatgaaaaaggattttaagaaaaagccccgcagataggcgaggcactagatgttttcacaacggaataatccttattgtaaattgctttctgccgcaaagatagaaaaaaataattgaatatcaaaaataattaactttttatttgtattttcatacccgttgatttttaaactattaactatgaaacacatactaggtctcgatttggggaccaactctatcggttgggcgttgattgaaagaaatatcgaagaaaaatacggaaaaatcattggaatgggaagcagaattgttcccatgggagcggaattaagcaaatttgagcaaggtcaagcacaaaccaaaaatgctgacagaaggactaatagaggagcaaggcgacttaataaaaggtataagcaaagaagaaataaactgatttatatcttacagaagttagatatgttgcctagtcaaataaagttaaaagaagatttttcagatcctaataaaatagacaaaatcacaattttatctataagcaaaaaacaggaacagcttacagtttttgatttggtaagtcttagagttaaagctttgactgaaaaagtaggcttagaagatttaggtaaaattatttataagtataaccaacttagaggctatgcgggaggtagtcttgaacctgaaaaggaagacatttttgatgaagaacaaagcaaggataagaaaaataaaagttttatagctttttctaaaatcgtttttttaggtgaacctcaggaagaaatttttaaaaataaaaaactaaataggagagcaataatagtagaaacagaagaagaaaattttgaagggagtacatttttagaaaatataaaagtaggagattctttagaacttctgattaatattagtgcaagtaaatcaggagatacaataaccataaaacttcccaataaaacaaattggagaaagaaaatggaaaatatagaaaaccaactcaaagaaaaatctaaagagatggggagagaattctatatttcggagtttctattggaacttctcaaagaaaaccgatgggctaaaattagaaacaatacgattcttagagctagatatgagtctgaatttgaagccatttggaatgaacaagtgaaacattatccatttttggaaaaccttgacaagaagacattgatagaaatagtatcatttatctttccaggggaaaaagaaagtcaaaagaaatatcgtgaattgggacttgaaaaaggattgaaatatataataaaaaatcaagttgttttttatcagagagagctgaaagatcagtctcatttgatttcagattgtagatatgagcctaatgaaaaagctattgccaaaagccatcctgtttttcaagaatataaagtttgggaacaaattaacaagttgattgttaataccaagatagaggcaggaacgaatagaaaaggagaaaaaaagtataagtatattgatagacctattccgacagctttgaaagaatggatttttgaagagttacaaaataaaaaagaaatcactttttctgcgattttcaagaaattaaaagcagagtttgatttgagggagggaattgactttttgaatggaatgaatcctaaagataagctaaaaggaaatgaaactaaattacaacttcaaaaaagcttgggtaaattgtgggatgtactaggacttgattctataaataggcaaatagaactgtggaatattctttacaatgaaaaaggaaatgaatatgatttgacgagtgacagaacttccaaggtcttagaatttattaataaatatggtaataatattgtggatgataatgccgaggagattgctattaaaatatcgaaaataaaatttgcgagagcttattctagtttaagtcttaaagcgatagagagaattttacctttggtaagggcaggaaagtattttaataatgatttttcacaacaattacaatctaaaattttaaaacttctcaatgaaaatgtagaagatccttttgcaaaagcagctcaaacttatttagacaataatcaatccgttctttcggaagggggggtaggaaactctattgcaactattcttgtgtatgataaacataccgctaaagaatattcacacgatgagttatataaaagttacaaagagattaacctattaaaacaaggagacttaagaaatcctttagtagagcaaataatcaatgaagcacttgttcttataagagatatttggaaaaattatggtataaagcctaatgaaataagagtagaactagcaagagatttaaaaaatagtgcaaaagaacgagctacaatccataaaaggaacaaagataatcaaacgataaacaataaaataaaggaaacacttgtaaaaaacaaaaaagaattgtctttagctaatatagaaaaagtaaaactttgggaggcacagagacatttatctccttatacagggcagccgattcctctttcagatttgtttgacaaagaaaaatatgatgtagaccatattatccccatatctagatattttgatgattcttttacaaataaagttatttctgaaaagtctgtaaatcaagaaaaagcaaacagaacagcaatggagtattttgaagtaggttctttgaagtattctatttttacaaaagaacaatttatagctcatgtaaatgaatatttttcaggggtaaagcgtaaaaatttgttggcaacttctatcccagaagatccagtgcagcgacaaataaaagatactcagtatattgcaattagagtaaaagaagaattaaacaaaattgtagggaacgaaaatgttaagacaaccacagggagtataacagattaccttagaaatcattggggactaacagataagtttaaattacttttaaaagaaagatatgaagctctattagagagtgaaaaatttttggaatcagaatatgataactacaaaaaagactttgattctcgtaaaaaagaatacgaagaaaaagagattttatttgaagaccaagagcttacaaaagaagagtttataaaagaatacaaagaaaactacataagatataaaaaaaataaacttatcattaaaggatggagcaagagaatagaccatcgtcatcacgccattgatgcacttatagtggcttgtacggaacctgctcatataaaaagattgaatgacttaaataaagttttgcaagattggcttgttaaacataagtctgaatttatgcctaattttgagggttctaattctgaattgttggaagaaattttaagtttaccagaaaaggatagaagggaaatttttacgcaaatagataaatttagagctattgaaatgccttggaaaggttttccagaacaagtagaacaaaaattgaaggaaattatcatctcacataaacctaaagataaacttctattgcaatacaataaggcaggggataggcaaataaaacttcgtggacaattgcatgaaggaacactgtatggaatttcgcaaggaaaagaagcctacagaattcctttaacaaaattttcgggaaaaaaatttgcaaccgaaaaaaatattcaaaaaatagttagtccttttttaagtggatttatagcaaatcatctgaaagagtataataataaaaaagaggaagctttttcagcagaaggaattatggatttgaataataaattggcacaatacagaaatgaaaaaggagaattgaaacctcataccccgatttctactgtaaaaatctattataaagatccttctaaaaataaaaagaaaaaagatgaagaggatttgtctttacaaaaattagatagagaaaaagcatttaatgaaaaattgtatgtaaaaacgggagacaattacctttttgctgtgatggagggggaaataaaaactaagaaaacatcacaaataaaaagattatatgatatcatatcattttttgatgctacaaattttttaaaagaagaatttagaaatgcccctgacaaaaaaacttttgataaagatttgttatttagacaatattttgaagaaaggaataaagcaaaattactattcaccttaaaacaaggggactttgtgtatttgcctaatgaaaatgaagaggtaattttagataaagaaagccctttatacaatcagtattggggagatttaaaagagagaggtaaaaatatttatgtagtgcaaaagtttagtaaaaaacaaatatattttattaagcatactattgcggatattattaaaaaagatgttgaatttggttctcaaaattgctatgaaaccgtagaaggtagatcgataaaagaaaactgttttaaactcgaaatagaccgtttaggaaatattgttaaagtaataaaaagataaaaatcaaaataatgagtgcagaattgaatatcacaggaaaatgcttttttttgtgaagagttggttgctaaaagtaacatcaatacccaccttaaaaagcatttaaaagaattgtcaaaaacggaaagtgatcaggataaaaaatcatatttgttaaagatatttacttatcctaattacaaaaattccaattattttctttatctgttggtagatggagagactacgatgaagaaagtagatcgttttttgagggatatttggttggattgttgcggtcatttgagtgcttttgcgtataaggggggaggaaaattaggaatgtccaaaaaacttaaagacgccttaaataaaggtgatgtattggaatatgagtatgattttggttctacaacagatctccaaataaaggtggaagaagaatatcctatgggggtaaaaagtaaagttttgcttttgagcagaaatgaacctttagaaatttattgtcaaaaatgtaaaaaacttccagctgttcatttgtgcgtggctcatttgtatgaagaccagtctcattttttctgtgaatcttgtgctgaaattcacgaaaaagaatgtgaaggttttttagattatgcttctatgcctgttgtaaattcaccaagaatgggggagtgtggctacgaaggaggtttcattgatttagaaagagatggtgttttcgagattaaaaaatagaaacctatgctctaccgctccatttacattggcaatccagcatatttgaagttgaaagaccaacagatgaaaatcgtttgtcctgaaaccaaagcagagaaagggagcgttccggtagaagatttgggtttgttgatgctcgaccactttcagattaccatttcccatcagctgatacagtggctgatgggaaacaatgtggtgattatcagttgcgatacccatcatctcccacacggacaaatgctaccgctccacggaaatgcgattcatacccaacgcataaaagaccagatagaagccagtgaaccgctcaaaaaacagctgtggaaacaaaccatagaatgcaaaatagccaatcaagtcgctgttttggaacgacttggaacttactccagtccgatgtatgagtatctcaaccaagtgaaatcgggcgacaccagtaatatggaaggcatcgctgcacagcactattggaaatacctcattcaccccgattttttacgcgaacgctacggcgattcgcccaatcagtttttcaattttggttattccgtattgagaagtatcgtggcaagagccattgtagaaacaggtttattgcccgttttggggatttttcacaaaaacaaatacaatgcttactgcttggcagatgacctaatggaaccttaccgtccttttgtggatttattggtcatccgatggttggaaaagaatcctgaagccgaagaactgaccaaagaagcgaaagcctattttttacaaatcgctaccaaagatgtgaaaatagacgagcaggtgcgtccgctattagttgcggtaaaatctaccgtttcctctctttacaaatgctatacgggcgaaaaaagacaaatttcttatcctaaaatgttatgaattccgaacgatttaacgcttatagaattatgtgggtaatggttttatacgatttgccaaccgagaccaaggcaatgcaaaaagcagccaatctcttccgaaaacgcttggaagatgatggattttctttatttcagttttctatctatttgaggcactgtccgagtagagaaaatgcagaagtgcataaaaaacgagtaaaaatgatgcttcccaaatacgggaaagtagccgtaatgacgattacagataagcagtttggtgatatggaaatattccattctaaagtacgcgaagatccgccacctacttaccagcagctcgagttattttagaaatagaatgaaaaaaatggatttactcagcccgatttattctttttttgctcaattttttatttctaaaaataaaaataatcctctgacagacagaggattattttttgaggttgtaactaatcacaaagttacggaaaattgaaagcaatttacaacgccaacttaagtagttttgataccgaattagttgtaactaatcacaaagttacggaaaattgaaagcaatttacaaccagaggcgaaatcaatgctttatctctgttgttgtaactaatcacaaagttacaaaatttcaattccgatagcactcactgaatatcattgaaaaaactaatgaagtaaagcaatttacaacgttcttggggaaaagccccataaggtactcgttgtctttatccgccttgtaaccaagttctaaaaatctgatataaatcaatggttttacttataaagatttcgatgattttactttttcattgcaaaaagaattcctaaatttgcatacttctttattgaaaaggaattttttacttatctgtttaatcatttttaataaattttaattataaacaatgaataaatcggtttatataatcactcctgatgcttatagcggcaagtcgttggtaagtttaggggtgatgcaaatggttatgcgtaatacacctaaggtaggttactttaaacccattttggagagtaaaacccagaaagataatcatattgctacaatgctcgcccattttaatatcgaaatggaatacgatgaagcctacgtatttacccgtgcggaggtagccgcaatgaaaaataaggggaagataggagaggtgtacgataccatcatcaagcgttacaaggctttggaaagtcgttttgactttgtcttggtagaaggtaccgatttggtagaggaaagcaacgtatttgatgttaatttcaacgctcttttagcacagagcttaaacattccagttttggcggtgcttaaagataatttttcatcggagcaggaactcatcgagcacgttcagatggaaatcaatagccttttggaagccgaagtacaagtcattggggcttttatcaataaagctaaaaatgccgatgaggatactaaagccaaactacaacaaacctttaaagagattcttttttcggtaattcctaatgaagaggagctgggcagaccaaccctaaaagaaattgctgaagctcttgaagccacttttctttataaaggcgaaaatatcaatgtaaccacacaaaaaaccatcgttgggggaatgcagttgcacaatttcttgcaacatatttccgagaattgtttggctgtaattcctgctgaccgttctgatttgattgtaggtacagtaacggcaagtaattccaccaattacccacgtgtggctggaattgtactttatggtggtttctctttagaaaaatctattgttaagattttagacgggactcacaaaataatgcccattatgctggctaaaagcggaacttttgaaactgccaatcgtatcggcaaaataaaatcgaaaatctatccagaaaacaccgaaaagatacgtttaagcattcaattgtttgaaaaatatgctgaagtggacggactcaacgagcgtatttcagctttcaaatccgataccattaccccacgaatgttccaatacaatatggtgcaaaccgcacgtaaagctcagaaacacatcgtgcttcctgaaggaacggacgaccgtattctgattgctgcttcacaattggcaaccgatgaactggtgtatctgaccattttgggtaataaagagaaagttatcgaccgtgttaatgcacttgggctgaaatgggacgaacgtcgcatatcgataaccaatcctatcgaaagtcctaaatacaaggcgtatgcccagaaattgtatgacttgcgtaaatccaaaggaatggaactccctcaagcggaagaccttatgcttgatgtttcttatttcggaacgatgatggtctttatgggcgatgccgacggtatggtatcgggagcggtgcatactacggcacataccattcgtccgtctttacaattcgttaaaaccaaacctggagtaaatacggtttcttccgtattctttatgttgttgcacgacagagtattggtctatggcgattgtgccattgtgcctaaccctactgccgagcaacttgccgaaatagctataacttctgccgattcggcaaaggctttcggtatagagcctcgtgtggcgttgctttcgtactcgtcaggaagttcaggcagtggtgctgatgtagataaggtacgtcaggctacagaaatagtcaaaactcaacgtcctgatttgttagtagaaggtcctattcagtatgatgctgccgttgaccccaaagtgggtaaaagcaaaatgcctgattcaaaagtagcaggacaagctaatgtgcttattttccctgacttgaatactggaaataatacctataaagctgtacaacgtgaaacgggcgctcttgctattggtccgatgctacaaggtttgaaaaagccagtaaatgacctaagtcgtggggctaccattcctgatatttacaatacggtgcttattaccgctattcaatcggtaatgaaagaataacatagcgttttcattttataatttatttttatagttgaaatgacaaaggcaacagcgatgttgcctttgttgattttaatcattagcgtatcagttttaaggtaataggcaataggtgataggcattaggcaatagtagttagtgatgaatagtaaccttttgcttgaggcttttttctttttcttttaagtatttctttctcttttacacttttagtaaattacttactatcaagctgagcgaagtcgaagttttaaaatagtttgaagataataggcatcagtgacaaatagtagtaactttttctttgaagcttgtttctttctccttatatcaagcttaaaggtcgaaatatgaagtaaaaagcgaagaacaccgagcttttagcttggaatatcaagcctaaagcttaaaatttttaacaaaaaggtagaatcattaagctaaaagctcaaagttttaagctttttggttaaagctttgagttcaaaggttaaaattttaacgaaaaagcttagtgtttcaagctttaagcttgaaacactaagccaaaagctacgaattataactaaatgacttttaaaaacatcctccgtatctttggtacataccctatttttacagatttcctcttttcaaagaggaattttagagtgcgaccaaactatatagattcagctatataagtttaggcgaggaagtgacagaagtgaagagtatcatagctaatggctaactgccttatttttaaggtatatttaacaataagatgtttaaaaaagacttatttttgttacaattctaaaaaaaaataatattatgagaaaaacaaatttccgcagtatgcttgctatcggtatgatagccgttgcaccgttaatgagtagttgtaataagagtgatgagtcaaccccagtggtagaaattaccgaagtacaaatcagtaagcctgactttacgatgctaataggcgaaactaccaccatcgtccctacgataactcctgagaatgccaccgacaaaaaacttacttgggtaagttctgctcctaatgtagctgaggtagatgttaatggtaaaatctttgccaaatccagagggcgagccgaaattaccgctactacgacaaatggtaaaaccgccacgtgtaaagttattgtactaaatgccagaatcaactctgtggaagctgaagacggctatatgattttagaaactggaaaatcggtaggagagcagatagcactttatatcaaagcagaccccaaataccgatatggtatatggatagaccttaataatgatggagagaaacaacatagtgaaacaaatataacttttgatcaagaaaagaactataccttaggggcaagaactataaccatttacggaaaaataactaccttgaattgctctaatggcaaactatacaacttgagtgtagaaaataataaggctttggaggagttgaattgtttaaataattcgctaactattttagatgtaagccaaaatacagctttacagaatttgtggtgtcaaatgaatttcctaactattatagatgttagtcagaataaggctttgaaaaaattggaatgttactataacagacttactactttggatattagtcaaaataaatctttaggatggctaagttttgataacaatcaaatcaaaaaggcggcaatgaatgccgtgttgggtgctttgcctgaacgtagtaccagtgatgaagcgaaggtttatatccaaatgaaagatagtgctgaggaaggtaatgagcttccagacgctgcgaaagtaattgaggcaaaaatgaaaaactggaaagtatatcagtttgaaaacggtaaagataaagaattgtaataagttatgagtgattgacttttagcaattggagattaggggatagataagttgggagttaaggaagaatgaaggatagtatttgaagtttaggatttttaattttgtctatgtataaagacctccttatccttggggtaacttctccaaagaggcaataggaaggaacctgaaacctaaaacctaaaacctgaaacctaaaacctgaaacctaaaacttgcactttgaaacttgaaacttaccccccttaaaattttattttttaaatctttaaatagcgatgagtagaaatttaatcagtgtagtgttgcccgagcaggtaaccacacaagtaagtcagaaactacaagagattaaggagttattggctccgtatatgggaaatcttactcttgaagaacgtgcctcgttgcctaaaatgggtgataaaacattggcatttgtaagtaaagtgtcagaatacatcaatagtaatcctaaatttgtaccttctatgcttaatacggaggaatttaaaaaagattttagtgcccatcaagggttattgcccatattggcagttacgcagcaggtggtagagcaactaaaagatactactatacttaccggacacgaagcctatgtacaagccttgtattattacggaaatgtgaaactttttgccaaaacaggcgatgctgaagccaaagccatttatgaggatctgggtaaacgcttccctaagggtaaaaaaggcgccaaacccgaagctcctaccttgtaaatcataattatttttcaaatggagtttaatttttaaatattcacagcctttgacggtttttagttgaaggctgtttttttagtttttagcaaatggcttactcttaagctgagcgaagtcgaagttttaaggcagtaggcaatagtagttagtgatgaatagtaaccttttccttgtttcttatttctttattctttcttaatttttttaatcttttaattttttaatgttgtatctttacgcccttaaaaggaagctaaaaatagttatatggaaatacttattataaattcaggaagttcatcgttaaagtatcagtttatcaatgcgcaaacgggtgttgctcttgccaaaggtttggtagaacgcatcggtattgaaggaagtaaaatcaaatatgtagctctgaaaaacgggcaagaagtagaggtaaagaaagaattgcctattgctaatcacgaagaagcgatgcaattagtttctgatttgcttactgaccctgaggtgggggtgataaaaaatccagatgaaattcaggttatagggcatcgggtggtacacggaggagaaaaattagtaaaacccacgctcattacccaagcggtaaaacaagagatagaaaaacttgttccgctttcgcctttgcataatccagggcacttgtcgggtatcaatgttgccgaaaagatatttaaaaaagccaagcacgtagcggtaatggataccgcttttcatcaaacaatgcctccaaaggcatttcgctatgccatacctaatgagttttatgaaaaatatggcattcgtgcttatgggtttcacggaaccagccataagtttgttgatgctcaagcacgtcagcaccttaataatccgaagataaaaaatattaccatccatttgggcaacggctcaagtatggcagcggtaaacgagcaaggacaatgtatggatacctctatggggcttacccctttggacggactggtgatgggcacgcgttgcggaagcattgacgcatcggtggtgttcttcattggtgagcaacttgggctttctttctcgcaagtgaaggatattttgaacaaacaaagcggaatgcttgggcttactggaagctccgatgctcgtgatgtttcggataaatatttccaaaacgaccctaatgccgtgctttgctatcaaatgtatgcgtatcgtattaaaaagttcatcggagcttacgctgcaatactcaacggattggatagcattacctttaccgctggattaggagaaaatgatgatttgttacgcgagttggtttgccaagagatggatttcttaggcattgagttagataaggataaaaacaagacgctcaatcgccccaaaaatacagtagagatacaatccgatagcagtcgtgtaaaaatcttgattattcctactaacgaagaattacaaattgctcacgaggcagtagctttaatacaagcaacaaaaaattaagtttaataactaaagaatgtaatatgagttcatttcctaaatttttattgggagataataccgattttccagatgcgatatttgttattcacaccgaatatcctcgatttgtgttgaatttggaaactgacgaggtggaatggttggaagaatttgacgaagaagataccaaagagcttgaaacagaggctgaaaatctcatcgaacaagccaatgccttttacgaaagagagatagaccgataccaaggataatatgcttgagtttatcattgagaaagacaagcaactttttttgtggctcaacggattaggaacaaattcgtgggataatttttggctgttcgtcagtcacaaattttcggcactgcctttgtatttgttgttgttgcttttctgttttagatatctgaaatggaaagcaacgcttcttgttttggtgggggtagcccttatggtggttgctaccgaccaattagccaacctattcaaatacggttttgaacgattacgtccgtgtcacgacccttcgttatcagaacagatacgtgtagtagtctgtggtggaaagtatggttatttctcagctcacgcagccagttctatggcggtggcggttttctttggtcttattttctcgcacaaaatacgtggtataaccactattttattgctatgggcggctttagtgggctatagtcgtatctatttgggggttcattttcctactgatgtaattacaggaatgcttattggtggtttggtaggatttttgttctatcttttgagcaaatgggctatacgaaagattgtaaatgtccaaatttaaaaacaaataaggtttatgaaatatagttttttgtttttggtattgttgtgtagtattgggtatgctcaatctcctgttcaggagaaggaaccgccctcgcatatcaaaaccatattattttcgggtaacgaaaaaacacattttccgattattcgtttaaacgaaccttttacacttcgttttgatgacttgaatgccgatgaagccatataccgatatcaaattacccactacaatgccgattggcaaccctcatctttgctaaagagtgaatacttgcgcggtatggatgaccaatacatttatccgtcaagcaattctaacaccactttacaaccatactcacattacagcatagattttccttccgaacatctgcgtattttgcttacgggtaattacttactgtcggtaacagaccaaagtggtaac

SEQ ID NO: 289 - DNA, 23348 bp, synthetic construct
  misc_feature 1..23348: note = Synthetic
  source 1..23348: mol_type = other DNA
taaacgaatgattgataggaagttttttattgtaaatatttgataaataaccaagtaaagagcttaaaaagttatttcatagactaattacggatttaaaaaagtttttctctctttctggtaaaagccatcaaaaatataaaaaaactcaaaaaataagcaattcgagctatataatcgccccattttacataaagtgtgagctcgttattgagttgaaaatctgcttttaaacttccttgtttttggtaaggcaaatgggcaataatgtcgcccctttgattgataaaggcagaaatacccgtattggcacttctggcaatggcacgacgggtttccaccgctcttaggcgcgtataactgagtagttgtttatgtccttgggtgtttttccaccaagcatcattggttaaaatagataaaaagttagctccgttttgaatatatccgttaacaaattcgccataaatcgattcataacaaattacaggagcagctatcccagaggtattattccctttgaaaacactgcgttgcggttgtgtcgtttttagggctactgttccgcccaaatcgataagagtttctccaaaaataggttttaatactccttgatacggaaaattttctacccccactacgagtttggatttgtggtataattctgtatttctttgtttattaactagtaaagcggaattatagtcgttataccaaatgccgtcgcgccaataattgctttgtgaagtctttagcgaagcatcagaaaagaaatcaatcatagctaaccccaaaattacgttcagattcgggtttttattcacatacgattgcaataaggtcagagggtatgaatgaggtaaatctttcaaacgaatattgtcagccaaaacggtttcgggagtaatgagaaagtgaacattatcatctattttatcttggcataaatcaatgagcaattgtatgatttgttcgttggaaaaaacatatttttcggtgtaagggtctatattgggttgcacgactacagccgaaatcttttcacctttttcttgatgatttatatacatcacatacgaaatgatgataggcaaagcaaatagtaaaactacagttcctattccttgggataaatatctcttattacgatattttaaaaaatgatctaaaacaagaaataatactacatttaccgtcagtacccaaagtgagccaccaaaggctcccgtaaattcataccattgtatccaagcgatttgctcggagaaaacatttcctaaatgcaaccaaggccaagatacgtcccaagagagatgaaatttttcaaaagacaaccagatgcaaatcaggaaaatataggctattttaggttttgttcgtttagctacaatgtgaaagatcataaaagtagccgacatcagtagcgtgttggcagcaatagcaaataccgctcctgcttttgtggaataccagagccaccaagtggtgaagatattccaaatcaaaaaggataaatagcttaaaaaaaagacttttcgtttggtgcgttttgctgaagcacgaagttttttttcaacaaacaaaagtgggacaaatgccacgaaaataaacgcagaatatccgtatgtgggccaagccaccgataaaagcaaccctgataaaactgccagtaacaaattctttttcatactaatagaatacgattcttttaagaaaatccgaaacgagctaccgtattgagtttcccaattaagttttgtgcaacagcactcgaatacatttttttccgatatttggtaacgggctgaatacctacaatgctgtttgaaatgaataattcgtcagctttttgaagttcaaagggtgaaatggaagtttctaccaagtcaaattcagtcgtttttttaaggattttcaacaggatttgacgagtaattccgtttaagcaaccatcggtaaggggtggcgtttttatggtattaccttccaccataaaaagattcccgtttaaagcacacgccaaatttttgctgttattgagcagtaaacaattttgataatcattttcttgggcaaatacggaaccaatgatgtgaattgccttattggtatgctttacatttgccaataaatcaggattgatgtaaaaatctttaaataattccacctcataaggttcttgattaagttcaaaaaacggttttttaagttcttgaacttcaatgataaaatctacttcgttagttgatggggtgtacaatccgcctgattttctgaaaaccgtgatacgaacccgagcggaagctttttctaattgattttcttgcaataatttagaaatttctctttcaaaaaattccattgtaaaactaataggaatttccatacgcaagatacgcattcctgccatcaagcgcaagtaatgttcttcccaaaataaaagtttttcatacacatatttagaggtatcaaaaacggcatcgccaaatttaaaagccctattttcagtagcaaaagaagcctctataaggcttccattaaaatttattttcatactacaaatatatatcaattagatagaacctaatacgtgcttaagttctgctatttgattattccacaacattttagattcctgcatttcaatttcatcatcggcaaaatccgtgatgattaaagatacatctttggtaatttcatcaacaacaatgcgcatttcaaaataagaatcgtcttctacgtgtaaccaacgaaatttgaccaattcatccattttttttcgtagaagtttggctttttcttcggcttcatcccatataaaggtgtaaatatctccctgaacatttacattatcagcataccaacctgaaagccccgaaggcgatgaaatatactgatataacaactgtggcgaagcgtgtataacaaactccaattcatactttatcttatctgtatgcataatatttttaatgaaattaaataatcggttgggcaatatataatttttaaattaactatgcaaaataaaagtaatgttttacagcttttatttactattttaatacaactatataaaaataaatgtcttacgtaaagaattaaataaaaaaagttacaaatcaaaaacagaactacgtttggcgtaaaacaaatccttcattcgaagtaaaaaagctaaaagtaaataaacgccaaaccaagcaccaagtgtagcgaaagtaccataaatgaaaaaaagacgcacatctttagcacgtaagcctaaacgctcagaaagccgcgatgaaaccgcaaaaccatagcgttcaaggaaaaagcgaaatcgggaaaactgcatatttgtttgttgttgagtttcattttgccaaagatactttcttaatttgaaattcagaaaaaaaaatcacgttttatataaattcctatttctttcccaaattcagttgttaatttgcaccgtaattaacattaaaaaataaataagatgaaaacattttctaaaattgttctgattttcgtagctttttttgcctttaatactgtaacggcacaaaatcaaattctgacctttgagcagttgcctcaaaaagctcaaactttcattaaaaagcattttgcagataaacaaatcactactgtttatgaacaaaccgaatttttacaatcaaaagaatacaatgttattttttctgatggcgttgaaattgaattctattctaacggagattgggaagaagtaaactgcaaaaactctccagttcctactgaaattattccacaatctatttcgcagtacgtacagagaaacttcccaaatgtttttgtaaaagaaattaaaaaacgtagaaatggttacgatgtggagatttctaatggattggatttagaattcaataaacaaggaaagtttgtacgaatagacgactaaaaagagctgtatttttgaatttggagtcacttaattttttaagtggctctattttttggcattatttttgttgcttttccaaaatatataaatttatacttttaacaataaaaaaatagagttatgacaaaaaaaattatggctattatggcttttgtactgctgggaagtaattttctttctgcacaggaaataaaatggatgactatggatcaggctattgcggcacaaaaaacaaaacctaagaaaatttttatggatgtttataccgtttggtgcggaccctgtgttatgcttgaaaagaataccttcaaaaacaaagatgttgtaaaatatatcaatgataatttttatgccgttaaatttaatgctgaaggaaatgaggtggtaaattacaaaggtcaaaaatttgataatccgcactatgatcctgcaaaaagtactcgaagaaattcatcacatcagtttgcttctgctttgggggtacaggcttaccctacaatgatgttttttgatgaaaatgcagatcctattcttccaatttcaggatatatgaaaccttcacaaattgaaatttttcttaaattgatcgctcaaaacgattataaaaacctaaaaacaaaagaggaattttcaaaatatcagagtgcttttaaagggacttttaaagactagtttttttaaaatctaaaatacagagattatttaatacataatcaggaatcaaacaaaaagcccaatataaattgggctttttgtttcttactttggtgtaaatactacaaaaaggttaactttttcctttttgcggattatttaaaaatcatagatttaggtaagcatacctccgtcaacgttcaatacctgcccagtgatgtaatcactcatatccgaagccaagaaaacacaagcattagcaacgtcttctggggttccacctcgtttcaaagggatattgtcacgccagccttgaataactttttcatctaattttgcagtcatttctgtttcaataaaaccaggagcaatggcattacaacggatgtttcttgagcctaactccaaagcgattgatttagtaaaaccgagcatacctgcttttgaagccgcatagtttgattgcccagcgtttcctttaacccccaccacactactaatgttaattatagaacctttacgttgtttaagcattgtgcgttgtacagctttggtcatattgaacacagattttagatttacttcaataactttgtcgaaatcttcttcactaatacgcatcagtaggttgtctttggtaattcctgcattgttaatcaaaatatcaatgctaccaaattcggcaagtacttcatcggctaatttttgagcttcttgaaaatcagcagcattacttttgtatcccttagcttttatcccttcttgattaagttctttttccagctcattggcagcctctaccgaagaactatacgtaaatgcaatattagcgccgtgttttgcaaaaatttgagcgataccacgcccgatacctctactagctccagttataatggctgttttgcctgttaataatttcataatactatttaattttaattatattttctttacagaatatcaattcgattccaaagatactgataaatttttaaatctgttttttgaacgatgtttttaataaatctaatttcgcttttgagagaattttattacgaattgacagattttttgtactttaataacagatgatagttaagtaattatggtgtttaaagcattgtaaagcagatgtgtaggaagccccattacattattgtacgacccctgaatacttgtaacccctaccgagcctatccaatcttgtatgccataagctccagctttgtcgtaaggcatatatttttctatatagaagttgatttcggcatcggagagttttcttagtgttactttggtggtatctgtcagaaccatttgttgggcggaagtggttaagcctacagaagtaattacttcgtgctgtttatcagaaagtaaactcagtatggcttttgcttcgttgtgcgattgaggtttccctagtgctttgttttcacaccaaacgatggtgtcggacgtgattaaaatatccgttggagttaatgtatttttaaaaggttcggcttttttctttaccaaaaattcggtaatctcttcccttgttaaatgcttaggataggtttcttctactggttttataaccacatcaaaatcaataagtaaatcttttagaaattgttgtctgcggggcgaagccgaagctaaaataatgtgataatttttaatcttttcgtataacatattctatattaaaacgttatttttcgatgtatatgaggtattttttacggatttttaaaaacttgtttaaatctttttgccaagtttttcggatttcatcttccgtcattttatttacaatttgttctttcaattcaggagttccagcgagtttatcgaaaaaagagttaaaaaaaacagttttaaccccaacactttctgcgtgagctttttgaagccaaatcaagttcaattttgattgacgtggtgtagcgcttaaatcttcaccatagcaaacttgtccttgatatagtggttttttatctcctacatttggggcaggaacgaaagagaaattcgttttgtttaaataaggtgcaccatagatttgaaattgcatttcggtacctcttcccacactgatatgggttccctcaaaaaggcataggctagggtagaggttaatggctacagcgttgggcaaattcggcgagggacgaacgggtaaatcatacgcctgttcgcgttgataaagcgcaagaggaattacgcgtaaaggagcttttattgcctttgaaagccaaccttcgccgttaatcatttgagcatattcaccgatggtcattccgtaaacaatgggtacggggtgcatacctacaaaacttttttggctgggtttcaataccggcccatctacataatgcccgtttgggttaggtcggtcaagtacccatatcggaatgttttgttcagcacaagcctccataacataatgaagagtagagatataggtgtaaaaacgcacccctacatcttgcaaatcgaacaatacaagatcgatgccttttaggtttgctacggaaggttttttgtctttgccataaagagaaatgattggaattccagtttttgtatcttttccgtctttgatgatttctccagcatcggcatttcctcgaaagccgtgttcaggggcaaatacttttacaatgttgattttgtgttgcaataaggtatccaccaaatgtgtgtatgttcccaactgagtttttaccactcccgtttgattggtaacaatggctatgtttttatttttgagttccgataggtacaattccatacggttagcgcctaatatcaattccgaaggtgtgggtggattggctaccgaagtatttttttgttgattttgtccattatttttgcacgaaaccatcaaaagtaagcaaaaaaatgtaattttgggttttattaaaaatcttgaaacattgaattttgaatatttcatagcgaaacgaattattttctttagaaaggataaagatacagtatcttctccgattatcaaaatggctgtggctgccattgctttagggattgtggttatgctcattgccattgccacaggaggaggcttacaacaaaaaattcgtgaaaaaataaccacttttaatggtcatatccagatttttaagtatgatgctaaccattcggaagtgtcggtaaaacctgtttcgatacatcaagatttctatcctaatttttcagatattcctcaggtgaaacacattcaagccgtagcatcaaaaggagggattattcgtaccgaaaatacgttcgagtccatcatagctaaaggagtaggagcagattataattgggataattttcgccaatatatcacctcaggtcaaattcctgattttaaatccgatgaaattagtaatgaaattattatttccgaatatttagccaacagattaggattacaattaggtgatttttgcaataccttatttcttaaagatgaaaattcacaaatgcctaatcagcgtaattttaaaatttcagcactttacaatagcggatttcaagattttgatgcactatatctttttaccgatttgaggcaaattcagcgtatcaatcgttggcaaaatgatgaagtgggtggttttgaggtatttatagatgattttgaccaaatagaaatcatagggcaacaaatttatgagcaaaccctttccacgttggatactcaaaccatcgtacagaaatttccttttatttttgaatggctcggaatgttcgactttaatatatatctaattatcattattatggttatcgttggcggatttaatatgataacagctattctcgtcttaattctggaaaaaacaccaatgatagggattttgaaaagtttgggcgcttccaacaaaagcattcggaagatatttttattcaacgctgcttacatcatttccttgggattattttttggtaatgttatagggttaatattgttatatttacaacataaatatggctttataaaattagatcctaacacctattatgtttcacaagttcccatacatatccatcctttaactattgttactttgaatgtaggagtactgatactctgcttattgatattgttactacccacttatattgttgctaaaatttctcctgccaaaacaatgaaattttcataaatattttatttccagcgattttcagcacttttttcgccccatataagtgttgccaaatacggattgtcaataaacggattacgattgccttgtgcggcttcaataacgttatttctatttttttcgatgtatgaaacagggtcttctgcgttccattttagtaataattctatacttcctgttgaaatatcgcttcccatattttcgttgtatctgatatctaagtagagtaccattctggctacatcgcctttccattcatcaccaggataccaaccttccccgatttgtcttgcttgtccttgtccttgagtgaaaggtaaattaccacgattgctattgaccttattatcacaagcgcgtagatgatgtaagtcagcctgggcggtgctttctatttttgatcttggatacacgtgttcagtattgaaagtttgtgggtgataattacttccttcgtactccttccaataacgtttctctcctgtatataatagtactacctgattttcattgtcttgtgaacgatctgctttataaagataagcgtgtctttcaggatatttcaaaaaggtagcgtgtttgccgatggttagtgtagcgagtgcatcgcgtagttcttggtttcttttggaaaaatcaacgtctttgtaataagatttcaattcagaaggaatattaaaagaggtagaggtgttcccatttgaagaagtagtaaacgaaaaatctactttggtgttgcctcctttgccatcggttgctgtgacaaatccttggtaggttttgttttgagttaaatgagtgaatgtatagtttaatcggttaattgtcgcgatgttttttccttccagctcgatgatatattgcacattatcgccgtcagggtcaaccgattggctccacgaaatggtagccacttcttggtttacaattgtattttcaacacgaaacgattcaggggctcgattattttgttgttcattgctgttacaagcaatggcaaaaattactataaagtaaaaaatatttttcatatcaattttatggtttgcattgcaaagatatgaaaaaggattttaaaaaaaagccccgcagataggcgaggcactagatgttttcacaacggaataatccttattgtaaattgctttctgttacaaaggtagaaaaaaataattgaatatcaaaaataattaactttttatttgtatttttatacccgttgatttttaaactattaactatgaaacacatactaggtctcgatttggggaccaactctatcggttgggcgttgattgaaagaaatatcgaagaaaaatacggaaaaatcattggaatgggaagcagaattgttcccatgggagcggaattaagcaaatttgagcaaggtcaagcacaaaccaaaaatgctgacagaagaactaatagaggagcaaggcgacttaataaaaggtataagcaaagaagaaataaactgatttatatcttacagaagttagatatgttgcctagtcaaataaagttaaaagaagatttttcagatcctaataaaatagacaaaatcacaattttacctataagcaaaaaacaggaacagcttacagcttttgatttggtaagtcttagagttaaagctttgactgaaaaagtaggcttagaagatttaggtaaaattatttataagtataaccaacttagaggctatgcgggaggtagtcttgaacctgaaaaggaagacatttttgatgaagaacaaagcaaggataagaaaaataaaagttttatagctttttctaaaatcgtttttttaggtgaacctcaggaagaaatttttaaaaataaaaaactaaataggagagcaataatagtagaaacagaagaaggaaattttgaagggagtacatttttagaaaatataaaagtaggagattctttagaacttctgattaatattagtgcaagtaaatcaggagatacaataaccataaaacttcccaataaaacaaattggagaaagaaaatggaaaatatagaaaaccaactcaaagaaaaatctaaagagatggggagagaattctatatttcggagtttctattggaacttctcaaagaaaaccgatgggctaaaattagaaacaatacgattcttagagctagatatgagtctgaatttgaagccatttggaatgaacaagtgaaacattatccatttttggaaaaccttgacaagaagacattgatagaaatagtatcatttatctttccaggggaaaaagaaagtcaaaagaaatatcgtgaattgggacttgaaaaaggattgaaatatataataaaaaatcaagttgttttttatcagagagagctgaaagatcagtctcatttgatttcagattgtagatatgagcctaatgaaaaagctattgccaaaagccatcctgtttttcaagaatataaagtttgggaacaaattaacaagttgattgttaataccaagatagaggcaggaacgaatagaaaaggagaaaaaaagtataagtatattgatagacctattccgacagctttgaaagaatggatttttgaagagttacaaaataaaaaagaaatcactttttctgcgattttcaagaaattaaaagcagagtttgatttgagggagggaattgactttttgaatggaatgaatcctaaagataagctaaaaggaaatgaaactaaattacaacttcaaaaaagcttgggtaaattgtgggatgtactaggacttgattctataaataggcaaatagaactgtggaatattctttacaatgaaaaaggaaatgaatatgatttgacgagtgatagaacttccaaggtcttagaatttattaataaatatggtaataatattgtggatgataatgccgaggagattgctattaaaatatcgaaaataaaatttgcgagagcttattctagtttaagtcttaaagcgatagagagaattttacctttggtaagggcaggaaagtattttaataatgatttttcacaacaattacaatctaaaattttaaaacttctcaatgaaaatgtagaagacccttttgcaaaagcagctcaaacttatttagacaataatcaatccgttctttcggaagggggggtaggaaactctattgcaactattcttgtgtatgataaacataccgctaaagaatattcacacgatgagttatataaaagttacaaagagattaacctattaaaacaaggagacttaagaaatcctttagtagagcaaataatcaatgaagcacttgttcttataagagatatttggaaaaattatggtataaagcctaatgaaataagagtagaactagcaagagatttaaaaaatagtgcaaaagaacgagctacaatccataaaaggaacaaagataatcaaacgataaacaataaaataaaggaaacacttgtaaaaaacaaaaaagaattgtctttagctaatatagaaaaagtaaaactttgggaggcacagagacatttatctccttatacagggcagccgattcctctttcagatttgtttgacaaagaaaaatatgatgtagaccatattatccccatatctagatattttgatgattcttttacaaataaagttatttctgaaaagtctgtaaatcaagaaaaagcaaacagaacagcaatggagtattttcaagtaggttctttgaagtattctatttttacaaaagaacaatttatagctcatgtaaatgaatatttttcaggggtaaagcgtaaaaatttgttggcaacttctatcccagaagatccagtgcagcgacaaataaaagatactcagtatattgcaattagagtaaaagaagaattaaacaaaattgtagggaacgaaaatgttaagacaaccacagggagtataacagattaccttagaaatcattggggattaacagataagtttaaattacttttaaaagaaagatatgaagctctattagagagtgaaaaatttttggaatcagaatatgataactacaaaaaagactttgattctcgtaaaaaagaatacgaagaaaaagagattttatttgaagaccaagagcttacaaaagaagagtttataaaagaatacaaagaaaactacataagatataaaaaaaataaacttatcattaaaggatggagcaagagaatagaccatcgtcatcacgccattgatgcacttatagtggcttgtacggaacctgctcatataaaaagattgaatgacttaaataaagttttgcaagattggcttgttaaacataagtctgaatttatgcctaattttgagggttctaattctgaattgttggaagaaattttaagtttaccagaaaaggatagaagggaaatttttacgcaaatagataaatttagagctattgaaatgccttggaaaggttttccagaacaagtagaacaaaaattgaaggaaattatcatctcacataaacctaaagataaacttctattgcaatctacgtccgacaccttcaattgttgcagttccgcaggacgaataaaacaataataagtagtcatgcaaaatacaaaaaagtgaaaatcatctgttttgagctgttgcaatcgctgtttttctttttcgttcaagacaacgcgttttttttcggtagtggttttcagtttaatatttttaacagggttatccgacagaaatcctttggaaataaagaaattaaacaaggcttttagttgtttaagccttgtattatgtgttcgtgacgaattatttttttgcaaataaatacaatccaaaaagtgagagcatatacgaatatcaatctgtgatataaatgttatatttttctgattttcagaaagatattttttaaaaagtattataaaaactttccaattacttaccgttgcaggtcgctttgcaccgtctttttcttctttttcaaggtttttgagaaaaaaatccaagcagtaaacaatggttttgagttcgtttttgtcggaaatttccaagaaaggcgaccaaccgctatatagcttttcatttatggtttctaccattttttgagcgaatttttgtcgctcttttttgttggaatgtttgggaactctgtttcgaaagcgttgaagtttgcccgtatgcggattttgagcataaaaaacgattagccaatcagttccgatacgaagttcagcaggtttgaagcctactatggggctttgggaattttgatacttgaaattagacatttttttatttagggctatgaaaatagtcctataactcactgtctttttatctgtgtcacacaactgacacagatacggcgcaaaaataagtgtatttatctgaatatcaaaatgttataacaattattttagttttctaccaaagatgtgaaaatagacgagcaggtgcgtccgctattagttgcggtaaaatctaccgtttcctctctttataaatgctatacgggcgaaaaaagacaaatttcttatcctaaaatgttatgaattccgaacgatttaacgcttatagaattatgtgggtaatggttttatacgatttgccaaccgagaccaaggcaatgcaaaaagcagccaatctcttccgaaaacgcttggaagatgatggattttctttatttcagttttctatctatttgaggcactgtccgagtagagaaaatgcagaagtacataaaaaacgagtaaaaatgatgcttcccaaatacgggaaagtagccgtaatgacgattacagataagcagtttggtgatatggaaatatttcattctaaagtacgcgaagatccgccacctacttaccagcagctcgagttattttagaaatagaatgaaaaaaatggatttactcagcccgatttattctttttttgctcaattttttatttctaaaaacaaaaataatcctctgacagacagaggattattttttgaggttgtaaccaatcacaaagttacggaaaattgaaagcaatttacaacgaaatacgttcataacactaatcgggctgtgttgtaaccaatcacaaagttacggaaaattgaaagcaatttacaacgaagacggcagcgtcattcaatcgcaatttgttgtaactaatcacaaagttacgaaaatttgaaagcaatttacaacctgtatttgctggagaaataggtagtggaggttgtaactaatcacaaagttacgaaaatttgaaagcaatttacaactagcgttgtgttttcgctatttctttggttgttgtaactaatcacaaagttacgaaaatttgaaagcaatttacaacagcgtttatcctttatccgaaaaaatacttgttgtaactcatcacaaagttacggaaaattgaattgcgatagcactcactgaataccattgaaaaaaaactaatgaagtaaagcaatttacaacaaaaccttttgccttaacagatacatagttgttgtaactaatcacaaagttacgtaaaattgaattgcgatagcactcactgaacaccattgaaaaaaaaataaaaactaataaagtaaagcaatttacaacgtccttggggaaaagccccataaggtactcgttgtctttatccgccttgtaatcaagttctaaaaatctgatataaatcaatggttttacttataaagatttcgatgattttactttttcattgcaaaaagaattcctaaatttgcatacttctttattgaaaaggaattttttacttatctgtttaatcatttttaataaattttaattataaacaatgaataaatcggtttatataatcactcctgatgcttatagcggcaagtcgttggtaagtttaggggtgatgcaaatggttatgcgtaatactcccaaggtaggttactttaaacccattttggagagtaaaacccagaaagataatcatattgctacaatgctcgcccattttaatatcgaaatggaatacgatgaagcctacgtatttacccgtgcggaggtagccgcaatgaaaaataaggggaagataggagaggtgtacgataccatcatcaagcgttacaaggctttggaaagtcgttttgactttgtcttggtagaaggtaccgatttggtagaggaaagcaacgtatttgatgttaatttcaacgctcttttagcacagagcttaaacattccagttttggcggtgcttaaagataatttttcatcggagcaggaactcatcgagcacgttcagatggaaatcaatagccttttggaagccgaagtacaagtcattggggcttttatcaataaagctaaaaatgccgatgaggatactaaagccaaactacaacaaacctttaaagagattcttttttcggtaattcctaatgaagaggagctgggcagaccaaccctaaaagaaattgctgaagctcttgaagccacttttctttataaaggtgataatatcaatgtaaccacacaaaaaaccatcgttgggggaatgcagttgcacaatttcttgcaacatatttccgagaattgtttggctgtaattcctgctgaccgttctgatttgattgtaggtacagtaacggcaagtaattccaccaattacccacgtgtggctggaattgtactttatggtggtttctctttagaaaaatctattgttaagattttagacgggactcacaaaataatgcccattatgctggctaaaagcggaacttttgaaactgccaatcgtatcggcaaaataaagtccaaaatctatccagaaaacaccgaaaagatacgtttaagcattcaattgtttgaaaaatatgctgaagtggacggactcaacgagcgtatttcagctttcaaatccgataccattaccccacgaatgttccaatacaatatggtgcaaacggcacgtaaagctcagaaacacatcgtgcttcctgaaggaacggacgaccgtattctgattgctgcttcacaattggcaaccgatgagctggtgtatctgaccattttgggtaatagagagaaagttatcgaccgtgttaatgcacttgggctgaaatgggacgaacgtcgcatatcgataaccaatcctattgaaagtcctaaatacaaggcgtatgcccagaaattgtatgacttacgtaaatccaaaggaatggaactccctcaagcggaagaccttatgcttgatgtttcttatttcggaacgatgatggtctttatgggcgatgccgacggtatggtatcgggagcggtgcatactacggcacataccattcgtccgtctttacaattcgttaaaaccaaacctggagtaaatacggtttcttccgtattctttatgttgttgcacgacagagtattggtctatggcgattgtgccattgtgcctaaccctactgccgagcaacttgccgaaatagctataacttctgccgattcggcaaaggctttcggtatagagcctcgtgtggcgttgctttcgtactcgtcaggaagttcaggcagtggtgctgatgtagataaggtacgtcaggctacagaaatagtcaaaactcaacgtcctgatttgttagtagaaggtcctattcagtatgatgccgccgttgaccccaaagtaggtaaaagcaaaatgcctgattcaaaagtagcaggacaagctaatgtacttattttccctgacttgaatactggaaataatacctataaagctgtacaacgtgaaacgggcgctcttgctattggtccgatgctacaaggtttgaaaaagccagtaaatgacctaagtcgtggggctaccattcctgatatttacaatacggtgcttattaccgctattcaatcggtaatggaagaataacatagcgttttcattttataatttatttttatagttgaaaagacaaaggcaacagcgatgttgcctttgttgattttaatcattagcgtatcagttttaaggtaataaggcaatagatgaataggcattaggcaatagtagttagtgatgaatactaaccttttgcttgaggcttttttctttttcttttaagtatttctttctcttttacacttttagtaaattacttactgtcaagctgagcgaagtcgaagttttaaaatagtttgaagataataggcatcagtaacaaatagcagtaactttttctttgaagcttgtttctttctccttatatcaagcttaaaggtcgaaatatgaagtaaaaagcgaagaacaccgagcttttagcttggaatatcaagcctaaagcttaaaatttttaacaaaaaggtagaatcattaagctaaaagctcaaagttttaagctttttggttaaagctttgagttcaaaggttaaaattttaacgaaaaagcttagtgtttcaagctttaagcttgaaacactaagctaaaagctacgaattataactaaatgacttttaaaaacatcctccgtatctttggtacataccctatttttacagatttcctcttttcaaagaggaattttagagtgcgaccaaactatatagagttagctatataagtttaggcgaggaagcaacagaagtgaagactatcatagctaatcgctaactgctttatttttaaggtatatttaacaataagatgtttgaaaaagacttatttttgttacaattctaaaaaaataatattatgagaaaaacaaatttccgcagtatgcttgctatcggtatgatagccgttgcaccgttaatgagtagttgtaataagagtgatgagtcaaccccagtggtagaaattaccgaagtacaaatcagtaagcctgactttacgatgctaataggcgaaactaccaccatcgtccctacgataactcctgagaatgccaccgacaaaaaacttacttgggtaagttctgctcctaatgtagctgaggtagatgttaatggtaaaatctttgccaaatccagagggcgagccgaaattaccgctactacgacaaatggtaaaaccgccacgtgtaaagttattgtactaaatgccagaatcaactctgtggaagctgaagacggctatatgattttagaaactggaaaatcggtaggagagcagatagcactttatatcaaagcagaccccaaataccgatatggtatatggatagaccttaataatgatggagagaaacaacatagtgaaacaaatataacttttgatcaagaaaagaactataccttaggggcaagaactataaccatttacggaaaaataactaccttgaattgctctaatggcaaactatacaacttgagtgtagaaaataataaggctttggaggagttgaattgtttaaataattcgctaactattttagatgtaagccaaaatacagctttacagaatttgtggtgtcaaatgaatttcctaactattatagatgttagtcagaataaggctttgaaaaaattggaatgttactataacagacttactactttggatattagtcaaaataaatctttaggatggctaagttttgataacaatcaaatcaaaaaggcggcaatgaatgccgtgttgggtgctttgcctgaacgtagtaccagtgatgaagcgaaggtttatatccaaatgaaagatagtgctgaggaaggtaatgagcttccagacgctgcgaaagtaattgaggcaaaaatgaaaaactggaaagtatatcagtttgaaaacggtaaagataaagaattgtaataagttatgattgattgactttacatttggagtagcttcaccaaagaggcaatagggaggaacttaaaacctgaaacctaaaacttgcactttgaaacttgaaacttaccccccttaaaattttattttttaaatctttaaatagcgatgagtagaaatttaatcagtgtagtgttgcccgagcaggtaaccacacaagtaagtcagaaactacaagagattaaggagttattggctccgtatatgggaaatcttactcttgaagaacgtgcctcgttacctaaaatgggtgataaaacattggtatttgtaagtaaagtgtcagaatacatcaatagtaatcctaaatttgtaccttctatgcttaatacggaggaatttaaaaaggattttagtgcccatcaagggttattgcccatattggcagttacgcagcaggtggtagagcaactaaaagatactactatacttaccggacacgaagcctatgtacaagccttgtattattacggaaatgtgaaactttttgccaaaacaggcgatgctgaagccaaagccatttatgaggatctgggtaaacgcttccctaagggtaaaaaaggcgccaaacccgaagctcctaccttgtaaatcataatgatttttcaaatggagtttaatttttaaatattcacagcctttgacggtttttagttgaaggctgtttttttagcttttagcaaatggcttactcttaagctgagcgaagtcgaagttttaaggcagtaggcaatagtagttagtgatgaatagtaaccttttccttgtttcttatttctttattctttcttaatttttttaatcttttaattttttaatgttgtatctttacgcccttaaaaggaagctaaaaatagttatatggaaatacttattataaattcgggaagttcatcgttaaagtatcagtttatcaatgcgcaaacgggtgttgctcttgccaaaggtttggtagaacgcatcggtattgaaggaagtaaaatcaaatatgtagccctgaaaaacgggcaagaggtagaagtaaagaaagaattgcctattgctaatcacgaagaagcgatgcaattagtttctgatttgcttactgaccctgaggtgggggtgataaaaaatccagatgaaattcaggttatagggcatcgggtggtacacggaggagaaaaattagtaaaacccacgcttattacccaagctgtgaaacaagagatagaaaaacttgttccgctttcgcctttgcataatccagggcacttgtcgggtatcaatgttgccgaaaagatatttaaaaaagccaagcacgtagcggtaatggataccgcttttcatcaaacaatgcctccaaaggcatttcgctatgccatacctaatgagttttatgaaaaatatggcattcgtgcttatgggtttcacggaaccagccataagtttgttgatgctcaagcgcgtcagcaccttaataatccgaagataaaaaatattaccatccatttgggcaacggctcaagtatggcagcggtaaacgagcaaggacaatgtatggatacctctatggggcttacccctttggacggactggtgatgggcacgcgttgcggaagcattgacgcatcggtggtgttcttcatcggtgagcaacttgggctttctttctcgcaagtgaaggatattttgaacaaacaaagcggaatgcttgggcttactggaagctccgatgctcgtgatgtttcggataaatatttccaaaacgaccctaatgccgtgctttgctatcaaatgtatgcgtatcgtattaaaaagttcatcggagcttacgctgcaatactcaacggattggatagcattacctttaccgctggattaggagaaaatgatgatttgttacgcgagttggtttgccaagagatggatttcttaggcattcagttagataaggataaaaacaagacgcttaatcgccccaaaaatacagtagagatacaatccgatagcagtcgtgtgaaaatcttgattattcctactaacgaagaattacaaattgctcacgaggcagtagctttaatacaagcaacaaaaaattaagtttaataactaaagaatgtaatatgagttcatttcctaaatttttattgggagataataccgattttccagatgcgatatttgttattcacaccgaatatcctcgatttgtgttgaatttggaaactgacgaggtggaatggttggaagaatttgacgaagaagataccaaagagcttgaaacagaggctgaaaatctcatcgaacaagccaatgccttttacgaaagagagatagaccgataccaaggataatatgcttgagtttatcattgagaaagacaagcaactttttttgtggctcaacggattaggaacaaattcgtgggataatttttggctgttcgtcagtcacaaattttcggcactgcctttgtatttgttgttgttgcttttctgttttagatatctgaaatggaaagcaacgcttcttgttttggtgggtgtagctcttatggtggttgctaccgaccaattagccaacctattcaaatacggttttgaacgattacgtccgtgtcacgacccttcgttatcagaacagatacgtgtagtagtctgtggtggaaagtatggttatttctcagctcacgcagccagttctatggcggtggcggttttctttggtcttattttctcccataaaatacgtggtataaccactattttattgctatgggcagctttagtgggctatagtcgtatctatttgggggttcattttcctactgatgtaattacaggaatgcttattggtggtttggtaggatttttgttctatcttttgagcaaatgggctatacgaaagattgtaaatgtccaaatttaaaagcaaataaggtttatgaaatatagttttttgtttttggtattgttgtgtagtattgggtatgctcaatctcctgttcaggagaaggaaccgccctcgcatatcaaaaccatattattttcgggtaacgaaaaaacacattttccgattattcgtttaaacgaaccttttacacttcgttttgatgacttgaatgccgatgaagccatatatcgatatcaaattacccactacaatgccgattggcaaccctcatctttgctaaagagtgaatacttgcgcggtatggatgaccaatacatttatccgtcaagcaattctaacaccactttacaaccttactcacattacagcatagattttccttccgaacatctgcgtattttgcttacaggtaattacttactgtcggtaacagaccaaagtggtaacctgatattctcacgcaaattcgtagtgtattcgccttcggtgggggtggaagtcaatatcaaacgctcacgcgatatgcgtttttttgataccaaacaagtggtacaattcaccataaaaggacaagccttacaaattcaaaatcctaaagagagtgtaaaggtaaccgttttacaaaattatcgttgggatacggcaatccatcatctcaaacctcagtacacgatgggaggtgaattcatttatcgttacgatgaacaagctgctttcgatggggggaatgaatttttatactttgaaaataaagacattcgtaccccttcctcaggggtgtatcgtgtagaacaaacggaatcttttcaccattatttatttacatcaataagcagagcaaatcgtgtatatacttataatccagatatc

SEQ ID NO: 290 - DNA, 22973 bp, synthetic construct
  variation 16117..16118: note = n is a, c, g, or t
  variation 13417..13418: note = n is a, c, g, or t
  misc_feature 1..22973: note = Synthetic
  variation 16270..16368: note = n is a, c, g, or t
  variation 16595..16698: note = n is a, c, g, or t
  source 1..22973: mol_type = other DNA
  variation 5505..5506: note = n is a, c, g, or t
  variation 10080..10081: note = n is a, c, g, or t
  variation 12956..12957: note = n is a, c, g, or t
tagattttcatagacttcagtaaaaagaaactgttttcgtttcagcttcttttttacaatacttctttttctggtcatttgtacaatttgtgtacatatggctaaacaaaaataagagacagcctcgctttgagctgtctctttttgcattctacaatagggaatgatttttaacaaataaccaaacctaacaggtttcaaaaacctgttaggtttatcttatatcatttttttatcaatgtaaatgatctgcttcccaatttttgatctgcttttgaacttcttcttattgtacatatctgcctgtataaattgcaataaaaatacatgtgaatgcaaaataatgtagggtagagatttttaattttaaaaaccttataggaataaaaaacacatcaaattatgaaaaaaaatatctcgaatcgggaggaccctgttctgggtacaagcggatctccagtgaacctgaatgtttattttgtgaaatcgggagagaccctggaaagtatttcatgggatttacatctcgaaaaccctaattatctccgtgaatatcataatgcacgatgcagccctttagatatagttccggaaaacggaacattaagacttctgcaaaagcttcacattcctgtatctgataaaatactaaggattaacagacagatccgggagaagggagaaagcctatgctatcttcttcccaatgggaaaattccattgaatatcaatctgatcaacggagattactttgtaaggcagaccgaaagtgatgatgcgatacaaaaatatgagtatgcttataaactgcatttcagttatttcaaaacaatacaggacaggcattatatccatttctcaatgagcagtttccaaaaagacggtgaagaaccggaagagaaaatcaatcatctggcggcagatctggtgaaaataatgtatccggtaaccttgatcctggatagctcaggaaactttgtagcagcagaatcttataaagaagtaaaagaaatgatccgtgaaatagaggctttgaaagcttatcatgccggagcttatgccgcttcccatattgaccagatgaaacaaaatatatcagattcacagaatatgtataggggcttaaagaagatactggcactgcaatttgttttcaataaattttaccaggcagaataccgttcagaagataccacattgccttatcgggatgagttttcatggcttgctcctgcttctcccattcaacttgaaatgattcataagaccttgttgcagacagatcctcagtttgttgaacttctgcaaactggcaagtccgtagattatcgtactgctcaggaattattttatacagatttcgagtatgatgaaagtatcagacctcattcagattctgtaaaggccaaacatcaggcaaaatatattttagatagtaaggacttttctatacagaaaattaaagcagagtttgatcttcagatgcctgattataagaaaaaaatgacttttgagttagaaaaacaaccttgataccaatacaaatacgatgatgtcagaaaatttatcagctcatgatggcaaacactttgtcattcaaaagggcaaagctcaatgtaatcagggaaatcagtttccccacttcagagtaacatcccatcaaaaacactattggaatacccaggatgccatagccgatcatcttgccgtaaccgaagatgatatacagtttgatcctcccgggccaagttttggagcctgtagattgaaacctacatcaggaggctatctgccatgcacttttgctgctgcaggaaagtggcaaaaagtgtatgaaaaaaccaaggtcatgaataagagctgtatttctgagatttctgaactgatgtgcagtaccggtgggaaaatcacaataaaggaacatggccagacttctgtgatgaaccggcagaatataacacaggcagatccgggaacctatcagatgattaatccattcttagacctgaaggaatcacaaaaggagctggaagaccctgatccggtttatgaataattttgaaaaattgagaggtatggcaaagttaactattacagggaataccgagcccagagtcggaaatacagagatatattccctttctgtagcagatggtcttacgttgttgaatcctgtgtcttttccgttggcaaagatacgctggaacatccatgtacaggataaaaaaggatggcggataacgaatggaaatttgaaggaaggcgaaatggtttcctatacatttacgaataagagtctcaaatacaaggctctgaagattgaagttgtcagaggaaaggataggggagatttgtatatcaggccacaggctgccgaaagccccaaaatagtcagtgtagaattgctggatattaattccaggcggattcccaaaggaaaacttctgcattataccgatacgataatagctaaagcctattgtgtagggatgtttgggcaaaaagtttcgtttagtctttgggaagatgacgccataggtaaagggcatgacccggtggtgaatatgatgaataagatcaatcagattcctgtcattggtgaggtggatcatgaaggggttgccagggttgttttcagattgtcatcttacacaatggctattcagatcgccaatatgggagttgcaagaggagataaaaacgaaggtaaaacccacgaatattatgtgactgcagaaaaggtctccaaacatattctaaagaccagtccgaacgtaaatgtagctaatcctacctatatccctccggcatctgaacaatccagtctaccaaagcatattcctcccggaaataacggatcaaaacaagattggccgaaaccgaaagaaaatacagccaaatttccacaaaccccggaagcccagcaacaggctgaccctgaaggaaacatcctgagtgccgaatttacagatggtatgggaaaacctttgaaaaatgcaaaaactggaaatatcgtttccattaaaataacttcccaaaatatgaaagggaagaatgtaaaaataaggatctgggaagaagatctgtcccgttacagcaatgatcttttgtacgaaatatccgtaaagttggcttatgataccactaacttcatcaatgggattactcttaccaaagaaatgtatactaaaggaaacgggtggggagaaggaccttcgcaggaatatttcatagaagtagaacatctcaatacttctgtaacttccagagtgatcccgataagtccggatgctgaacctgtgaaagtagatcctaatgattctcctgtgatgattaaggagccgaaacgggagaaaaaagttgaaaaagcatctggttgtatttgccagcaatatgatctagtctggggtaataagattggttgtaatgaaagaaaaaaggttattgaggttgccaaaaatctgaatatcgatcctaattggttaatgacggtgatggcattggaaacaattgaaacttttaggccatctatagataatggtgttggatatgttggattaatccaatttggaaaagaagctgctaaaacgataaagactacgcaagatcaattgatcaaaatgtcttttatagagcaaatggactatgtacagaagcatttagtctcccataaagcgaagtacaaaacattaacagacttatatttagcagttttatatccaagtgcttgtgggcatggttccgaaaaagactatgtagttttgcatggagcagcatatagaaataatccattattctttaaagaaaaaggtgaatgggaatgggcatataaaacaaacaataagggaaaacaaataaaatataaaaaagcaacagatccagatggaaatacctatgtgtgggaggttgcagcagcagctcaagaggtttataatcgaggattagatataaaagaaaatcaattcagctgtggagtaaataaagaagaaaaattccttaatgggaaatgtgcaaaagattgctcacaatgttttgaatatgcagacgtagtgagtaatcctaaagttaatgatcaaagtggtaataaaaaccataatcggtatcataaagcacaaagaacacgttcagatgggtcaaaatattttcatacaggaacagacattctttcgattgttggaacggaagttcactctatgatgtgtggtgagataattcacacccgctcagaattaccacaaaatgatagagtaaaaggttatgaatcttctacaagttatggtaacaccgttacaattaaatcaaaagataaagatggtaaaacagtatatactttttacgcccatttatctaagataaatgttaaaattggccaaaaggtaaagcataatgaaattattggtctgtcaggaagtacaggtaatgctatgcacatagaagtacagcatagacacattcatgtagaggctggaactgattatgaaatttatagcggtgggaataaatgtaaacttaaaaacagaataaaccctgaaaattatatgaaatctaaatttgataacaaaggcaatactttatgaaaaatattaaaatcatactatcaattttaatcactttttgcttaatatcatgtaatggacaaaataaaaatgaggaacaaccaaggtccttagaggttaatgatggagttccaaattttttggataaaagattttttagttcttatgaattagatcctaataatacttatccaacatacttttacagaaactctaaaatgggagaattttctgttatttttcttgcaaagaataaagaacttcaggaagaatggaaaaattatgatagtaaaaataatattatgattgaggaaggggctacaaatgaacaattgcgacaaataaatttgttgataaaaaagaaattggagcctcatattaatgattattataggctagccgaatacattgctccacaatacattaaaaaacatgattacatttttccatttattaaaaagtattatctctttgaagatgttaaaaaaagatgggaatatataggagaaaaaaaaattaaagaaggagaagaaagtgtaataagtattgatgaactaaacactatggtacatcgcaaaaattcaaaagagaataatttgaatttaccagttaattccatttctaaaaattggtatggtaaatactcattaagcctaaatgaagatagtgaagactggagagatattcatgaaattacattaaaaatctcaaaagattctattacttatatggcagaagggtttcaattgtacgaattctatacattaatcataaaagaaaataaagaaaacaggatccgtttgagctttttaaaagcacttgatcatactgaaaatgctgtatatctgaaaaaaacaaaagattttggggttattacttttattggaggccaatatctttggagctgtccttatattgatgaaaggtttgcagaaagaaaaaagaagannattaaaaaaagaaaaataaataaagacattttttcaggcaactgcttcctcagaagctattgattttcctgatttgaaaagagtttcaaaccatctttaaacttttctccttaagaagctcttttatttcaggcattttcttttccttgacaatatacgttttgcagatcttattgttgaggttcatgctgaaatttttttcgatagattcatccgcccaggtttcattgatgggtggataatattctatcaaaacaggccagaaattgaagagagacaatacatttctctgtaaagactttaagaagtccggcgtatttccaaaatcatcgatgactcttattttgaaaagttttttgccaagacttgctccctggtatgtttcccatagcgttcctgaaataatgacaagaggaatggaatataaaaatcccataaaggctgtataagaaaatacatataagaaaataactaaaaaagggagaaagtcgatcattttagccaacagtctttcccattggtagttcttataccaagggttgcatgggaattcatattcaacctggttgtatattctgtttccttcacgatcaaactcacgggtagccctgcggataatccttttctctttaagttcagatattttcataatggttatagtggttctttattttcagatcaaaaccagtaaaagcttacacatagagtgccaaatctgaaaaaattgaaactgcaggctcataatgatccgtattcagtttcccgaagccgtatgtacagaagataaaaggaagattattggatgcggaagaatcataatcggtttgggtatcaccaatatacaccgtgtcttcagctgatagatgatttctttccataatgagtttaatattctctgattttggctttgtggtccgtccgtgagattcaaaatcggtgaaaagatcattgagtttataatagtctaaaaacgcctcaatatatccatcctgacaattacttacaataaaaagacgatggtcacgagcaagaattttcagagttttttccacattttcatataaaattccaccttgagtacgaagaacggtattctctttttttataatttcagaaagagtttctttcacctgctgatcagaaatgcccggtacaatatctttcagaatatctttagccagaagccccatatactgatccatatcttcaggctttaattccctttcgatgaattgatgctgatgcagaatgtcattccatatccctatgatggttgctctgggatcccataatgtcccgtccagatcgaaaattaagtttttatatttcaaaatgtgatatttatattattcgttagttaggctggaagcaggaagttggaagttactgttcgccttattacagttgatcatgaataaaattgccattttcaaaatataataaagccagatcctggtatttacgacttaaatagcttccttcttcctgcttctggcttcctagttcaatcaactatagaatcatgcttagctgaacccttttccttgcttcatccacttcagttacttttacccttacatgctggtgaagctttaccacttcgttgacatcagaaacaaagccatctttcagctgggaaatatggaccagtccgctttctttgattcccagatctacaaaacatccgaaagcggtaatattgttgacaattcccggaagaatcattcctgcttttaaatccttaatgctttttacattcggatcaaactcaaatactttcgcggcttttcgagggtccagtcctggcttttcaagctccttcagaatatctttgattcccagaatcccgatttctccagttatataagactccggttttatcgaagcaattttttctttattggcaatcagttcattggttttaatccccagatctttggccattttttctacaattccgtaagcttcaggatgtactgccgaattatcgagtggatttttagcatttgaaatccttacaaaagctgccgcctgttggaaggctttctcgccaagccttggcactttcttcagttgctttcggtcttcaaaagccccattttcagcacggtaattcacaatattctccgccattttctctccgattccggaaacatagctcaacagcgacttactggctgtatttaaattgattcctaccgagtttacacatttcatcaccgtagaatccaactcgtttttcagttgagtctggtctacatcatgttgatattgtccgactccgatcgatttcggatcaatttttacaagctcggccagcggatcagaaagtcttctcccaattgaaaccgcaccacgcaccgtcacatcatatgtcgggaattcatctctggcaattttacttgcagaataaacagaggctccggcttctgaaactacgaagacctgtaatggcttatcaaaagcgatcttttttataaagaattccgtttcacggctcgctgttccgtttccgatagaaattgcttcaatattataggcattcaccatagaacggatctttttcatcgccattccgctttcattttggggagcgtgagggtagagggtttcattatgcagcagatctcctttttcatccagacataccactttacagccacttctgtatcccggatctatggccagaattcttttttcgcccaaaggtggggccagtagcagttgtcccagattttcagaaaagatctcaatcgctttctggtctgctttttccttagcctcctgcaatgcttcattagaaatggcaggttccaaaagccttttatagctgtctttgatggcaagtgctatctgctcagaactttcattattcgatttaatgattgctttttctatgaaatcgatcgcttcatctttgtcaatccctacattggtcttcacaaaaccttcagcttctgctctcaacattgccagaagtctgtgagaaggagttctgctcaggttttcctcccattcgaagtattgagagaacttttgagcatcttcctcatcttttttagcctttacaaccttagaagtcactacagccttacgctgaaatatccgacggaggtttttacggacatacatgttttcattgatccattctgccatgatgtctctggcgccctgaagtgcttcttcctcagaggccacttcattgttcagatattttgaagccagaaacagaagatcattattcttctggctcatgattattttggctaaaggttccagccctttttctttagcggcatccgctttggttttcttacgctttttgaaaggcaggtagaggtcttccagctcctgaagatcaaaactgtcttcaattctttgttgaagttcaggcgttaaagcatcctgctcctctatagattttaaaatagattcctttctcttcacaatctcctcaaactgtttgctgattttcgcaatctgttcgatctgggtttcatccaggtttccggttctgtctttacggtaacgggcaataaaagggatggtgcagtcttctgctaataattgtaaagtattgttgatgctcttttcagaaatattgagctgcttctgtataaatgctacggtcgtcattatttgtttttcggatagctaaaatagggtttttaaaacgaaaaaaggcgagtttccccgccttgaatgttttcacaacggaataatccttattgtgaattgctttcaaaattattaatacaaatatagcagaaaaaatctttaatagaattatggaaatccgtaattcggatgttttttttatttctatttttatgtagtatcaaaaattagaatgatgattaaaaatatgcttggattagatctaggaaccaactccattggctgggctttaataaaacaagattttgaaaataaacaaggggaaattcttgataaaaagtgtcattttgatattacaagtgtttttttgagtataaagaggctgcgtaatttagcagcctctaaaaaagcaattcacaactgactctgcacaatcttaaattttttgaaactttagattatgcttaatcattaattaaatattgatcagctataaattctcgggaaatttataaaatgagattggcgcctcataaaaatcaattcgtcaatcgaattactgtcaataattaagcaaaagtaagaaatgttttttaaatttgtgcagagtcaggaaatgattattgttattgtgttgtaaggtgttggttttcaatatgtaaaataagagctttgttgtgtggtaagattaaatcatagtttactatttaaataactgaaaaaaaattatgttgttttactaagtgaatagctttataaaactcaaaaagtagttagtagtttaaaatctttacatactttgtattggaattaaaaacacataattaataacagattattaaaaaaaacttaaaggaattttaattattaaaaaaaatgattgttaatatgaaaaaaatcttagggcttgattgtggaacaaactccatagggtgggcgttaattcaacaagactnnaaagaaggtaaaattcttggaatgggtagccggattatcccgatgggatcagaattaagtaaatttgaacaagggcaggctcaaactaaaaatgcgaacaggagagttgcaagaggaacaagaaaactcaataaaagatacaaacagagaagaaataaactgatttatattttacaagagcttggaatgttaccagatcaaattaagctggtgaatcaattttctgatccaaataaattagacaaaatatcaatacttccaatttctaaaaatcggcaacagttaacggcttttgatttactggaattacgtgtaaaagcattgactgaaaagattgaattagaagaattaggaaagattatttacaaatataaccaacttagagggtattccggggggaactcagagcctgaaaaggacgaaaataacgaggatgaatctgaagaaaaagaaaaaacgaatgatagttttgtggttttttccaaagttttgtcattaggattgcctgaagaaataacttttaaaggtaagaaattaaataaaagaaaaatttcgattgaaacggaagatggaatcatcgaagctgaaacttttttagataatataaaagaaaatgattccttagaacttcaggttaatattcgtcgtgctaaatctggagatacaattaccataaagctccctagcaaaacaagttggaggaaaaaaatggaaaatatcgaaaaacaattggcagataagtcaaaagaacttgatagggaatattttatctcagaactgttattcgatattcttaaagaaaataaatgggcaaaaattcgcaacaatgtgattttgcgttctagatatgaatcggagtttgatgctgtttggagcgaacaatcgaaatattactcattccttaatcatttagaaacagacagattacaaaaaatattagagtttatatttccaggacaaaaagaaagccaggaaaagttacgacaaacaggtttaaaagaaggattaaaatatgttattaagaatcaggttgtgttttatcagagagaacttaaggatcaatcagatttaatttctaattgtcgttttgaacctattgaaaaagttgtagccaaaagccatcctgtttttcaggaatataaaatttgggagcagatcaataaattggttattaataccaaaattgaaaatggtgtaaatagaaaaggggaaatcagatataagtatattgacaaaccgattccggtggctctaaaagagtggctgtatgaggaattacaaagtaaaaaagaagtttcttttaacccaatacttacaaaactcaaaaaagaatttaacctgagagaaaatgtcgactttcttaatgggatgaacgtcaaagataagctgaaaggaaatgagacaaaagtaattctgcaaaaagctttaggggaattgtggaatatatttagtttggatgattctgaaagacaggtggaactctgggaaatactctataatggtaagggaaatgaatatgatttaacaagtgaaagaacttctaatgtattagcgtttattgaaaaatattcgcctgatttagaaaataagaatgatgtagctattaagatttctaaaataaaatttagcagaaactattcgaacctcagtttaaaagcaattgaaaatattttaccagtagcgagagcaggaaagttttttgatcaaaatttttctgaagcattaagccagaaaattcttaaacttttgaatgaaaatgtggaagatccgtttgaaaagtcggctcaggagtttttagacaaaaatcaagacgttttatcagacggaggaattgtaaacgctattgcaacaatattagtttatgataaacataccgctaaagagtattctgacgatgaactacttaaagaatttacccagatttcaagattaaaacaaggagaactaagaaatcctttggcggaacaaatcatcaatgaagcactaattattgtaagagatatttggagaaaatatggttttaagcctgatgaaataagagtagaactggcaagagagcttaaaaacaatgcggttgagcgtggtaaaatgtattctgcaaatttaaaaagccaaaaacataatgcagaaataagaaataaacttatagaacttaagcaggaaatttctattgccaacattgaaaaatataaattatgggtttctcaggaaaacttacaggaagtatatcttaagaactataacgatccatctaaatctgaaatagaaaaattaaaactctgggagtctcaaggtcatgtatcgccttatacaggacagccaattccactttcggaactgtttaatcgtgaaagatatgatgttgatcatatcattccgcagtcaagatattttgatgattctctgtctaataaagtaatttgtgaaaaatctataaataatgaaaaagggaacagaacttctatggaatatttcgaagtaggttcagtaaattaccggatttttacaaaagatcagtttattgatcacgcaaatcaatatttttcaggaaaaaaacgaaaaaatctgttggcaacttccattcctgaagaccctattcagagacagataaaagatactcaatatatttccattcgaatccgtgaagaattgaataaaattgtcgggaatgaaaatgtaaaaactacaacaggaggaataacggattatctaagaaaccattgggggttaacagataagtttaaagttttattgaaagaaagatatgaagctgtattacccaaaattgctcaattagaatatgataattataagaaagaaactgaaaagaaatttacagaatataaaaatgctgatgttgaatttaatgaacctnnaacctattttggatgaagaaatttttattgaaaaatttagaagcgagtttataagaaagaaaaataataaactgattataaaaggctggagcaaaagaatagatcacagacatcacgctatggatgctcttgtaatagcatgtactcaaccagcacatattaaaagattgaatgatctcaatcaggttcttaaagaatggttggataaaaataaagaaaaattttttcccggttttagtggtactaaaacagaattgcttgatgaagtactgaatttagaagaagaaaaaagacgagaaatatttaaccagctggaaaaattcagagctattgaaatgccttggaatggtttcccggaagaagctgagcaaaaatttaaagaaattatagtttcccacaagccaaaagataaacttttgctgcaatatgatattcagggaaataaacaaataaaattaannattaagaggacaattacacgaaggaactttatacggtctttcgaatggaaaggaaatatatagaattccaatcagtaaactcgcaggtaaacagtttgctacagaaaaaaccatagaaaagattgtaaatccttttttaaagaaagtaatagaagagcatctaaaatcttttggtaaaaaagaagaagcattttctgcagaaggaattttagatttaaacaaaaaactttttgagcgaaaagatgaacgagaaaatcctaaaccacatcctcctatttcaacgataaaaatttattacaaagatccatcaaaatctaaaaagaaaaaaacggatgatgaagatgatatttcgttgcaaaaattgaataggaaaaaatcttttaatgattctctatatgtgaaaacaggtgataattatctatttgcagtaatggagaaagaagtttttaataaaaaactaaataagaataaaacagaacgtcattatgacctgataactttttttgatgctgctaatcttttaaaatccgaatttaatgcttcaaatgacaagaaaaattttaataaagaggatttattcagaaaatattttgaagaaaaaaataatgctaggctactatttaccttgaaacagggagattttgtatatctcccagatgataatgaagaaattattttggacgaatcaagtccgttgtttatggattactggaaaaacacatcggagagaagtaatagtatatatgtagtacaaaaattcagtaaaaaacaaatctattttttaaaacacactattgctgataccattgtaaaaaaagtagaatttggctcacaagactgctacgaaaaagttggagttaagtctatcaaagatttttgtttcaaaattaattcagaccgtttaggaaatatttcaaaagtatagttttatgattacccgttccatttacatcggcaatccagcttatcttaaactcaaagatgagcagttgaaaattctttgtccggaaacaaaaacggaaaaagggagtattcctgtggaagatctgggtttgctgatgttggatcatttccagattacgatctcgcatcaactgattcagaaaatgatgggaaacaatgtggtagtggtgagttgcgacgggtatcatttaccccatggaattatgcttccgctttatggacatactgaatattccgaccggattaaagatcaattagaagccagtgaaccactcaaaaaacaactttggaaacaaacggttgaatgtaaaattgaaaaccagaaagaggttttaaaacggttagggaactattatgaaccgatgattgattaccagaatgatgtgaaaagtggtgatataaccaatatggaaggtattgcagcacaacattactggaaatatctcattagcctggattttttgagacagcgttttggagattcgcccaatcagtttttcaattttgggtattcggttctcagaagcattgtggcaagagcgattgtggagaccggattgcttcctgttctcggaatttttcataaaaataaatacaatccttattgtcttgccgatgacctgatggaaccttatcgcccttttgtcgacttattggtaatgcaatggcttgcaatccattcagaaacggaagaattaactaaagaatttaaagcttttatcttacagattgcgaccaaagatgtgaaaatagatggtaaaaccaggccattgttggttgcggtaaaaacaacagctacatcactgtataaatgttatacgggagaaaagcgcctgatctcttatcctgaactgatatgaattctgaaaggtttaatgcataccgaattatgtgggttttagtattatatgatctcccaactgagaccaaagtgaatatgaaagatgcgaaccgttttcggaaggcactcattgatgatgggtttactttatttcagttttcgatgtatgtacgccactgtccaagccgtgaaaatgcggaggttcatattaaaagagtaaaatttatgcttccaaaagctgggaaagttgccattatgtgtattacagacaagcagtttggtgacattgagatcttctttgccaggaataaagaagaaccaccaccaacgttccaacagcttgaattattctaatttttaaatcctaaataaacaataaatccgttgattttcaacggattaaattttgaggttgtgactaatcacgaagataataatttttgaaagcaattcacaactgcctaaacgcaccatcacaactgtctatagttgtgactaatcacgaagataataatttttgaaagcaattcacaacctacttcaataccacctgttttaattgtgggttgtgactaatcacgaagataataatttttgaaagcaattcacaacatacttatgataagtcaatgtttaaaattggttgtgactaatcacgaagataataatttttgaaagcaattcacaacgtaagtagattcaccaaaaaagtctttagggttgtgactaatcacgaagataataatttttgaaagcaattcacaacatgcggcaatatggatagatcaacaatatcgttgtgactaatcacgaagataataatttttgaaagcaattcacaactcttgttcaataattatttctatttcttttgttgtgactaatcacgaagatnnatttttgaaagcaattcacaacaagacttcatgaaaagacttagaaagtcttgttgtgactaatcacgaagataataatttttgaaagcaattcacaaccacaagtgtttcacattgcatggaaagacagttgtgactaatcacgaagatannnnnnnnnnnnnnnnnnnnnnnnnnnnnnnnnnnnnnnnnnnnnnnnnnnnnnnnnnnnnnnnnnnnnnnnnnnnnnnnnnnnnnnnnnnnnnnnnnntttttgaaagcaattcacaacatttataatataataatcatttttgcttttgttgtgactaatcacgaagataataatttttgaaagcaattcacaactgattattcataacccgtttattttattgtgttgtgactaatcacgaagataataatttttgaaagcaattcacaacgatagtgattgtttatgtagtactcagcgggttgtgactaatcacgaagatnnnnnnnnnnnnnnnnnnnnnnnnnnnnnnnnnnnnnnnnnnnnnnnnnnnnnnnnnnnnnnnnnnnnnnnnnnnnnnnnnnnnnnnnnnnnnnnnnnnnnnnnatttttgaaagcaattcacaacgtatgtactccccgatagtcattatgttaagctgtgactaatcacaaaaataataacaaaaaagaccatctattaaatggtcttaaatttatactcaaggttttttatacacacaattggttagttggaatgcatacataaggctttcctttgatacagcattttcggtatccttcctgaaagcaatcttgaatgcatctttctattcctccttgaattgatttcaatccggttcttgtaatttttcttaaatttttcatgattattagtattttatgtatagtgaatttaagcaattattttgaataactgtcctctttgtttcaaaaggatgtttatgcttttaatttacaagttttagttaatcagtaagttattgagttttgaaaaattgatgatcttcattaattacgatttctttggatttgaaatttctgccatcatagttggcgataagcagataaaaaatacaggtaaaagacgtttaatgatcaattaaaagggtgataaaaggtaaaaaaatgatatttttaaagaatgaaaagctaaaaaaggtatttcttgatgtatgttaaggaaacccaaacagagattttctacttttgtacccgaaaacaatgaataaactttttaaacaattcaataatatgaaaaaaattagtgtaatcgcattagtagcagtaggattgctggcagcatcatgtaatagcaaagaaaaaacagatacagcagtagctactgagcaggctgttgcagaaagcaaaggagaaatgctgacagtagatgctgcaacttctatggtaaactggaaggctttccacaaaggaggatttgcgcctcgttggggaaccctgaatgtaaaatctggcgatttaagcattgaaggtggacaggttgtagcgggtaacttcaatattgatatgacttctatcaaagttgatccggcttcagtaacagaaaaagataaaaaacctgaagaacttgaagctcaccttaagagtgctgatttctttgatacagagaaaaatcctgtttccgattttaaaattacaagcgtagcagatttgaaagaagcaccgaaagatgcggtggcaggagctaacaaaacagtaagcggaaaccttacattattaggaaaaacaatgaatgttactttccctgctaaagtagatgtagctgataatacggcggctattcaggctaaattcacggtaaacagaacagactggggaatcaagtttggtacttcagaagcagatcctgcagaatggatgatcagcaaagatatcgagatcaatatcgatgtaaaagctaaaaaataagttattaagtctttaataacgaaagctgtcttagtcaaggcagctttttttttatccggttatcggggtaggagggccaacaaaacctggctttttaattttaagcctgctttgcttatgtttttatattttgttgataatgctgtttttgtgatgtttaatttggtttttatttattaattttagccaattcttaattatttaaggataatattcaaaactatataatcatgacgaaaatttatctttttttattattgttatgggcaataattctgaacgcccagccgcttacatggacaaaaatttctcccacaccgcctccgggctttccttatcgttctgcaatttttctggggcaaaaaaaacttatttgggctactttctgtgatggatcaatcccctttaaagaaccaacagcaatgagctattcaataagtgcagatggtggaaatacctggtcaacccaaggatatttcccttttgcaatggcaagtactaagccttatggctttacttttatgggatttacccctctttcaaccagtatgggactttatttgtgcgcaatagaagattcctatgcaaaagtttttaaaacatcagatggtggcatgacctggaagactacagcacaatttgatacctatccttattccattcacttttttgatgacaaaaatggaattgttgtatgtcgggaagatgcttcccaaaagctaaaaatttatagaactacagatgccggagacagctggcaaaaagttgatccggcttatattccttcaacgatcggatatgagacaggggtgggtctttttggctttgtttcctcttataaagatactttctggtttgggacaaatagcgggcggatttttaagaccaataataaaggactcacatggactgtggcttcctctccctacatctatggcggtgtgacaggggtcttcgcagatagcatggggccttttactcttgaggatgaaaataatgcttatatggtagaatataactccgggaagcttcatagaacaactgatggcggattgacatggaccactcagggaaagatagaaaccggcagtgccaatttccatattataaaagtacccaatagtgatattcttttggctgccggagaaaaaacaagatatagcctggataaaggcctgacctggactgagattgataatgatcctaaatttggaatttatagcaatagttccgggtttacaacaagccttagttattataaacttacaggaattattgataaaacacctatagaaaccggaacacccggtgacaataaagatgaagatgaatttggaatttatcccattcctacaggaaattacctgtatataagatcaaaaacacctattgatagctatattatatgggattctgcaggcaggctgattcagacaggaggggccggaaatcagattaatgtttcatggtttgcagaaggaacttatcatattgaaattcatcatgctggaaataccattatcaagaaatttattaaaaaataaaacctttacagtctgcacaaaaaataaaagtgatctctggaggtcacttttttattaggatatttctgaaaataatacaaccggaatcaattgaaaatccacgaattctgaatacgtacacaatattcgcttcccagatataaaggattgccatgtttttcagaccagaacccgtccagagtatctttatttaggcaacggtataccgctacacctttgtatattgtatgatcatctccttcatagttgaagttgaggaccagaatctggtctttatagaacccggttccattttgtatatgatcaccgatgatccattgggcaacaatccggttgttttcatcaacagataaagtcagtataccactataagaatactgatcagattcttcctgattgcttcctttaatagaataagttcctgccagatcatgtaccgtcattgatttgtttttttggatggcaaatgtaagaaaatcttattttgataatgcttaaaaaatctcaaaacccggatatgaacctgcagacttttctatctttaaattaaactctatttttgcagcaaattaattgtagatgtttccttttctgctgatcgctaaccttattacattcggagtctttgggtttgacaaatggcaagccaaaaaacaccagtggagaatttctgagaatgctctcctgggactttcccttatcggagcgataggagcagcctccggaatgatccttttcaatcataaagtgtccaaaaaatcttttctggttaaattttttctggtgctcttaattgatgttgtattgctgtaccgattcataagacattgatacagacagatattcgttcttcaaaagatgttttttagaaaaaagaataaatacaatatacttctgcattaattttattgtaatacaaacaaaataagtgggtagaagaggcctccatcttatattttttcagacgttttttaagaaaataatctaattttctcattatgaaattgttaaatgttgcataaactttttaattaattcatttaaaatcactatttttgcacccgtaaaaatcctatatgcaaaacattagaaatattgcgattatcgcacacgttgaccacggaaagacaactttggttgacaagatcatccacgctaccaacattttcagagaaaatcaggagagtggggaattaattatggataacaatgaccttgaaagagaaagagggatcaccatcttatccaagaatatttctgttacttataaagacacaaaaattaatgtaatcgatactcctggtcacgccgatttcggaggagaagtagaaagagtattaaaaatggctgacggagttattttgttggtggatgcgttcgaaggaccaatgccacagacaagattcgtacttcagaaagctttggaattaggactgagaccgttagtggttatcaacaaagtagataagccaaactgtcgtcctgacgaagttcatgacaaagtatttgatttgttcttcaaccttgatgctacagaagagcaattggatttccctacattctatgggtcttcaaaacaaggttggttcaacacttcattagagcagactgaagatattttaccattattggatggtattttacaatatgttcctgaaccaaaagtaacagaaggtaaccttcagatgcagattacttcccttgatttctcttctttcttaggaagaattgccatcggaaaagtgacaagaggtgagatcaaagaatctcaatggatcggtcttgcacaggcagaaggtaaaattgtaaaaggaaaagtaaaagaactttacgttttcgaaggtttaggaaagaaaaaagtaactgaagtaaaagcaggagacatctgtgctgttgttggtttcgatgctttccagatcggagattctttcgtagatcttgaaaatcctgaaccattggaaagaacagcgattgacgagcctactctgaacatgacgttctctatcaacaattcacctttcttcggtaaagatggtaaatatgttacttcaaatcacctgaaagaaagattaacaaaagaattagagaaaaacttagcattaagagttcagcagactgacgatgccaacactttccttgtattcggtagaggtattcttcacttatctgttttgatcgaaaccatgagaagagaagggtacgaaatgacaattggtcagccacaggttatcttcagagaaattgatggtgaaaaatgtgagccttatgaatctttggtagtagacgttcctgaagaatttgcttcaagagtaatcgatttggctactcagagaaaaggagatcttcacattatggaaacaaaaggggagatgcagcacatggagtttgaaattccttcaagaggtttgatcggactacgttctcagatgttgacagctactgcaggtgaagctattatggcacaccgtttcacagaatacaaacctttcaaaggagctattcctggaagaaataacggagtattgatcagcaaaactacaggtcctgctacagaatattctattgctaaactacaggatagagggaagttcttcgttgatccgggtgaggaaatctacacagggatgatcatcggtgagcaaaacaagccaggagacttagtagtaaacatcgtagaagcaaaacagttgaacaacatgagagcttccggaaaagataaagatactggtgttgctccgaaaatcttattctctcttgaagaatgtatggaatatatccagggtgacgaagccattgaggtaacgccgaacttcatcagaatgagaaagaaaatcctttcagaagaagaaagaaaaagagtggaaagatcagcgaaagcttaatcattcacgatttacattcaaaatatatagaaaagcctcgaatttttcgaggcttttttctagaaaacaggaaaaaatgtttattttttcaaaagaatataccaagtaataaaatataaattaaagtagttttgcggctatgagaatgaataaattaaaacttatcgttttattgggcgtttttgcatcatacactacctcatgttctgttcagaacaacgtgacgaaaaccccgcctgctaagaatacaacaagacctaataccaaccctcctaagcctaaagaccagacagcggtacctaaaccaaccactgggaatacggcagatgaaaccttcagaaccacccttccggaaatcaaaagagaattcagaggagcatggattgccagtgtagctaacatcaactggccttccagaaacaatctgagcgtagaacaacagaaagcagaagccatcagtatgcttgatatgttgaaagataataacttcaatgcggctattttc

SEQ ID NO: 291 - DNA, 21499 bp, synthetic construct
  misc_feature 1..21499: note = Synthetic
  source 1..21499: mol_type = other DNA
gtaaccccagaatcagcgccttgaatgcgaatatttctcacaccttgagctttcacccggatggctgctccgactaccttgatgctgttgcagtttcctgtgattaccacattaatgctgctcccctcgatattaatattttcgtttccggtggcttcgatcgttttgtcgataccacttcccgtaacattaatagtttctccggtttcctgcattcctggctttacattttgagctttggtaactaacgttgtcgtaaataagattgccattaacgtcaatgttcttcttaggtttttcatatcaggttagtttaggggggtaattatacaaagattatactactgggtatttatcatcaggtttgaataattccgacgttaaatttcctggttattggagattgatttgcagcctcaattcccattgaaataacttttctggtttccaggggatcaattattccatctacccaaagtcttgatgctgcgtagtatggagtagtctgactatcatatttatcggtgatttcctttaaaagttctgcttctttttctggtgtgatcacttctccctttgctttcaaggatgcttgttgaatttgcaacaaggttttagccgcctgggcaccgcccattaccgcaattttagcggttggccaggcatagattagcctcggatcataagctttaccacacatggcataattaccggcaccataggagtttcccatcacgatcgtgaattttggcaccacagaattagccacggcattcaccatttttgcgccatccttgataatgcccccatgctctgaccgactacctaccataaacccggttacatcctgtaaaaaaaccagcggaattttcttttggttgcagttcataatgaatcgggtagctttatctgcactgtctgagtaaattacccccccaaattgcatttcaccttttttcgacttcaccaccttccgttggttggctacaattcccacagcccatccgtctatacggcctaaaccacaaacaatgctttgtccatagccctttttatattcttcaaattcagaattatcaaccaaacggctgatgatatccattatttcgtattgcttatcccggttttcagggataattccatagagctccgtttcaatttcctttggcttgacaggtttgattcgatcgaagccggcattttgcggagcgcctaacatgctcatgatattccgaatgctgtctaaacaagcctgttcatttggatgcttataatcggtaacaccagaaatttcacaatgcgtggttgccccgcccagggtttcgttgtcaacatcctctcctattgcagatttcacgagataggagcccgctaaaaatacggaaccggttttatccacaatcatggcctcatcactcataataggaaggtatgcaccgcccgctacacaagcccccataattgcagaaatttgtacaataccctctgccgacatcatcgcattgttccgaaacatccttccgaagtgttctttatctggaaaaatttcatcctgcataggtaaatagacgccggcgctatctaccaggtagataaccggcaggcgattttccatggcgatttcctgtgcccgaaggtttttcttggcagtcattggaaaccatgcgccagcctttactgttgcatcattggcaacgatcatgcactgtctaccgcttacatatccgataccacaaaccacaccggcagacggacaaccgccttgttcagcatacattccatcagcggtgaaagcaccaacctccagaaattctgaatttttatcaatcaggtaagcaattcgttcacgggccagtaacttacctttttctttttgtttagcagcgtttttttcgccgccaccaaggtaaatctttttcagtttggttttcagctcgtaaaccagttgtttgtttacatcttcgttcttattgaattcgatatccatgatggcaatttaaatcttatttcggaattaagcatggcgaccaaattggtttctggtctaaggtgtgttttaccgcaaataacaaaaagaaaaaccgcaaagaaataaagaaaaaaccatagagaataagtttaaactattgatttcagtattctatgtgctctcggtggttaacttgctcttagcattttgatcagaaaataataaccacagaggaaacagagaaaaaatcacagagaataagtttcaaataattgatcttaatattaactgtaccaactccgtgtgcttagtggttaaacctacacacccagctttgcattatttgcgagaagtcttctttgctttgcgtttaaccatatcatttcaaaagcacatcttaatctcattatacttttaaactcaatgttctcggtggttaacttactccttagcattttgttgagaaaaaataataaccacagaggaaacagagaaaaaaccacagagaaattgcagaggttacattacctacaactaaattcatcattcaacctcataaaatatctgtactcccggctttgcgttcttcgcgaaaaacttcccttctctttgcggttaactgatagcaaatattaaccacagagaaatcgcaaagattatattacatacaattaatctcatcattcaagctcataatccggctttgcgttcttcgcgaaaaacttccttccctttgcgtttacacacacaaaatcattttaaaataatacttttgaaaaaacctcattaatggagctaaccatcaatattcctgctttactgtttcctgccatcagcctgatcatgctggcttatactaatcgttttttggctttagcaacattagtcaggagtttgaaagctaagtatgaggaaggcgagaaaaatattggtttgcagaatcagattaaaaaccttcgctatcggttaaaactgattaagaacatgcaggcatttggtgtgttaagtttcgccagttgcctgttctgcatgttttttatttatttggaatggaatatagttgctgaattactttttgcactcagtttaatattcttcatgatttcattaattatctctttgatcgaaatacagatcagcacgaaagcactggaattggagttgagcactttagaaggtctggacgatgaatcattaggtggattcatcaaaaagaaatttaagaaataacaatcaagaactttagctaaagtagcatgatgcaaatcattacaccatgcgacattagcttaagataaaatattttgaagttagctaatgaagtgatataaaaaaaccacttcgcctgaaaacgcaggttttttctgaccttctatttccatttctattgccatatgaactttcgttacgccacgtaagttaacaatagaggctaatttggcttttagcctgattttagcatttacgaggaccggctgcgcaaatctcaggctttcaatcccatagttgatctccatttttagcttctgaatatcaacaatttctttccagagatacggaatgagcgaaagtgttaagtatccatgggcgattgtggagccaaaggggccttcattttttgctttttcttcgtctgtatgaatccactgatagtctaacgtggcatctgcaaacttgttaatttgttcctgcgtgatggtatgccacgaagaaacaccaagcgctttacctaaatgttgttcaaattctgcgtgagatgtaataatttgcattttatgaatctttatagtgatagtaaccctaaaattgtagttgtttaacagttacttagattaaatttctttccttaaaccagacttcatccggcacggccgaaaaatgatccattttgtcaatcagtatttctgcatcagtttcattaaaaaccaaatcccgattggctggtttcaaaaacttgcttcttaccatcatttccatctgtgcaaatagcggatcgtaaaatccatctacgtttaaaacacctataggtttatgatggaggcctaattgcagccaggttagtacttcaaaaaactcttcgagggttccgaaaccgcctggcaaaatcacaaagccatcgctcagatctgccattttttgcttgcgctgatgcatattttcagtcaggatcatttccgtaagtcctttatgacctacttctttatccatcagaaattgcggaatcacacctgtaaccaggccgccggcatttaaaatgtcatttgcaagaatgcccatcacacctacacttcctccgccgtataccaatttgatttcttctctgacaagaacatctgccaactgtttaatggctttacgtaactgtagatcgccgttaaagtttgaaccacaataaacacaaaccgctttaagcttattcatctgattaaaaaatttagcgaagttaagattttatccgtgtgctataaattttaattctgcacaaagctgttactttgatgcgattatgatctaaaacacttttttagcagctgtttcaatgtttaattaacctccattcaaaatatatgatggtgacaatcattatatattcctataacatagaagcttaaaacaaaaaacgccgggtacccgacgcttttaatcaaaaattaagagaacattatatgaaccctgcggctctgatcttccgcaaggttcttaaaaattaaaaactgtaacggaaggtagcgccgtaggttcttggatctccaagtacacctgcatataaaccggaattacctgcagctgcctgtagctgctcataatagtttttattggttaagttcctgctccatacaaatacggaaaacttatcagatttaaatccaagtctggcatttaacagcgaataaccctgaacatttaatacacttgatggtgtaggattcgaagaataagtagaacggtaactggcatcccccgctataaaataccggcctggcttagtggccaaattacctggagtgctaaactctgcccccccggaaacattccatttcgagataccgggcaacctgcctccagaagcatctttaaatgctacttgggtagccacgccatttaccaattcagtatggccggtttcttccagcggaagtggtgcattggtaaattttacatatttcccatcaagataggccagtgctgcatttagggttaaaaaacgttctaattgatatgttccatcaatctctaatccttttacttttaccttttcggcattggccagataacccctgtttacacccaattgaggtgattgtacattggtttgataatctttgatatcggtattaaacgccgttacatttaatatcgcacctttaaaaggttttgttttaacacccaattcgtaatgttctacatattctggttttactacggctaatgtcaaatcagcctgaccatttgccgtggtcggcaagccacccacgttaactccaactggtttataagcagtagaaaaagtaccataaaggtttaatttcggattaggccggtatgatagcgtaatgttgccggataaattgttattttctgtactggtattaaattgctgattgctgtacaccgccgcttttagtgccagcaatgccgcgtctgtagtttgcagtccgccataagtattgcggtcatagtctacatcttttttgtcgtatgtaaaccttaagccaggtaaaacgtgtaaatgttcaatcacttcccaatctacctgaccaaaaactgcggcgcttaaagatttaatggtagagttggttttaatgccgaagccatccaataaacctggtgtggaatacaatgcctgtgtacctgtatttcctgtttgtacaaacctccattgatctttacctacttcttccgtctgccctaaaccctggaggttttgccctaacacaaatacaccgattacaccgcttaacttttctgtaatgtttccggcataccgaatttcctgcgaatattgatcgtgacgtgaatttccctgcgatttagtgagcgcagctaattcagagaaatccctgtcatttgttggatcccaattccagaatctccaggctgtggtggaggttaatgttccgtttccaattttataatcaacatttaaagaaattccaccaatagattggttatgcctccaaggtgtattggtattaatttctctggagaaaggatctatttttggttgctgataacctaaatctgatacgattctagcgtattggcgatatgcgcttcgttctgttgtagttaccccggctattaccaacggataacctgccggatgctgaacgcttacatcgccacttaataaaatttttaatttgtcagacggggtaaagtataactggcccttaaaacccagattgttttgtccgctatatctacgctcctctctggtattgtaaatggtaccatcacgttgtgttcctgaaatggaaattttagcagccagattttttgccacgcctccagaaacggaggttttagcctgaataaagttgtaattcccgacactcatttcaactttcgccgtcggtgtttgagtgggtttggtggtggtgatgttgaatgcaccagccgttgtattttttccaaataaagttccctggggtccgcggatgacttcgatttgttcaatatcaaggaaatctgtagaggttgccgccggacgggcatgataaacgccatctacataaaaacctacccctggatcaatcccgtcattcgttaaaccaaaagttgatcccaaccctcgaatatttaatgttgtattcctggcgtttgaagcgtaaagctgaactgaaggaaccaattctttcaaacgattaacgttaaaagcaccggcattttcagcagcttgtccgccgatcacggtaatgggaatgggtacatcctgcaaaacttccgatcgtcttctagaggttaccacgatctcatcaagctgtgtgtcttctattaaaacaagttctatcggcgtatcctgaaattttaaaatttgaaaatcctgaggtttataacccaccgagctgatttggatataaaacggaggttgttgttttgcatcgatggtaaaggcaccatttacatctgcaattgcagaaatattggttcctcttattttcaccgttgcattaggaatcgtaatcccatttgcgcctttaacaataccagtgatggcattttgagcgaaaagtgccccggttgaaagtattaaagagaacagtaagagtaaactttttttcatgattaatttagtaatgttcggtttatttttatggattagggtgctgttcagggtgttttttcttagcatgcagcgcgacaacaacaatgcttcaatggattttggatatatttttcatattatttatataaaatctatagatttagtaggcaaatatattaaaaaaaccttcttcccaaattttattttgaaatagttcttcagaattgagttcatgtcaatgcctttttaaatttatttatgatgaaagattgctctgccacagtcgaaatgacgacggaagaagtgaccctcattattctggaagaatttccggactataatatctgtggatttttaatccacctttaattaccagctatgcattgatgcatgtaacctgaacttaaatattgtttggaaataaaaaaacggggctatcgttaccgactccccgttttttatttatttaattagaagatttctccaccatggccgaaaggacgacgtaagatgggaactttaggctcaacaacctttcaaccttatctagtataatttggtgcttctttggtgatggtgatatcatgtggatgactttcacgcattcccgcagctgtaatttgaacaaattgcgcttcttgtaaagcctcgatcgttgctgcaccacagtaacccatacttgcacgaagtccgccgatgtactgatacattacttcggctaatgttcctttgaatggcacacgacctacaattccttcgggaactaattttttaatatcatcttctacatcctggaaataacggtctttagagccttgttccatagcttcgatagaacccattccacggtaagatttaaatttacgtccttcgtaaatgatggtttcacctggtgattcttccactccggcgaataacgaaccagccattacggtatctgcaccggatgcgattgctttcgctatatcgccggtatgtttaattccaccatcagcgataaccggaacgcctgtaccttttaatgcctttgcacattcataaactgcatataattgtggaacaccaacaccagcaataattctggtggtacagatagaacccggaccaataccaactttaacggcatcagcgccggcatctgctaaaaatttagctgctgctccagttgcaatgtttccaacaatcacctgtaaatcaggatactttgcttttacttcttttaacttatcaactacaccttttgaatgcccgtgagcggtatcaatggtaatcacatcaaccccggcatttacaagggcatcaacacgctgcaaggtatcggcagttacgccaacagcagcaccaacacgtaaacgtccgcgttcatctttacaggcagcaggataatttttaactttagagatatccttaaaagtaattaagccgcttaaataaccgtctttacttaccaccggaagtttttcaattttataattctgaagaatttcttctgcctgtaccaggtttgttccttctggtgcagtaataaggttttctttcgtcatgacttcggcaattggccttgccatatttttttggaaacgtaaatcgcggttggtaataattccaactaatttattgtcgctgcttaccaccgggatgccaccgatcttatgttctttcataattttgaaagcatcggcaaccactgctgtttccaataaagtaaccggatcctgaatcattccgctttcagaacgtttaactttacgaacttcttcagcttgtctttcaatcgtcatgtttttatgtaacatcccaataccaccattttgcgcaatggctatggcaagttcagcttctgttacggtatccattgctgcagaaatcaacggaacgttaagcttgatttttttggttaagaaagtggctgtatttacatcgcggggcagaatttctgaataagcgggtactaaaagtacgtcgtcatatgttaaacctgttgcaataaattttgtggagtcgagttgcatagcaaataaattacgatttattatttgccaggcaaagataagaaaacttacttgaattttaaaagatattgtggtttggatgtaaatagtctagaatgctatttatggttaggttttcaaataatagataagtcaactctggatgaaaaggataactacaaatggtaaacataattttgcctaactgacttttttaacaacccagctgcttgtcctatttttaaagatgccttaaaatgcgactatcatgccttaggactccaatggaaccccaatagaacccggggataacctgatattctttgcattgaaaattaaggggtgaaaccgaccttatttctcttctgcctactagaaacgaaaatcagaacattcatctatgcttttgctgattttatcagtacctgagtttttgtcctatttttaatgatgccttaaaatgccactatcatgccttaaggctcaaatgccccccagtagtacctcaagtaaactagcttgtttattgtctgactttttaattgcttgaaatagtgttaaatgaataagaatacaagtttttggtttggattaaatagtttggaaataaaaaaaggcgagttgccccgccttaaatgttttcacaacggaataatccttattgtgatttgctttcaagtcaaaggtataattaattttttaattcgggatacgggaaaccgtaaacgatgtaaatttttattttctatttttaggaaaatctaaattgcgatgaaaaaaatattaggacttgatttagggacaaatagtattggttgggcgttagtgcaacaaaatttcgaaaataaaactggaaatattcttggaatgggaagtcgagtgatacctatgggagctgaattaagcaagtttgaacaaggtctggcacaaactaaaaatgctaatagaagaatagcaagaggaacaagaaaacttaataagagatataagcaacgtagaaataaactcatttatattttacaaaggcttgaaatgcttcctaatcaaattaagttggtggctgaattttctgatccaaataaaatagataaaatttctattctgccaatttctaaaaatcaaaaacaactgacagcttttgatttggtagaacttcgagtaaaagctttatctgaaaagattgaattggatgagttcggtaaaatcatctataaatttaatcaattaagaggttattctggaggaaatgctgaaccagaaaaagaagataacaatgacgaagaaaatgatgaaaaagagaaaacaaatgaaagctatattactttttcaaagattctgagtattggtttaccagaagaaattgtatttaaaggtaaaaaacttaataaaagaaaaattagcatcgagacagaagaaggaattattgaaggagaaacttttttagaaagtttaaaagaaaatgattctttggaattacaaatcaatattcgccgagcaaaatcaggagacactattactttcaagcttcctaacaaaaccagttggaggaaagaaatggaaaatattgaaaaacagctcactgaaaatccaaaagaaatcggaaaggagtattttatttctgaattcttattagatattttaaaagaaaataaatgggcaaaaatccgtaataacgtgatcctgcgttcacgatatgaggctgaatttgaagctatttggaaagaacaatcgaagcattatccgtttcttgataatttagatgaaaataagctactgaagattttgaattttatttttccaggaaagaaggaaagtcaggaaaaattaaggcaaactggtttggaaaaaggattgaaatatatcatcaagaatcaagttgttttttaccaaagggaattaaaggatcagtcagatttaatttctaactgtcgttatgaacccaatgagaaagtagttgcgaaaagtcatcctgtttttcaggaatttaaaatttgggagcaaatcaataaactggccatcaatacaaaaaccgaaaatggagttaacagaaaaggcgagataagatataaatatattgatcgacctattcctattcagctcaaagaatggctttatgaagaattacaaaataaaaaagaagtttcttttggtcccattctcacaaaacttaaaaaagaatttaatttaagggataatgtggatttcctgaacggaatgaatgcaaaagacaaattaaagggaaatgatacaaagaatattttgcagaaatctttaggcagtttatggaatgaatttgatttggacaatagagaaaagcaaattcatttatgggatattctttacaatggaaaaggaaatgaatatgaacttacaagcgacagaacttctaaaatattagattttctaaataagtattctcctcatttagaaaataaagaaacaaccgcagtaaaaatttctaaaattaaattcggaagaaactactcaaagctaagcttaaaagccattgaaaagattttgcctttagtaagagctgggaaattttttgataatcaattttcagaaactctaaatcagaaaattattaaacttttaaatgagaatgttgatgacccttttgaaaaatcagcgcaagagtttttggataaaaatcaggatattttatcagaaggagggattgtaaatgcaattgctactattcttgtgtacgataagcatacctcaaaagaatactccaaagatgaattattaaaagaatatactcaggtttcaaggttaaagcaaggcgaactaagaaatcctttagctgagcaaataattaatgaagcattaattatagtaagagatatttggcgaaaatatggttttaaaccggatgaaataagagtggaactagcaagggaactgaaaaataatgctattgaaagagggaaaatgtattctgccaatctgaaaagccaaaaactaaattcagagataagaagccggctaatagaacttaaacaggaaatctcaattgcaaatattgaaaaatataaaatttggatttcgcaagaaaacctacaggaaacttatatcaaaaattacagtgatccttccaaatcagaagtagaaaaaataaagctttgggaatctcaagggcatatttcgccttatactggtcagcccattcctttgtctgaattatttaatcgtgagagatacgatattgaccatatcattcctcaatcaagatattttgatgattcattttctaataaagtaatttgtgaaaaatctataaataatgaaaaaggaaacagaaccgcaatggaatattttgaatcgggttctgtcaattatactattttcacaaaagatcaattcatagatcacacaaataagtattttttcaacaaaaaacgaaagaacttattagcaacatccataccagaagatcctatccaaaggcagataaaagatactcaatatatttcaattagaattcgcgaagaacttcacaaaattgtaggaaatgaaaacgtaaaaacgacaacaggcggtgttacagattatttgagaaatcattggggtttaactgataaatttaaagttctgttaaaagaaaggtatgaaacgataatgcccaaattggcgaacatagaatacgaatcttacaagaaagatattgaagctaagataaaagaatatgaaaaagcaggaacaaattttaatgaacctattttagatgaacaaacttttattcaaaaattcaaaaatgaatttatccgaaagaaaaacaataaattaattattaaaggttggagcaaacgaatcgatcacagacatcacgcaatcgatgctttaattattgcctgtacacaaccagcacacattaaacgactgaacgatttaaatcaagtcctgaaagaatggttagaaaaacataaagaagaatttttgccgggattcaaaggtagtaatgctgaattattagatgaagtattaaacttggatgaagaaaaaagaaaaaaaatatttaatcaattagaaaaattcagaacgattgaaatgccttggaacggcttcccagaagacgcagaacaaaaaatcaaagaaattgtagtttctcataaaccgaaagataaacttcttttgcaatatgacaaaacaggaaatagacaaataaaattgagaggacaattgcacgaagcaaaaaattatggattaagtaatggtaaagaaactaaacgtattcagttatctgaattatttgacaaagaaaaatcagccacattaggaaatttaaataaaattacacatgattttttaaaaacaattgtcttgagacattatcaagatgattatcaatttaataataaggaagccttttctgcagaaggaattctttacttaaacaaaaaattatcagaaagggtagatgaaaaaggtaatctaaaacctcatccccctatttcaacaataaagatttattataaagatccatcaaaatcaaaaaagaaaaccgaaagcgaggatgatgatatttccttacagaaattagacagaaaaaaatctttcaacgattcgctatatgtgaaaacaggggacaattatctctttgcaataatggaaaaagaagttgtaaataaaaagacaaaagaagacgagaagaaacgtcactacgatttgattactttttttgatgcagccaaccatttaaaaacagaatttaatatttctgaagacaagaaaagttttgataaagaagctttgtttaaaaaatattttagagaaagaaacaacgcaaaattgctgttcacattaaaacaaggagatttggtttatcttccaaatgttgacgaggaagttatttttgacgaatccagtcctttttatgagtcttattggaaaaatattgaagaacgtagtaaaaatatctttgttgttcaaaaatttagcggaaaagaaatatactttttaaagcatacggttgcagatgtaatttcaaaaaagaacgaatttggaacacaagattgttatcagaatcttgatgggcgttcaatcaaagaattttgttttaaaattaactttgatcgtttaggaaatatttcaaaatattaaatttatgtcaaaaccatcccttaaaaaagaactttcaaaattaactaaaggccaattgatagaacatatcattgatctgtatgacaaaaatagctcagtaaaagaattttacaagttctatcttaacccaaaaaatgagaaagaattagtagataaatacaaaaaattaatccgtaaagaattcaacgtagaaaatccgatgcgaagtacagaaaagttttcggttgcaaaacgggctatttctgattttaaaaacctgcaaccctcaccagaatctttgacagatgtgatgctatatctaccagaaagcgcttgcgaactcacccatcgctatggtgatttttctgagcagttttataattctacctacaataattataaagcagctttagattttattgcccgccacgatttgttagatggcctctccttgtggctacggttttgcagaggatatcgctgatgcattttatgaatattattaagtttatattccgataattatgattaaaagaacgctccacttttctaatccagcttacctcagtttacaacaagatcaattggtgatcgatctcccccatctaaaaattttgggcgaaaaggaatctaaaaagaaagtacccattgaggatattggcatcatattattagatcatcaacaaatcaccattactcatggatgtattgcggcattgctggacaataatgccgctttaattacctgtaacagcggccatttacctacgggtatgatgctgcccattgatggacatgatattcaaagtgaaagatttcgacatcaaatcaatgcatctcagcctttaaaaaagcaattgtggcaacaaactactcaggctaaaatattaaatcaggcagctatattgtctgatcgtggaattccttgtgagaatatggttcattgggctaaatcggttaaatctggcgacccggataattacgaaggcagggcagcagcatattactggaaaaatgttttcccgaagaagattgagtttttccgcggtcgagaaggcgatccaccaaataacttactgaattatggttatgccattttaagggctattgtagcccgtggattggtttgttctggtttactcccaactttggggatccatcatcgaaataaatataatgcgtattgcctggcagatgatattatggagccttacagaccttatgtagatcaaattgtattgggcattatcgatagaggagaaaattttctggagcttggaacatcgataaaaatgcaattgctcggcatagcaactgttgatgttcaattcgaacgcggaacaagtccgctgatggttggcctgcaaagtaccacctcctctttagcgaggtgttatgaaggaattaccagaaaaataaactacccgctgatgaaaaactttgataccaggcgtccgttcaattataacttttccagtgagattcagaatttcgatactgaagacatagaagttcaggataaagacattggtgaggaaaaactgccattttaattcatgcgcttaaatgaatatcgaattttgtgggtattagtatttttcgatctccctacggagacaaaaaaggaacgaagtattgcaagccggtttcgtaaagaaattatgcgggatggctttgcgatgtttcaattttccatctacttaagacattgcagcagccgggaaaatgccgatgttcacattaaaagagttaagaaattacttccagaaaaaggtcatatcggcatcatgacggttaccgataaacaattcggtatgatggaattattttatggcaaaaaagaaaaagaacttcctgatacgcctcaacagctcgagttattctgaaatagaaataaaataaagattagaataaaaatctggctgttaatacaaccagatttttttaattctaatttttgaactaacctactgacagatagttaattgaactagggtatgttgttgtaaatatcagtagttcaaagaaagaaagcaaatcacaacactttcttcactgaatggacaacaggtgatgttgttgtaaatatcagtagttcaaagaaagaaagcaaatcacaacacatgtcgcatttcaacaggcactttgtgagttgttgtaaatatcagtagttcaaagaaagaaagcaaatcacaacggaatgggatgaatacattaagtcactccagttgttgtaaatatcagtagttcaaagaaagaaagcaaatcacaaccgccgcttccaccttagcccatagccccgtgttgttgtaaatatcagtagttcaaagaaagaaagcaaatcacaactattcgtacttacgtcgtcgtcttcaaaaagttgttgtaaatatcagtagttcaaagaaagaaagcaaatcacaacgcgaagttagcgcgtcaagctaagtaattagttgttgtaaatatcagtagttcaaagaaagaaagcaaatcacaacgacgaattagaagacgctacgcttacgcttgttgttgtaaatatcagtagttcaaagaaagaaagcaaatcacaacggaatgcatcctcaaaaattacgcttccatgttgttgtaaatatcagtagttcaaagaaagaaagcaaatcacaacaccaggtctgctttaaatttagttaaaaatgttgttgtaaatatcagtagttcaaagaaagaaagcaaatcacaacgtaataagggaaatatattaccgaaggtccgttgttgtaaatatcagtagttcaaagaaagaaagcaaatcacaaccgaacgaaggggcgccactatcattgataggttgttgtaaatatcagtagttcaaagaaagaaagcaaatcacaaccggtattgctttcaggcttagcgaattcttgttgttgtaaatatcagtagttcaaagaaagaaagcaaatcacaacttgaagcgataaactgttcccttcgggttggttgttgtaaatatcagtagttcaaagaaagaaagcaaatcacaacaagcaacttgcgcttcttggtcggcacgaggttgttgtaaatatcagtagttcaaagaaagaaagcaaatcacaaccagtaaacccaaactttgcccggccttttggttgttgtaaatatcagtagttcaaagaaagaaagcaaatcacaacgtaataagggaaatatattaccgaaggtccgttgttgtaaatatcagtagttcaaagaaagaaagcaaatcacaacacaaggctgtctgttacaacaatgatacctgttgttgtaaatatcagtagttcaaagaaagaaagcaaatcacaacgcttaaatggtgatcctgcgtttacaaatggttgttgtaaatatcagtagttcaaagaaagaaagcaaatcacaacagaaagaaagttgaacaaccccaaaattaagttgttgtaaatatcagtagttcaaagaaagaaagcaaatcacaacacgcagcaacatcaacacctgctgctttcagttgttgtaaatatcagtagttcaaagaaagaaagcaaatcacaacgggactacacaacaacgctaggtttgatttgttgttgtaaatatcagtagttcaaagaaagaaagcaaatcacaacgatagatggcgcacactttcaatgttttaagttgttgtaaatatcagtagttcaaagaaagaaagcaaatcacaacgtagcgcatctactttagcgatgttggcgtgttgttgtaaatatcagtagttcaaagaaagaaagcaaatcacaacacctgtagatgccattatattttgcgtattgttgttgtaaatatcagtagttcaaagaaagaaagcaaatcacaactgctgcgaaatgaacatcatgcagcggtgtgttgttgtaaatatcagtagttcaaagaaagaaagcaaatcacaactcacgctaacagataagttagagcgtttaagttgttgtaaatatcagtagttcaaagaaagaaagcaaatcacaactcggatattggttagcataccctcgaatagttgttgtaaatatcagtagttcaaagaaagaaagcaaatcacaacccattataccgttgatatcgcaggaaaggggttgttgtaaatatcagtagttcaaagaaagaaagcaaatcacaaccggtattgctttcaggcttagcgaattcttgttgttgtaaatatcagtagttcaaagaaagaaagcaaatcacaacggtcgaatattttagttttaatccaatgttgttgttgtaaatatcagtagttcaaagaaagaaagcaaatcacaactcatgccagataaatcttgtttaattgtttcgttgttgtaaatatcagtagttcaaagaaagaaagcaaatcacaacttatacatgattgataaagcatctttagtgttgttgtaaatatcagtagttcaaagaaagaaagcaaatcacaacatataggaagcagctccttagctttaatccgttgttgtaaatatcagtagttcaaagaaagaaagcaaatcacaacctttcgtaatgactgaaataatttttcatagttgttgtaaatatcagtagttcaaagaaagaaagcaaatcacaactcgctagcgattcacattcgatatctgatggttgttgtaaatatcagtagttcaaagaaagaaagcaaatcacaacttcgcttggattgcttggcatttccaccacgttgttgtaaatatcagtagttcaaagaaagaaagcaaatcacaactggccgacaacgacgcaatactggacggaggttgttgtaaatatcagtagttcaaagaaagaaagcaaatcacaacataattgaaaagacaaaaaacgcgccaatagttgttgtaaatatcagtagttcaaagaaagaaagcaaatcacaactaaagcaataaccattggtaataaccaggagttgttgtaaatatcagtagttcaaagaaagaaagcaaatcacaacatattgagtgccgtaaatttgttttagtcgttgttgtaaatatcagtagttcaaagaaagaaagcaaatcacaacctgtgactctctctcaataccagaagcctcgttgttgtaaatatcagtagttcaaagaaagaaagcaaatcacaactaaaatgtatgcgatacttttcaaagtagtgttgttgtaaatatcagtagttcaaagaaagaaagcaaatcacaacaaggaacgctaaagccgatctatcagggcggttgttgtaaatatcagtagttcaaagaaagaaagcaaatcacaactagtatgctctttaacaaaatctcttaaatgttgttgtaaatatcagtagttcaaagaaagaaagcaaatcacaacacgaaggatctaatgttgcaaaactctctagttgttgtaaatatcagtagttcaaagaaagaaagcaaatcacaacttattcatgattgataaagcatctttagttgttgttgtaaatatcagtagttcaaagaaagaaagcaaatcacaactcgtgcgctatcgcttttgctacgagctcggttgttgtaaatatcagtagttcaaagaaagaaagcaaatcacaacaagccagtttattgatgtttctggcggtgggttgttgtaaatatcagtagttcaaagaaagaaagcaaatcacaacagtgccaactggctttgatattgtttatgagttgttgtaaatatcagtagttcaaagaaagaaagcaaatcacaacctttgccaagcgtttttcttcgcggtcggcgttgttgtaaatatcagtagttcaaagaaagaaagcaaatcacaacgtagttacccacactatcgcggaagttaccgttgttgtaaatatcagtagttcaaagaaagaaagcaaatcacaactgttcgaccacgttttcttccgtaacgcccgttgttgtaaatatcagtagttcaaagaaagaaagcaaatcacaactatgaatgcgcttgcgcactttttcgtcgcgttgttgtaaatatcagtagttcaaagaaagaaagcaaatcacaacaatccttggtttgaataaggcccaaagtttgttgttgtaaatatcagtagttcaaagaaagaaagcaaatcacaactgtagcctgttattgttctgaatggcaaaggttgttgtaaatatcagtagttcaaagaaagaaagcaaatcacaactggaaatggtgttatcgcgtatatcaatttgttgttgtaaatatcagtagttcaaagaaagaaagcaaatcacaactttttcgacttatcgacgctatctttttttgttgttgtaaatatcagtagttcaaagaaagaaagcaaatcacaactaagtgacatatctttaatgccctcctttagttgttgtaaatatcagtagttcaaagaaagaaagcaaatcacaacgatggactaaaactaacagcataatgaaaagttgttgtaaatatcagtagttcaaagaaagaaagcaaatcacaacggatttggacaaaataagtttcgtgttttagttgttgtaaatatcagtagttcaaagaaagaaagcaaatcacaacacttccaacctttgggatcatttccctgatgttgttgtaaatatcagtagttcaaagaaagaaagcaaatcacaaccaagaacacctcataatcttcatcccaaaggttgttgtaaatatcagtagttcaaagaaagaaagcaaatcacaactatcttaaagcaaataatgttaatatttgggttgttgtaaatatcagtagttcaaagaaagaaagcaaatcacaacaatcaattacatataaaataccgtcagcaagttgttgtaaatatcagtagttcaaagaaagaaagcaaatcacaacaagcgtttgcggttcgtccgttacggtatcgttgttgtaaatatcagtagttcaaagaaagaaagcaaatcacaacgtatcgagaaattacttcaatcctttttgagttgttgtaaatatcagtagttcaaagaaagaaagcaaatcacaacaacttatcaggggtttctttaattggggctgttgttgtaaatatcagtagtttggatattctggagcatgttgaccccccaattatgttttccaattccggtttacggtaaaaccatttaaagctttta

SEQ ID NO: 292 - DNA, 20029 bp, synthetic construct
  misc_feature 1..20029: note = Synthetic
  source 1..20029: mol_type = other DNA
tggccgatgcaacagccagcggcacctggagtgcaggtaatacacacgccacagtttcggccggtgtagttgccggggtgagtgcgggtactgtaactataagctatacagtaagcaatagctgcggcagcgcggtggcgacgaaggtagttactgtaaatgctgcattagcggctattacgggtacgaaagcagtatgcaagggtgcaacaaccacgctgtctgatgcgacagcgggtggtacatggagcagtagcagtactgcggttgccctgtgcggtggcagtggtattattaccggtgtgagcgcgggaactgctaccattacctatacagcgtcgggtggccatgtaactgcggtgataacggtgaatgctttgccggcggctattacaggcagctcaagtgtggtggtgggcgctaatataaccctggccgatgccacagcaggtggcacgtggagcagcagcactacgcatgctactgtgggcgcaggtacaggtgctgttcatggagcgtcgtctggcacggcggttatttattatactttgggtacaggttgtgccagcagtaagagcattaccgtgggtggtgcgcaccgcgatgcaagtaatgccgaaacagaagtagccaaagtagcagaaggtatggacataagcgtgatgcctaaccctaacaatgggatattccatattagtggcttcctgggatcgactgacaacgatgaggtggtacttgaggtaaccaatatgcttggccaggtggtgtaccaaaataaaatagtagcgcaaaatggagtagtgaatgagcaagtacggctcaacacagttgccaacggcatgtatatacttaccctctcttcggatggccagcataaagcttttcatataatagtaaggcaatagacgcctgatgtctatgaccaaaaaagcagtttgcccatcggcaagctgcttttttgttaggtctctaataagcaccttctacatttcttttaattcagtccatttggcttaaccagttctatcatcatattgtaaaacctgttaaaattaaattcaccgtcgaggcttaagatcccgataaataccagccgcccaaatgatttctttttacaggaaataaacaactatcaatctgttacatgcgcgtcttctaaagctcatgagaacagaatttaactatagcggcaacctgctgcaaacgccattattgaaggtttgctattgttaaaatctacttcttgttccagtttttctttagttattagcataactttagtgtagttgttaaagggaaagtgtgtggttgctaaagtgggtaagttggcctttaataatattttcagcaagtgtaagatcagcaggtcttaatagctacacactattcccaaattatgtgttcaaactattaaaacctcttgagtatgaatattcttacgcttatgaatttacgcaagcaccttattttatcctgcactttatttttgtgcgcatcgcaccttcatgcgcaggtttccggaacaaaaacaataggcattgactaccctaccctggctgctgctgtcagcgacctgaacacggtaggtacttccgggccggtaacgataaacgtgccggctggctatactgaaactgcgcctgccggaggatatgtactgggaagtactattttaaatgccagcacaactgcaaccgctacgttgacttttcagaaaagcggcacaggaacagaccctttgttaactgcgcccgttggcacgtctgcaaccaccgatggtatcttcatcatacaaggtacagactatgttattatcgacggtattgaccttgcagagtctgctgcaaataccacagctacaacacaaatggaatggggttatgcgctggtcaagcttcagaataccgcgccctttgatggatgccagaatgttaccatccaaaactgtacggtaacactgaatataaccaatgctggctctgtaggcatctatgctaacaaccacatagcaacagccacaacagcactttctataacagcggcaactgatgcgatgaacaattgcaggttctatagtaatagcatacagaattgcgcaaacggtatatcactgaaaggttatgcaagtgccgccagcccatacacactatatgaccagggaaatgacctggggggagttagcttttcaaccggaaataccattagcaattatgcaggcgccgccgcgggttcaggcattaaccttcaataccagaataatgcaaatgtttcatacaacaccgttaacaatctgtctggcggaggtgttgcagctaccaacacgttgtatggtgtgtacgttcagaatggaacaaacgcctcggccacagtgaacaacaacacaataaacataacgcagggaacaacgggcagcagcatgtatggcattaatgcaagctgtgccggtacaggaaccatcactatcaataataatattcttaccgcaaacgggggttcttctggtactgcatatatggtatacattggcggggggaatacgaacatcaatacaaacggcaataacttcgccaacattaatgtggctaccactggaagcctttatatggtttatcacagcacagctgccgccaccactaacattacctgcagcaacaactttaccagcggatcagcaacgccctatgtaaacaaaacaggcggcggtggcactgtggcatgctactacaacaatgccggggctggcaatggtactgtattgtttaacaacaacaacttttccaactttaaccttgcaggttcacctacattctacgggctgtttgaaaatgacggaggtagcggacaaaacaaatttgccaggaacaacacgatctccaatataacatcagcagggggcacactctatggcctttggatgggtttttcggctatagaaacatttgcaaataattcggttaccaatttgaatgccggtgccggaagtgcatacggcgtatatgtcaactcatcttctactgccgattccgtttataacaattcggtaaataatctttccagtgcaagtgccaacgtgtatggcatatacatatcgggcggcacaacagtgaacgttttcaaggacaccgtgaatacgctggcagccaatagcacttctactggtcttgcttatggcatatatgagtctggtgggaccacggtaaacattttccagaataagatatacgatatagcagccgccggcgccggaagctctgtaaatggcatgtatctcaactccggcaccgtcaccgcctacaataatgagataggcgatctgcgcacccctaatcttaacacatccacaggcacacagcttgcaggcatttacataggcgggggaacagcagataatatctattacaactctatatacctcaatgctgccagcacaggcacaaattttggatcgtgcggtatttacagcagcacaacaccagcagtaacattagccaacaatattgttgataatgcatcagcacctactggtacagggctgactgttgcctatagaaggagcagcacaacattaaccacttaccaggccgcatctaacaacaacctgttttatgcaggcacccccggctcgtccaatgttatctattacgacggcactacaacttaccctacacttttaagctacaagtcactggtatcgccacgtgatggcaactctgtaacagaggccccacccttcgtaagcacagcaggtccatcggctgcatttttacaattaagtacaagcacacccacccaggttgaaagcgggggcctcaatatagcaggcattaccaccgattactatggtgccgtacgtgccggtaaccctggctatgccggtagtggctcatcaccagatataggagccatagagggcaactacatgcttaccgatctttccgctcccaatattattgacaccgcactttccagcggctgcagcaccggcgaccgcacctttttcgcgaccatcacagatgctaccggggtgccagtaacaggcacccaggtaccgagagtatatttcagaaatggaatcggcacatggttttcccagccgggaagccttgtgtcgggaaccggcacaaacggcgtatggagctttaccatatcaacagcaactttgggcggattgtctataggcgatgctgtttcttacttcgtgatcgcacaggatgctgcggctacgccaaatatcggctccaatccatctgccggcctggcagcaagcgatgtaaataccgttaccgcttatcccacaactctaaatacttataccattatacccagccttacaggtacttacaacgtaggtaccggcatggcttatacaaccataacagcggccattgcggcctataatgcttcgtgcgtttcggggccggtgattttccagcttaccgacgcgtcatatgcagctgaaacattcccgatcaccataaatgcaaacggctctgccagcccggcaaacacattgactattcgcccagcggcgggagtttcacctataataagcggcaatagcggcactgcaatattcgtgatcaatggcgcggactatgtaacgatcgatggttctaacagcccggttaccaatagcatatgtcctgctatttcttccagcaggaatataacaattgctaactccagcacttccacatcaagcgctgtaatatggctgcaaacatctgccaccggcgatggcgctactaacaacaccgtccgcaattgcaacgttaccggcagcggcagctcaaatacactttttggcgtgggtatgggcggtacagctattgcatattccagcctgggcgcaggcaataatggcaaccgtatagaaaatgacagtatctccgctgtgcagaccggtatcttttctatgggtgcaagcgctgctaacaaaaataatagcaacgtcattaatcagaacctgttgaacagccccacaccaggcaatctcaggaataacggtatacttgttggttttgaaaacgagatcagtatatcaggcaataagatagctaacatcaccaatggcgtaagcaacgacatcattggcataagtgttggcattggcaataatgcggcggggacctctgtcaccactggtaatgaggttactaatgcctcgatcaccaataaccagctggataatatcacccagacaaatacctacaccgccctcggcatagcagtagcaggtgcaagctcaggtatcaataccattgctaacaacatgataagcggcgtgctcagcaatgggactggcggcgacttctcttcaggtatatttattggcggcgctaccggcggcgccaccaatatattttataacagcgtgagcatgtctggcacaacaaccggcgccagttaccccactttcgctatatccatatcaggtactaaccctgttgtaaatgttaagaacaatgttttcgtcaacaatgcatctacaggctcatctttgctatacgctataggcctggcctacacgggctattcgaacctgtcgtccgaccataacgatttttattcagctggggcaaatcttgcaacggtcggggctctatcaggctttggtaccgacgaagcaacgttgcctgactggcaaaccgaaacaggtaacgacgccaattctaaaacgtaaaccctgccttcgtgtcttcttcggatttgcatctgacagccgtaagcgcaaatgtaccgctcgataacacgggtacaccggtatcggttaccacagattacgattgcagcccgcggagcactacaacaccagatatgggcatcaatgagttcgacctgccggtatgttccagtgttactgcgggcatcgccgcacctgacaccactacgttctgcgcatcaggcagcaccacaatccacttaacaggagctaccgtggccctgggcattacttaccagtggcaatcttctgccgatagcgtaagctggtcaattattccgggcgctactaacgacaattatactacacctgtgctcaccagcacttctttttaccgcttagtgttacgatgcacatcttccggccttactgattcaaccggaacgagcgttactattcatccgctacccctggtaaccgtaagccccgatggaggcgctatttgttccggtggcacggggttaagcatgactgctgccggtgcagctacttactcgtggacgccatctgccggactaagcagtacatctggtgcgtccgttattgccaacccacttgcaacaacagcatataccgtaaccggcaccgacctgaatggatgtaataacagccacgtatctacgatttcagtaactaccgcgcccggagcaattaccatttctccatctcctgttactctatgcgcaggcggccctgcagctttattgtcagcggggggagcagcattgccatcttccgggccagacacgtttgctaccggcgctataagtgtaacagtgcctgatgccacgccaggcggagcagccgtgcctgtttcggttacgggcatccccggcggcgctactattaccagtgtatctgtattgtttgatgtaacgatgacgtttgatggcgaccttaccattaatctctccgcaccaaatggcaatacgcttaacctggtaaacagggaaggcggcgggggcgaagactttaccggcaccacggtaacttcagcaggcggcctctccttcagctcctcctcagcgccctattcagacatttttgcagcagatgcgggcacaggcacaggtactacagggttgccacaaacaaccatagtgtggaccgacctttacagccttgcaaatggcacatggaccctaagcgcccgcgactgggcgggcggcgacgttgccagtattacttcttatacccttgtaataaattatacgtataatcctgccgttacatgggcgcctgtttctggccttttcacagacgcggcgggtacaactccatatacaggagggtcagcggcaaccgtgtatgcagcaccggtggcaacaacagggtataccgccacactgtcactgggtgcatgcagcagtactgccacagacagtgttcatgttaatccgctacctgtaacaggccctatatcaggccctgcaattgtttgtaccgggtcgtcaattacgcttagcgatacatcagcaggtgggacttggagcagtagcaattcttcggccacagtcagcagtagcggatcagttaccggcgttaccgcaggcatggatactatagcctataccctaactaatagttgcggcccatcgtctgcaacaaagattatcaccgtcagcacatcttcttccgctggcattatttccggtgcatcgtccatatgtgtcggtgcctctactatttttgttgatgcgctaacgggaggcacatggagcatcagcaatactgctgctgctataagcagctcaggcttagtaacagcgctgcacgccggtatagatactatccgttatactgtaactaatacatgtggtaccgctgtagccacaaaactgatcaccataaatccactggccgattccggagttatatccgggccagccagtgtgtgcatcgggtcgtccattaacctggccgaaaccgtacccgggggtacatggagctccagcagcgctgatgctaccatcagtgccacgggcgtggtaagcgggttatcaaccggcaccgttactatcaattatacagtcactaatacatgcggcaccgccactgccagttacaatatcaatgtttacccagtgccatctgcgtttacggtaacaggcggcggcacttattgtgcgggtggtgtgggtgtacatgtaggcgtcagcggttctgagtccggtgttagctaccagctctatcgcgacggcgctcctttgggcgcaccggttgcaggtactggtagctctattgatcttggcctggaaacattagcaggcgactatacggtacagggcgcatacgctaccggctgtgcaacaaacatgacgggcagtgctgcagtaataataaacccaacaacgccgccatctgtgagcataaccacttcagggatgggcgatactttatgtgccggtacagcagccacatttaccgcaatacccatgaatggtggtttatcccctacctatcaatggaaggtgaacggcataaccacagcaacgggcagcacctacagttatacccctgccgccggcgacgtagtagctgtaaccatcacaagcagcacctgtgcagtgcccgatactgccagccactctattaccatcactatcgttccatacctggcgccatctgtaagcatttccgccacgccgggaagcactgtatgcagtggctcaccggtaaccttttcagccgtagctgtgaatggtggttccgctccgttatttgcctggacgaagaatggtatcaacgtagctacagggccaacttatacatttacaccagctaacggtgacgtggtgtactgtaccctcaccagcagctatccatgcacactgcacgatactgccacaagcaacactatagccatgacggtaacgccatctatgccaccatcagttactattacagcacatcccggtacgagcatagccatagggcaggcagatacgttgtttgctgatgtaaccaatggcggcccggcgccaacttatgaatggctggtaaacggagtagctatacctggcgctacaaattccttctacatacatgcgttctctaatggcgacgatgttaccgttattgttaccagcagtggcgtatgcggtggcgctacagctcacaatcatgtgatcatattagtgggcgagctgggagtgggccaggtaaccgcaaacgaggccgacgtaaggctattgcctaatcctaataacggcacatttgcgctgaagggcaatataggcgtaactgaggatgaagaagtaaccattctcatcaccgatatgctaggccagcaagtgtataggaaaaaagtaacaacgctcaaaggaaacattaatgagcccattacgctaaacggaagtcttgcaaacggaatgtatatgcttacactgcatacagatacgggtaacactgtattccattttgtgctggagcaataatgttgagaagactttgtatcgggcaaccgggtaaaattataattatggttgattgtcggtaaataacattttgataatataccttctggttatcaaaaccgtccccaactccgtcccccagaaaaaagcaaaacccctgaaactcaatagaatcaggggttttgcattttattctgaggtcgaaagcggattcttatacggtatgctcagttttcccccgttatgttttactactcttcaaaacattttccagtaaaggatttcaaaatattaaaaatatttcagtgaaataaagtataaaaatagctgcaaaaccagcagaaaacccgttcccagattatgaaagttgtagaagtgtaggcgcctgtcagtaagaattcattgagcaaaagagtgctatcggtatggtatatatccagggccgggagccacatttctgctcaatgagctgcaaaaacgggaggtcgacgatctgccgccggaagaaatagccaatgccatgaagggaatattgatgaaccagatatgccttcccaaagagactctcatccgggaagctgcaaaaatgtttgcatttgggcgcattggtaataatgtggaattatctataaatgaaggtatccgggtggctattgcaaaggagtaattatagaggatagtgacagaatcgttattaatgaaggggtgaattaggaatacgggaaaaatccccttttgggagaatgggttgtggattatattgtgaggggaaagaaaaaagcgacttgcgccgctttaaatgttttcacaacggaataatccttattgtgatttgctttcaaggtaaaggtaataaaaagaaatgaagatgaaaaaaacaatacttggacttgatttaggaactaactctatcggttgggctttagttgaagcagatgaaaaaaatgatcctattggaatcatagccatgggtagccgtattattcctatgggcgccgagctaagtaaatttgaacaggggcaggctcaaactaaaaatgccaacagaagaatagcaagaggtggtagaaaactcaataagagatataaacaaagacgaaataagctcatttatattttgcaacaattgaaaatgctcccatcacaaataaaattgtcgagcgaatttaatgacccactaaaacttgacaaggtatcaatactacctatcgctaaaaaacagaagcaatatactgctatagacctattggatttaagagtaaaagccttgtctgaaaaaatagaactggaagaactcggcaggatcatttacttattcaatcaactgcgtggttatgcaggcggcgacatggcgtcagaaaaagataccgagaatgatgaagagcaggagaacgatgaaaaaaaacgaaatgaaagttatatcacatttgcaaaagtggtccgaatatcagaaccagaaatcgtcacctttaagaatcggcaacttaaaaaaatacatgttacagttgaaacggaagatggcattattgaaggagaaacatttttagaagctttgaaagaaggggaggcattagaactacttgtaaatattagaaagtcgaaacaaggaacaaccattacattcaaattacccaacaaaacaagttggcgtaaaaaaatggagaaccttgaaaaagaattggatgaagcatcattgaagaaaggcaaggaagtgtttctgtctgagtatttttttgatatactaaaggaggatagatgggcaaagattcgaaacaacgtaatacttcgttcccgttatttgtctgaattcgatgctgtatgggatgaacaaagtaagcattatccattcctgaataaattagatacagataccctcacaagtatccttcattttatttttccgggatcaaaagacagtcaagtcaaattcagagccgaaggcattgacaatggattgaagtatgtcatcaagaaacagattattttttatcagagagagttgaaagaccaatcagatctaatctcagactgcaggtatgaaaaaacggaaaaagcagttgcgaaaagtcatcctacttttcaagagtttaagatatgggagcaaatcaacaaactcacaataaatacaaaaacagaaaatggcattaatagaaaaggcgaaataaaatacacttatgaagacagacccattccttcacgactgaaagagtggctgtatgttgagttgcaaaataaaaaagagatcaactttagcatagttctaaataagctgaagaaagaatatgatttaagagagaatacggacttccttaatggaataaatgcaaaagccaggcttagaggcaatgaaacaaggcttatgctcaaaaaagcacttggagaattatgggatatattggggttacaagatattaatcggcaaatcgagttatgggatatactctataatggaaggggaaatgaatatgatatccaaagcgatagaacatcaagaatactagcctttatcaaaaaacatgcaaatggcttatctgatatcgagactatagcaatacaaataagtaaaataaaatttagccgcaactattcctccttgagcctaaaggctattgaaaaaatattgccattagttagaacaggcaaatacttcgaatccaatctttcagagggattacggaataagatcattaaactcctgaatgagcatgtaagcgatccgtttgaaaaagccgcgcagcaatatcttgaaaagaacattgaagttttggccgagggcggtataatgaatgcttatgcaattattcttgtgtatgataaacatacagcaaaagcatttggtaaggatgaactaataaattcttattaccaaataaagcgattaaaagagggagaactacgaaacccacttgtagaacagttaattagcgaaacacttatcgtcgtaaaagatatctggaagtattttgggagtaaaccagacgagatacgcctggaattatcaagagacctgaagaataatgcagaacgaagggccaacttatataaaacaacgcgaaataaccagcgagataatgaagctataaaagatgaacttattgaattaggacggacactgtcattaaccaatagtaaaaccccaggcgctgccaaagaaatgtttgcaaaccagtataaatatccatcaaaaactgagatagacaaaatgaagttatggaaacagcagaactgcgtttctccttatacaggtcagcctatccaactatccgagctttttaaaagagaaagatatgatgttgatcatattattccacagtcgagatattttgatgattctttggcaaataaagtgatctgtgaaaaagcaattaatacagataagggcaacaagacagcaatggaatattttgaaaccggatcggtcattccgggcgttctctccaaaaactcatacatcgatcatgtgaataaacactttcatggcataaaacgaaaaaatttattagcgacgaaagtgccagaagatcctgtggtacggcaaataaaggaaacacaatacatttccatccgaacaaaagaagaattaaataaaattgttggcaatgatcatgtcaaaacaacaaccggcggtataacagattatttgagaaaccaatggggattaacagataaatttaaagaactgttgaagagtcgttatgaaaaaatagcacctgtacgcgcagaaatagaatatgaacaatataaaaatgaagtgactgaacgtcaaaaaaaagtcgatactccattccatgaaacaatactcagtaaagagaaatttattgaatcgtttaaccagaattttatcaaaaagaaaaacaataaatggataatacaggattggagtaagcgcgttgatcatcggcatcacgccatagacgctctcgtagtagcatgtactagccccgcacatataaagcgactcaatgacctgaacaaagagttgcaaacatggctggataccaatcggaatagtttattaccaaattttgaaggaactccgacagaattacttgatgaaatattgaatctaacctcagatgaaagggcgaaaatattcatacaaattgaaagattcaggaaaatagaactgccttggcaaggctttccggaagatgccgaaaaaaaaattcaagatattattatatctcagaaaccaaaagataagttattaatacaaaaaggcagggataataagcttcaaatcaagatcaggggacaactacatgaaggcactttatatggcaaaagtcaaggagtagaaacttatagaataccgttaagtaaacttagtggtaaaaattttgcaactgaaaaagtcattgaaaaagtcaccgatagctttcttaaaaatactctgaaagaacatttgaaagcctatgataacaaaaaagatgaggcgttttctgctgaaggaatattagctctaaacaaagaactagctcttaaacataatagtaaaggattattatcgccacatacaccagtatcttcagtcaagatattctatagagatcctgcaaaagtgaaaaagaaaaaaggacaggaagaccctgatgaagctttgcaaaaattggacagaggaaaggcgtataacaattcattatttgtgaagaccggcgataattatctgtttgcagtaattgaaaaagagggcaaaagaatttttgatttgattactcttttcgacgccgcgaatctgttaaaagatgagttcaataaagaaactgacagtaaaaaactaaacaaagaacagatattcaaaaattactttgaagaaaaatggaaagcaacgctgctttatacattaaaacaaggtgaccctgtatatatgccttctgactatgaagacatgattaccgatgctgaaagcccactatttaatgatttttggaacaacaaagcggaaagaagtaagagtatctattatgtagtaaaatatagtggcagacaaatctatttcataaggcataatatcgctgatactataataaaaggaatagaatttggcagtcaaaacgcatatgaaaaaataaatggcatatctataaaggataagtgcattaaactgaatattgaccgtcttggaaatgtaaaacctgcataatgatcaagcgcaccctctacttcggaaaccccgcctacctgagcaccgttaacgagcaactggtggtagagtttcctatgccgaagggtgcggatgagatcactaaacctaaaccctctactgcacctattgaagatattggtgtgctaattttagacaatcagcagataaccattacccaggcgctgatggctaagctactggccaataacactgcgctcatcacttgcgattatacccatcaccctaccggccttttcctcaaccttgatgggcacactttgcagagccgcatcttccaggcgcagcttgaagcatcagaacctctgaagaaacaattatggcagcaaacagttgcggctaagatacaaaaccaggctgcgatgctggggttacagtcggccaccgggagcttgtttaatgccccggataagctgttgactaactacgcgaaagaggtaaaaagtggcgatagcgaaaacctggaagccgctgcggctggctattactggaagcatttgtttcaatccatagttccgggttttccgggcagtgacggagaaatgcgctcctttacccgcgaccgggagggtattccgccaaacaatctgctcaattatggatatgccatactcagggctgtagtggcccgtggccttgtgggcagtgggttgctgcctacaatgggcatacaccatcgtaaccagtacaacgcttattgcctggctgatgatataatggagccttatcgcccatacgtggataaggttgtatgcgacatagtgcggactgcagacatggcacaaaatgatggggcactaaagggcaattacctggaattgaccactgacataaaaaagctgctgctgggaataccggcaatggatgtgatgatagacgataaaagcagcccgctgatgaatgcggtgcagcgaacaactgccagcctggcgaaatgctttgagggcaaggtgagaaagatattgtatcccgtattatagtgacttgttttccctggaaagcaaagcctaggttatatgttcgaccgtttaaacgcatatcgcattatgtgggtacttgttttttttgatctgcccactgacaccaaacaagaccggaaaaactatgctcggtttcgtaaagacatgctaactgatggctttcagatgtttcagttcagcatttatatgcggcattgcagtagtaaggagaatgcagacggacatataaaatgggtaaaaaagaaactacccgaaaaagggcacgtaggtattatgtgtattaccgacaaacaatttggcatgatggaaatattccggggccatgaagttgtaccgatcgaagcgccaccacagcaattggaattattttaaaacaggaataaaaaaatggatgaaaatccatttttttattcctgttaaatagccgaaacccttgctgggtggcatttgtagcgatcggtgttgttcaagacctctaagctactgaaaattgaaagcaaatcacaactgataggaatttgctcctctctttgccggggttgttcaagacctctaagctactgaaaattgaaagcaaatcacaacgccgcgtgttaaattcaattggccgtatagttgttcaagacctctaagctactgaaaattgaaagcaaatcacaacacggtaactttgttactggttcgtctaatggttgttcaagacctctaagctactgaaaattgaaagcaaatcacaacctgtgctgtgccagggacaatgtcatagccgttgttcaagacctctaagctactgaaaattgaaagcaaatcacaactatgtggcagaaagatactattgtgcatagttgttcaagacctctaagctactgaaaattgaaagcaaatcacaacactctgtaatagaaccacgtagcttactaagttgttcaagacctctaagctactgaaaattgaaagcaaatcacaaccctctccttcaaggaaaccatagcttatgggttgttcaagacctctaagctactgaaaattgaaagcaaatcacaactccaccattcggctatatccgacaccttaggttgttcaagacctctaagctactgaaaattgaaagcaaatcacaaccagatgcaaatggcgcagaagctacttgcagttgttcaagacctctaagctactgaaaattgaaagcaaatcacaactcgtaatgttataaggttctctaccttcttgttgttcaagacctctaagctactgaaaattgaaagcaaatcacaacagatgcttaggagacagtttcagaagttcgttgttcaagacctctaagctactgaaaattgaaagcaaatcacaacacaactatagctggagtagagcaacttattgttgttcaagacctctaagctactgaaaattgaaagcaaatcacaacgttatgatgctggccctgacgggtttgttgttgttcaagacctctaagctactgaaaattgaaagcaaatcacaacagaacgttgtccggagtaaatgtttgcagtgttgttcaagacctctaagctactgaaaattgaaagcaaatcacaaccccaccacagtattggcaggcaaaggattggttgttcaagacctctaagctactgaaaattgaaagcaaatcacaactaattcagtatgatacaccggtaagccggtgttgttcaagacctctaagctactgaaaattgaaagcaaatcacaactaagattgtccggtagcgtggtcataaaaagttgttcaagacctctaagctactgaaaattgaaagcaaatcacaacatagaaatatatagcggcgctttgtcactgttgttcaagacctctaagctactgaaaattgaaagcaaatcacaacagatttgaaagcggtaaattttggcttaatgttgttcaagacctctaagctactgaaaattgaaagcaaatcacaactagatttattacactcctttctagctcctcgttgttcaagacctctaagctactgaaaattgaaagcaaatcacaacagatccctattggattattcaggttaccaggttgttcaagacctctaagctactgaaaattgaaagcaaatcacaaccgttttacaggcagtaccgtaaaagcggccgttgttcaagacctctaagctactgaaaattgaaagcaaatcacaactacgacgttctttgttaccagctggtaatagttgttcaagacctctaagctactgaaaattgaaagcaaatcacaactggtatcactcacggccagcacatcggtatgttgttcaagacctctaagctactgaaaattgaaagcaaatcacaaccgcagctcacagaggaagaggagaacgagagttgttcaagacctctaagctactgaaaattgaaagcaaatcacaacggaagttttccagactataagcagattatcgttgttcaagacctctaagctactgaaaattgaaagcaaatcacaacatcagtgttcagctcctgtggttatggtaggttgttcaagacctctaagctactgaaaattgaaagcaaatcacaacctggagttgattggcttgatactaataaagttgttcaagacctctaagctactgaaaattgaaagcaaatcacaacaaggtaaaaggaaatactaaaaaattagttgttgttcaagacctctaagctactgaaaattgaaagcaaatcacaactcagaacccatcggcaggcacatacacagagttgttcaagacctctaagctactgaaaattgaaagcaaatcacaacgaataaagtttgattaatcaaaaacttaatgttgttcaagacctctaagctactgaaaattgaaagcaaatcacaacattggaaatgctggaacaaagggcttgaggttgttcaagacctctaagctactgaaaattgaaagcaaatcacaacatgaatgttaatgtgtcttgctcctcttttgttgttcaagacctctaagctactgaaaattgaaagcaaatcacaacatagtaagatcacttgccataccttcaagggttgttcaagacctctaagctactgaaaattgaaagcaaatcacaactaagttctttatctgtttgtttaaatctaagttgttcaagacctctaagctactgaaaattgaaagcaaatcacaactaccgaagaccaggaaaaggatgatgcacagttgttcaagacctctaagctactgaaaattgaaagcaaatcacaacggactcgctcttttggtttattttggtttagttgttcaagacctctaagctactgaaaattgaaagcaaatcacaactgctccctattacccttgcccgtaacgctgttgttcaagacctctaagggatcaagctgaatttccggggatgaacttattttaagcatagatatttgccagtctaaagaggaagaagttaatgtcgcgcacacctctggacgtagctctaaaggcttttactttagcattgaatgattctgcagctgcgtttgtacttctattgttgaagaagttgaggatatttatatagtgggtctgtatagatcttgcaaccgtcctgaacgattcaattccggatgcttctacatcattgtaccagagtgccagctttttgaaggctacctccttagattttacatttttgaagatatctcccattttaatagagagttcatatgcatccttaatttcagggaaacgctggaacaatatccgggctctatgcttttgagatccggtccatttactatcgtgtttgaagagcaggtatctgcttcgggctaacagttgcctgagcgtatcgccatttgacagcacttccggtgtataggttttgtcattggctttagcaagggtatagaaactggtttgctggtcaatgacgtgccaccgatatttgatccggatctcctgaacggcatcgtgggccagtttctgaacatggaagcgatctattacctggcgggcattgcagaagcagcgtcttacagccgatatcatattggctgccatatccattgttacctcttctaccttgttgcgcagtccttgcgggatcctgtctaaaacatcagctatttggttggtctgtgtccccttgacatagctactattgtcccctttcggcctttggcagccttattggttactatagtgtataactctccgtttgacacagatgtctcatctatacttaggcgtaatcccatattctgtggaaatatcatccattccgatgcatgatctttctgttcccaatctttatagttgctgatatggtctttgtattgctgctgtaattgtttaccatctacctgaaagaactcccccagatgaaagcagcttataggcttactatccaaatatcccttttaaaaaagccgcaaactctctggtcatgcgggtgcctgattgcactaacttccaatctctgctgattatagccccgtctgagataacctcccatctgcggcgcttaatatacaggtaggctttcttgcccctgatcgggaagtcttccactcttatctggtcatgaaagcctttggatacaatatcttctgctctgtagccctggggtgccatatttctctcttcaagataaatgttcaaaccctctttaccagaccctgcctctgtaatatcaaaatattctaaaatgccctctggtagtagcagagataccagtgtagtgt

SEQ ID NO: 293 - DNA, 18345 bp, synthetic construct
  source 1..18345: mol_type = other DNA
  misc_feature 1..18345: note = Synthetic
ttcatgttcaggaatctattttgaaggagaaaatggcaatgacagaacatcatgtatcagaatccaggataatcactgcagggtgagcagtacaggttgtcatgcttatttaacaaccaatcattccagttcattcgtacatgccttatctaccgttacttctgcgcatatttattctaaaaataattattttgaatatttatccgactggtttgtgtctgtatacagatttgaggcaactaattttgaaaattataatattgatatttcaggggataattatatgaataaccttatagcaggctcttcttatacctccattacttcttcatcacttaaaaaaggaaaaggaagtatccagattgtttatccttccgggcacgagttggctggaaccctccttacaaatctgaatacagtatctccatatcagtataatgcggtgaccggagctgaaaatgggatgatcaccacctttgccaattcaggctatccgggtgatgatggggcaggccttcagggtacgattggctatactccttatacagctgtttatgaaaatggggcatggaagaaaatacctaaaatttaatatgaactattttaaataaatcactatatttggataaataataaaatagattttcatagacttcagtaaaaagaaactgttttcgtttcagcttcttttttacatacttctttttctggtcatttgtacaatttgtgtacatatggctaaacaaaaataagagacagcctcgctttgagctgtctcttttttgcattctacaatagggaataatttttaacaaataaccaaacctaacaggtttcaaaaacctgttaggtttatcttatatcatttttttatcaatgtaaatgatctgcttctaatttttgatcttcttttgaacttctttttattgtacatatttacctgtataaattgcaataaaaatacatgtgaatgcaaaataatgtagggtagagatttttaattttaaaaaccttataggaataaaaaacacatcaaattatgaaaaaaaatatctcgaatcgggaggaccctgttctgggtacaagcggatctccagtgaacctgaatgtttattttgtgaaatcgggagagaccctggagagtatttcatgggatttacatctcgaaaatcctaattatctccgtgaatatcataatgcacgatgcagccctttagatatagttccggaaaacggaacattaagacttctgcaaaagcttcacattcctgtacctgatgaaatactaaggattaacagacagatccgggagaagggagaaagcctatgttatcttcttcccaatgggaaaattccattgaatatgaacctgatcaacggagattattttgtaaggcagaccgaaagtgatgatgcgatacaaaaatatgagtatgcttataaactgcatttcagttatctcaaaacaatacaggacaggcattatatccatttctcaatgagcagtttccaaaaagacggtgaagaaccggaagagaaaatcaatcatctggcggcagatctggtgaaaataatgtatccggtaaccttgatcctggataactcaggaaactttgtagcagcagaatcttataaagaagtaaaagaaatgatccgtgaaatagaggctttgaaagattatcattccggagcttacgccgtttcccatattgaccagatgaaacaaaatatatcagatccacagaatatgtataggagcttaaagaaaatactggcactgcaatttgttttcaataaattttaccaggcagaataccgttcagaagataccacattgccttatcgggatgagttttcatggcttgctcctgcttctcccattcaacttgaaatgattcataagaccttgttgcagacagatcctcagtttgttgaacttctgcaaactggcaagtccgtagattatcgtactgctcaggaattattttatacagatttcgagtatgatgaaagcatcagtcctcattcagattctgtaaaggccaaacatcaggcaaaatatattttagatggtaaggacttttctatacagaaaattaaagcagagtttgatcttcacatgcctgattataagaaaaaaatgacttttgagttagaaaaacaaccttgataccaaaacaaatacgatgatgtcagaaaatttatcagctcatgatggcaaacactttgtcattcaaaagggcaaagctcaatgtaatcagggaaatcagtttccccacttcagagtaacctcccatcaaaaacactattggaatacccaggattccatagccgatcatcttgccgtaaccgaagatgatgtacagtttgatcctcccgggccaagttttggaacctgtagattgaaacctacatcaggaggctatctgccatgcacttttgctcctgcaggaaagtggcaaaaagtgtatgaaaaaaccaaggtcatgaataagagctgtatttctgagatttctgaactgatgtgcagtaccggtgggaaaatcacgataaaggaacatggccagacttctgtgatgaaccggcagaatataacacaggcagatccgggaacctatcagatgattaatccattcttagacctgaaggaatcacaaaaggagctggaagaccctgatccggtttatgaataattttgaaaaattaagaggtatggcaaagttaactattacagggaataccgagcccagagtcggaaatacagagatatattccctttctgcagcagatggtcttacgttgttgaatcctgtgtcttttccgttgacaaagatacactggaacatccatatacaggataaaaaaggatggcggataacgaatggaaatttgaaggaaggcgaaatcgtttcctatacatttacgaataagagtctcaaatacaaggctctgaagattgaagttgtcagaggaaaggataggggagatttgtatatcaggccacaggctgccgaaaaccccaaaatagttaatgtagaattgctggatattaattccaggcagattcccaaaggaaagcttctgcattataccgatacgataatagctaaagcctattgtgtagggatgtttgggcaaaaagtctcgtttagtctttgggaagatgatgccataggtaaagggcatgacccggtggtgaatatgatgaataagatcaatcagattcctgtcatcggtgaggtggatcatgaaggggttgccagggttgttttcagattgtcatcttacacaatggctgttcggatcgccaatgcgggagttgcaaaaggagataaggacgaaggtaaaacccacgaatattatgtgactgcagaaaaggtctccaaacatattctaaagaccagtccgaacgtaaatgtagctaatcctacctatatccctccggcatctgaacaatccattctaccaaagcaaattcctcctggaaataacggatcaaaacaagatcggccgaaaccgaaagaaaatacagccaaatttccacaaaccccggaagcccggcaacaggctgaccctgaaggaaagatcctgagtgccgaatttacagatggtatgggaaaacctttgaaaaatgcaaaaactggaaatatcgtttccattaaaataacttcccaaaatatgaaagggaaaaatgtaaagataaagatctgggaagaagatctgtcctcttacagcaatgatcttttgtacgaaatatccgtaacgttggcttatgataccactaacttcatcaatgggattactcttaccaaagaaatgtatactaaagggaacgggtggggagaaggaccttcgcaggaatatttcatagaagttgaacatctcaatacttctgtaacttccagagtgatcccgataagtccggatgctgaacctgtgaaagtagatcctaatgattctcctgtgatgattaaggagccgaaacgggagaaaaaagaagaaaaagcatctagttgtatttgccagcaatatgatctagtctggggtaataagattggttgtaatgaaagaaaaaaggttattgaggttgccaaaaatctgaatatcgatcctaattggttaatgacggtgatggcattggaaacaattgaaacttttaggccgtctatagataatggtgttggatatgttggattaatccaatttggaaaagaagctgctaaaacgataaagactacgcaagatcaattgatcaaaatgtcttttatagagcaaatggagtatgtacagaagcatttagtctcccataaagcgaagtacaaaacattaacagacttatatttggcagttttatatccaagtgcttgtgggcatggttccgaaaaagactatgtagttttgcatggagcagcatatagaaataatccattattctttaaagaaaaaggtgaatgggaatgggcatataaaacaaacaataagggaaaacaaataaaatataaaaaagcaacagatccagatggaaatacctatgtgtgggaagttgcagcagcagctcaagaggtttataatcgaggattagatataaaagaaaatcaattcagctgtggagtaaataaagaagaaaaatcccttaatgggaaatgtgcaaaagattgctcacaatgttttgaatatgcagacgtagttagtaatcctaaagttaatgatcaaagtggtaataaaaaccataatcggtatcataaagcacaaagaacacgttcagatgggtcaaaatattttcatacaggaacagacattctttcgattgttggaacggaagttcactctatgatgtgtggtgagataattcacacccgctcagaattaccacaaaatgatagagtaaaaggttatgaatcttctacaagttatggtaacaccgttacaattaaatcaaaagataaagatggtaaaacagtatatactttttacgcccatttatctaagatacatgttaaaattggccaaaaggtaaagcataatgaaattataggtctgtcaggaagtacaggtaatgctatgcacatagaagtacagcatagacacattcatgtggaggctggaactgattatgaaatttatagcggtgggaataaatgtaaacttaaaaacagaataaaccctgaaaattatatgaaatctaaatttgataacaaaggcaatactttatgaaaaatattaaaatcatactatcaattttaatcactttttgcttaatatcatgtaatggacaaaataaaaatgaggaacaaccaaagcccttagaggttaatgatggagttccaaattttttggataaaagattttttagttcttatgaattagatcctaataatacttatccaatatacttttacagaaactctaaaatgggagaattttctgttatttttcttgccaagaataaagaacttcaggaagaatggaaaaattatgatagtaaaaataatattatgattgaggaaggggctacaaatgaacaattgcgacaaataaatttgttgataaaaaagaaattggagcctcatattaatgattattataggctagccgaatacattgctcctcaatacattaaaaaaaatgattacatttttccatttattaaaaagtattatctatttgaagatgttaaaaaaagatgggaatatataggagaaaaaaaaattaaagaaggagaagaaagtgtaataagtattgatgaactaaacactatggtacatagcaaaaattcaaaagagaataatttgaatttacaagttaattccatttctaaaaattggtatggtaaatactcattaagcctaaatgaagatagtgaagactggagagatattcatgaaattacattaaaaatctcaaaagattctattacttatatggcagaagggtttcaattgtacgaattctatacattaatcataaaagaaaataaagaaaacaggatccgtttgagctttttaaaagcacttgatcatactgaaaatgctgtatatctgaaaaaaacaaaagattttggggttattacttttattggagaccaatatctttggagctgtccttatattgatgaaaggtttgcagaaagaaaaaagaagacttacccattaaaaaaagaaaaataaataaaggcatactttttcaggcaactgcctcctcagaagctattgattttcctgatttgaaaagagtttcaaaccatctttaaacttttctccttaagaagctcttttatttcaggcattttcttttccttgacaatatacgttttgcagatcttattgttgaggttcatgctgaaatttttttcgatagattcatccgcccaggttttattgatgggtggataatattctatcaaaacaggccagaaattgaagagagacaatacatttctctgtaatgactttaagaagtccggcgtatttccaaaatcatcgatgacccttattttgaaaagttttttgccaagacttgccccctggtatgtttcccatagcgttcctgaaataatgacaagaggaatggaatataaaaatcccataaaggctgtataagaaaatacatataagaaaataactaaaaaagggagaaagtcgatcattttagccaacagtctttcccattggtagttcttataccaggagttgcatggaaattcatattcaacctggttgtatattctgtttccttcacgatcaaactcacgggtagccctgcggataatccttttctctttaagttcagatattttcataatggttatagtggttctttattttcagatcaaaaccagtaaaatcttacacatagagtgccaaatctgaaaaaattgaaactgcaggctcataatgatccgtattcagttttccgaagccgtatgtacagaagataaaaggaagattattggatgcggaagaatcataatcggtttgggtatcaccaatatacaccgtgtcttcagctgatagatgatttctttccataatgagtttaatattctctgattttggctttgtggtccgtccgtgagattcaaaatcggtgaaaagatcattgagtttataatagtctaaaaacgcctcaatatacccatcctgacaattacttacaataaaaagacgatggtcacgagcaagaattttcagggtttcttccacattttcatataaaactccaccctgagtacggagaatagtattctctttttttataatttcagaaagagtttctttcacctgctgatcagaaatgcccggtacaatatctttcagaatatctttagccagaagccccatatactgatccatatcttcaggctttaattccctttcgatgaattgatgctgatgcagaatgtcattccatatccctatgatggttgctctgggatcccataatgtcccgtccagatcgaaaattaagtttttatatttcaaaatatgatatttatattattcgttagttaggctggaagcaggaagttggaagtcactgttcgccttattacagttgatcatgaataaaattgtcattttcaaaatataataaagccagatagtagtatttacgacttaaatagcttccttattcctgcttctggcttcctagttcaatcaactatagaatcatgcttagctgaacccttttccttgcttcatccacttcagttacttttacccttacatgctggtgaagctttaccacttcgttgacgtcagaaacaaagccgtctttcagctgggaaatatggaccagtccgctttctttgattcccagatctacaaaacatccgaaagcggtaatattgttgacaattcccggaagaatcattcctgcttttaaatccttaatgctttttacattcggatcaaactcaaatactttcgcggcttttcgagggtccagtcctggcttttcaagctccttcagaatatctttgattcccagaatcccgatttctccagttatataagactccggttttatcgaagcaattttttctttattggcaatcagttcattggttttaatccccagatctttagccattttttctacaattccgtaagcttcaggatgtactgccgaattatcaagtgggttcttagcatttgaaatccttacaaaagccgccgcctgctggaatgctttctctccaagtcttggcacttttttcagttgctttcggtcttcaaaagccccattttcagcacggtaattcacaatattctccgccattttctctccaattccggaaacatagctcaacagagacttactggctgtatttaaattgattcccaccgagtttacacatttcatcaccgtagaatccagttcgtttttcagttgagtctggtctacatcatgttgatattgtccgactccgatagatttcggatcaatttttacaagctctgccagcggatcagaaagtcttctcccaattgaaaccgcaccacgcaccgtcacatcataggttggaaattcatccctggcaatcttacttgcagaataaacagaggctccggcttctgaaactacaaagacctgcaatggcttatcaaaagcgatctttttaataaagaattccgtttcacggctcgccgttccgtttccgatagaaatagcttcaatattgtaggcattcaccatagaacggatttttttcatcgccattccgctttcattctggggagcgtgagggtagagggtttcattatggagcagatctcctttttcatccagacacaccactttacagccacttctgtatcccggatctatagccagaattcttttttcgcccaaaggtggggccaatagcagctgacccaggttttcagaaaagatctcaatcgctttctgatctgctttttctttagcttcctgcaatgcttcattagaaatggcaggttccaaaagccttttataactgtctttgatggcaatcgctatctgttcataactttcattattcgatttaatgattgctttttctatgaaatcgatcgcttcttctttgtcaatccccacattggtcttcacaaaaccttcagcttctgctctcaacattgccagaagtctatgtgaaggagttctgctcaggttttcctcccattcgaagtattgagagaacttttgagcatcttcctcatcttttttagcctttacaaccttagaagtcactacagccttacgctgaaatatccgacggaggtttttacggacatacatgttttcattgatccattctgccatgatgtctctggcgccctgaagtgcttcttcctcagaggccacttcattgttcagatattttgaagccagaaacagaagatcattgttcttctggctcatgatgatcttggctaaaggttccagccctttttctttagcggcatccgctttggttttcttgcgctttttgaaaggcaggtagaggtcctccagctcctgaagatcaaaactgtcttcaattctttgttgaagttcaggcgttaaagcatcctgctcctctatagattttaaaatagattcttttctcttcacaatctcatcaaactgtttgctgattttcgcaatttgttcgatctgggtttcatccaggtttccggttctgtctttccggtaacgggcaataaaaggaatggtgcagtcttctgctaataattgtaaagtattgttgatgctcttttcagaaatattgagctgcttctgtataaatgctacggtcgtcattatttgtttttcggatagctaaaatagggtttttaaaacgaaaaaaggcgagttgccccgccttgaatgttttcacaacggaataatccttattgtgaattgctttcaaaattattaatacaaatatagcagaaaaaatctttaatagaattatggaaatccgtaattcagatgttttttttatttctatttttatgtagtatcaaaaattagaatgatgattaaaaatatacttggattagatttaggaaccaactccattggctgggctttaataaaacaagattttgaaaataagtatggcgaaattttgggaatgggaagccgaattatcccgatgggagccgagttaagtaaatttgaacaagggcaggctcaaactaaaaatgcgaacaggagagttgcaagaggaacaagaaaactcaataaaagatacaaacagagaagaaataaactgatttatattttacaagagcttggaatgttaccagatcaaattaagctggtgaatcaattttctgatccaaataaattagacaaaatatcaatacttccaatttctaaaaatcggcaacagttaacggcttttgatttactggaattacgtgtaaaagcattgactgaaaagattgaattagaagaattaggaaagattatttacaaatataaccaacttagagggtattccgggggtaactcagagcctgaaaaggacgaaaataacgaggatgaatctgaagaaaaagaaaaaacgaatgatagttttgtggttttttccaaagttttgtcattaggattgcctgaagaaataacttttaaaggtaagaaattaaataaaagaaaaatttcgattgaaacggaagatggaatcatcgaagctgaaacttttttagataatataaaagaaaatgattccttagaacttcaggttaatattcgtcgtgctaaatctggagatacaattaccataaaactccccagcaaaacaagttggaggaaaaaaatggaaaatatcgaaaaacaattggcagataagtcaaaagaacttgatagggaatattttatctcagaactgttattcgatattcttaaagaaaacaaatgggcaaaaattcgcaacaatgtgattttgcgttctagatatgaatcggagtttgatgctgtttggagccaacaatcgaaatattacccattccttaatcatttagaaacagacagattacaaaaaatattagagtttatatttccaggacaaaaagaaagccaggaaaagttacgacaaacaggtttaaaagaaggattaaaatatgttattaagaatcaggttgtgttttatcagagagaacttaaggatcaatcagatttaatttctaattgtcgttttgaacctattgaaaaagttgtagccaaaagccatcctgtttttcaggaatataaaatttgggagcagatcaataaattggttattaataccaaaattgaaaatggtgtaaatagaaaaggggaaatcagatataagtatattgacaaaccgattcctgtggctctaaaagagtggctgtatgaagaattagaaagtaaaaaagaagtttcttttaacccaatacttacaaaactcaaaaaagaatttaacctgagagaaaatgttgactttcttaatgggatgaacgctaaagataagctgaaaggaaatgagacaaaagtaattctgcaaaaagctttaggggaattgtggaatatatttagtttggatgattctgaaagacaggtggaactctgggaaatactctataatggtaagggaaatgaatatgatttaacaagtgaaagaacttctaatgtattagcgtttattgaaaaatattcgcctgatttagaaaataagaatgatgtagctattaagatttctaaaataaaatttagcagaaactattcgaacctcagtttaaaagcaattgaaaatattttaccattagcgagagcaggaaagttttttgatcaaaatttttctgaagcattaagccagaaaattcttaaacttttgaatgaaaatgtggaagatccgtttgaaaagtcggctcaggagtttttagacaaaaatcaagacgttttatcagacggaggaattgtaaacgctattgcaactatattagtttatgataaacataccgctaaagaatattctggcgatgaactacttaaagaatttacccagatttcaagattaaaacaaggagaactaagaaatcctttggcagaacaaatcatcaatgaagcactaattattgtaagagatatttggaggaaatatggttttaagcctgatgagataagagtagaactggcaagagagcttaaaaacaatgcagttgagcgtggtaaaatgtattctgcaaatttaaaaagccaaaaacataatgcagaaataagaaataaacttatagaacttaagcaggaaatttctattgccaacattgaaaaatataaattatgggtttctcaggaaaacttacaggaagtatatcttaagaattataacgatccgtctaaatctgaaatagaaaaattaaaactctgggagtctcaaggtcatgtatcgccttatacaggacagccaattccactttcggaactgtttaatcgtgaaagatatgatgttgatcatatcattccgcagtcaagatattttgatgattctctgtctaataaagtaatttgtgaaaaatctataaataatgaaaaagggaacagaacttctatggaatatttcgaagtaggttcagtaaattaccggatttttacaaaagatcagtttattgatcacgcaaataaatatttttcaggaaaaaaacgaataaatctgttggcaacttccattcctgaagaccctattcagagacagataaaagatactcaatatatttccattcgaatccgtgaagaattgaataaaattgtcgggaatgaaaatgtaaaaactacaacaggaggaataacggattatctaagaaaccattgggggttaacagataagtttaaagttttattgaaagaaagatatgaagctgtattacccaaaattgctcaattagaatatgataattataagaaagaaactgaaaagaaatttacagaatataaaaatgctgatgttgaatttaatgaacctattttggatgaagaaatttttattgaaaaatttagaagcgagtttataagaaagaaaaataataaactgattataaaaggctggagcaaaagaatagatcacagacatcacgctatggatgctcttgtaatagcatgtactcaaccagcacatattaaaagattgaatgatctcaatcaggttcttaaagaatggttggataaaaataaagaaaaattttttcccggttttagtggtactaaaacagaattgcttgatgaagtactgaatttagaagaagaaaaaagacgggaaatatttaaccagctggaaaaattcagagctattgaaatgccttggaatggtttcccggaagaagctgagcaaaaatttaaagaaattatagtttcccacaagccaaaagataagcttttgctgcagtatgatattcagggaaataaacaaataaagttaagaggacaattgcacgaggctaaaaactatggactaaaaaatggaaaagaaacaaaacggatacaattatctgaattatttgataaagaaaaatctgcgacattagggaatttgaataaaataactaatgaatttttaaaaaagattatccttaaacattacgaagaagattataaatttaataataaggacgctttttctgcagaaggaatattagatttaaataagaaacttgctgaacgaaaagacgaacaaggaaatccaaaaccacatccacctatttcaacgataaaaatttattacaaagatccgtcaaaatctaaaaaaaagaaaactgatgatgaagatgatatttcgttgcaaaagttagatagacaaaaatcatttaatgattctctatatgtaaaaacaggagataattatctatttgctgtgatggagaaagaagtattcgacaaaaaattaaaagagaataaaatggaacgtcattacgacttaattactttttttgatgcagctaatcttttaaagtcagaattcaataactcagaagacaagaagaattttagtaaagaagatttatttagaaaatattttgaagaaagaaataatgcacggttactcttcaccttgaaacagggagattttgtatatctcccagatgataatgaagaaattattttggacgaatcaagtccgttgtttatggattactggaaaaacacatcggagagaagtaatagtatatatgtagtacaaaaattcagtaaaaaacaaatctattttttaaaacacactattgctgataccattgtaaaaaaagtagaatttggctcacaagactgctacgaaaaagttggagttaagtctatcaaagatttttgtttcaaaattaattcagaccgtttaggaaatatttcaaaagtatagttttatgattacccgttctatttacatcggcaatccagcctatcttaaactcaaagatgagcagttgaaaattctttgtccggaaacaaaaacggaaaaagggagtattcctgtggaagatctgggtttgctgatgttggatcatttccagattacgatctcacatcaactgattcagaaaatgatgggaaacaatgtggtagtggtgagttgcgacgggcatcatttaccccatggaattatgcttccgctttatggacatactgaatattccgaccggattaaagatcaattagaagccagtgaaccactcaaaaaacaactttggaaacaaacggttgaatgtaaaattgaaaaccagaaagaggttttaaaaagattggggaactattatgaaccgatgattaattaccagaatgatgtgaaaagtggtgatataaccaatatggaaggtattgcagcacaacattactggaaatacctcattagtctggattttttgagacagcgttttggagattcgcccaatcaatttttcaattttgggtattcagttctcaggagcattgtggcaagggcgattgtggagacgggattgcttcctgttctaggaatttttcataaaaataaatacaatccttattgtcttgccgatgacctgatggaaccttatcgcccttttgtcgatttattggtaatgcaatggcttgcaatccattcagaaacggaagaactaactaaagaatttaaagctttcatcttacagattgcgaccaaagatgtgaaaatagatggtaaaaccagaccattgttggttgcggtaaaaacaacagctacatcactgtataaatgttatacgggagaaaagcgcctgatctcttatcctgaactgatatgaattctgaaaggtttaatgcataccgaattatgtgggttttagtattatatgatctcccaactgagaccaaagtgaatatgaaagatgcgaaccgttttcggaaggcactcattgatgatgggtttactttatttcagttttcgatgtatgtacgccactgtccaagccgtgaaaatgcggaggttcatattaaaagagtaaaatttatgcttccaaaagctgggaaagttgccattatgtgtattacagacaagcagtttggtgacattgagatcttctttgccaggaataaagaagaaccaccaccaacgttccaacagcttgaattattctaatttttaaatcctaaataaacaataaatccgttgattttcaacggattaaattttgaggttgtgactaatcacgaagataataatttttgaaagcaattcacaacgattaatgatacattaacaatatctcggatgttgtgactaatcacgaagataataatttttgaaagcaattcacaacgggttttttagtggtcttcttaactgccttgttgtgactaatcacgaagataataatttttgaaagcaattcacaacgagttgcccaatgtcctgattaaaattatagttgtgactaatcacgaagataataatttttgaaagcaattcacaactcgccgaccgtattttctacgtcgacgtaggttgtgactaatcacgaagataataatttttgaaagcaattcacaacgcgttttcctgaatgtagtcctttaagattgttgtgactaatcacgaagataataatttttgaaagcaattcacaacactgatgaagttacagcggcaaacatgtcggttgtgactaatcacgaagataataatttttgaaagcaattcacaacgattgaaagcgtattaatttcattcgatttgttgtgactaatcacgaagataataatttttgaaagcaattcacaacatttcaagataacgacattgacaagcttcagttgtgactaatcacgaagataataatttttgaaagcaattcacaacatcaactcgaaaacaaataattatgcagtgttgtgactaatcacgaagataataatttttgaaagcaattcacaacaagacaataccacgggaacagttaagagcagttgtgactaatcacgaagataataatttttgaaagcaattcacaactgcgtcttttaggaatccatatacctgtatgttgtgactaatcacgaagataataatttttgaaagcaattcacaacttatacttgtacatcacttcaaagttagaagttgtgactaatcacgaagataataatttttgaaagcaattcacaaccgccactcgcttcggtccgataatcaacacgttgtgactaatcacgaagataataatttttgaaagcaattcacaactcggttgtccttcgggagttaccgagcaaagttgtgactaatcacgaagataataatttttgaaagcaattcacaacgagttggccgatgtcctgattaaaattatagttgtgactaatcacgaagataataatttttgaaagcaattcacaacgacgtatcatttcgaacatagaccagcgtagttgtgactaatcacgaagataataatttttgaaagcaattcacaacaagaaggttcgacatcatgaaggcttccttgttgtgactaatcacgaagataataatttttgaaagcaattcacaacacggtcaaatttcacaagaagaattcgaaagttgtgactaatcacgaagataataatttttgaaagcaattcacaactaaagttacgccgtacactgtttccagggagttgtgactaatcacgaagataataatttttgaaagcaattcacaacaataccctggccctttaatacctatttgggttgtgactaatcacgaagataataatttttgaaagcaattcacaaccaatgcttctacggttgtgttgactccttggttgtgactaatcacgaagataataatttttgaaagcaattcacaacgaatatgaaatgccatcagattttatttgtgttgtgactaatcacgaagataataatttttgaaagcaattcacaacgaattgttatatcaaatccatcacttttaggttgtgactaatcacgaagataataatttttgaaagcaattcacaacattcaaaacaaaatccgtcattgatattaagttgtgactaatcacgaagataataatttttgaaagcaattcacaacgctctctaaacgctatgttaacttcatttagttgtgactaatcacgaagataataatttttgaaagcaattcacaacgtatacttccggaaaatatttttttataaggttgtgactaatcacgaagataataatttttgaaagcaattcacaacaatcaggaaattgatgccttaattgaagatgttgtgactaatcacgaagataataatttttgaaagcaattcacaacaccccgtaaacgcggtgcctttaatcggtagttgtgactaatcacgaagataataatttttgaaagcaattcacaacaggcgcgaaaggtgctagttctatcgtcgtgttgtgactaatcacgaagataataatttttgaaagcaattcacaactacacaaagtgtgtggatattgatggcaatgttgtgactaatcacgaagataataatttttgaaagcaattcacaacagcggaatatcattgtcccggatcaccggagttgtgactaatcacgaagataataatttttgaaagcaattcacaacaattcctctcttttcttatagagatcataagctgtgactaatcacgaagataataaattttgaaagcaattcacaacgtatgtactccccgatagtcattatgttaagctgtgactaatcacaaaaataataacaaaaaagaccatctactaaatggtcttaaatttatactcatgtcccgtcctaaaataagttgacaactaatcgacttatttatgaaacatcaagaattaaaaagagaaaaacgcacacaaagagactacagtatcgcctttaaattacgag

SEQ ID NO: 294 - DNA, 16859 bp, synthetic construct
  source 1..16859: mol_type = other DNA
  misc_feature 1..16859: note = Synthetic
ccggtgcatttgggttcatatccggtatttgtcgtctaactgaaccaacatactgtccggctaagaaagcggcggtgttgaaatggttatcgggagtttgatttgggtcgatttggagaaaccccagacgaatcaatatttgttcattcacgcgatccgtacgccaaaggttgaaatccatggcttgctcccaagttacgccgacaacggggtattcattgaaagccggatgctggaaataaaattccaccatgtgctcaacataggcatccactctgcgccaagccaattcatcgggccatgcacgacgaacaacttccggaaaatcctgcccgaaaatacggtccaaccaatagaggtattcgttgtaatcaatatttctaacttcggtttcgtccatatagaacgaagcaaccgtcacacgacgagggatcatatcccacgtgtgcagcaaatcttgatggttggcacccattacgaacgaaccaccctcgataaacaccatacccggcggagtggcttgatcaacggcatgaagaacttgaaaaccgccccatcttgggtcgttaatattccaacctgtggttctcgatctctcaggagatgcacaacccattaaaaatgccacaaaaacaatggcgataacattgaaagaatttttaatgctcattatatgactcaatatattaggttactaaagatacaatataggttacaaagatacgatttttttttgatatttgcaaatttttgttaaaaagcaggacaatttagttgtcttattcttggcgctcttggtgttcgacaaggcaagagatatgccatagaaagctcatgagaacctcccgacaagccgcgtaatttgctaacagacaaatcataactatatccgattctcaatgaattatgtcttatcccgactaaaaaagttatggattcgggttggttaaatgcgatggtttgtcgataccaaagtccaaacaccatcatgggaacgatattgttaaagtatacaccgtaattaatttgttgtgccacaccctgttgttgaaaaatgatattcggcgaaatcgtaggtgtattagggtctctgaagcgatttcgagtgcgccgtaggtcgaaaacagcaccggcgtgagcggtaaacctcataggaagttttgagacatccataaaaccttcatcgggtgttgaaagatgatgtatggcgaaaccggcgaaaaagttattcgtataaccaacaatgccgacagaaaaatcttcaagaaatctgccggttggagtttcaggcagactttctccggttggacgtccggtaaaaccggagaggtcgaactgatccgggaattgtaaattactccaatcaatacgacgatgaacaaatccggcttgaacggcagttctgactgaaagtgcgtttgttagctgaaaactataagaataaattgctcctacagttgtggttgaataggcaccgctcccttctcttaaatttgttgcaataaatccgagagcaccggataagcgatcgaaatgctcgtcatatgaagcgctaacgctcgaagaagtgcccggaatcatcgaccattggttgcggtaattgactgtaaatctaccacatatcacgcttcctgctaaggcgggatttgtgtgcagcggagcagcataaaattgactaaacatggcaccttgtgcactagaagaaagtgtacaaaacaacactaaaatcgtcaaataataccttgctcgtgtcatatcagccggtcaattagcaagcaaagatactaaaaaaatagaaattatgcaaattttttcgatatttcacaaaaaaagaaaagatgagcaaagcccaccttttcttttgtgtaaaaacagtaagagatactatttcttagtaccgcatgcttttcttgctaccggtttttttgcagcaacttttcttaccgcaggctttttagcagcaactttctttaccgccggtttttttgcaactgctttttttactgctggttttttagcaactgctttcttaactgcaggcttagttacttttttagcaactgctttttttactgctggttttttagcaactgctttcttaactgcaggcttagttacttttttagcaactgctttttttactgctggttttttagcaacaactttcttaactgcaggtttagttacttttttagcaactgctttttttactgctggttttttagcaactgctttcttaactgcaggcttagttacttttttagcaacagtttttttagcagcaggtttagctgctgtttttggagcagcttttttaacagccggttttttcgctgcaggcttcttaacagccggttttttagcagcaggtttctttttttccattgtttttgttttttttgttgataaattaggtttattaacggttttattattattgtctccttttacggaggtttttgctttttgttgagacacacggtcgtgcgtctcaacggttttttcgtccaaacgaatgataaaatccgacagaatattcatgtaatttatgaacgcatcataaggtgagggatagtggctgaaatacttgtgaacatcggcacttgcaagccattttgtacacatgtaatacaggttgtcgctcgtttgtaaaaaaccaaaatctttatgaatttccggattcttcgacacattcactttttcctccaaagcagatagcttagaaaaagcttcgttttgcagttcgttgccgatccaagcggttaagtcacgctcttcatctgcccaagaaattggaaaaggaacatagataggagccacaggtttcaacgctttgctgatttttgaaggtgttgaaaattcgaatttcgaacgtttgaaaatttgatccggcaacgctttgaaaaaatcaaagattccggtttctttcagctgatgttcaccaaaagtttcgtaatccaaaaagatattgacaacatcttctttttcgccggactctaaaatccaatctacgtatttttccgcagtcaaaggccaacctttccattcttgactcgaaaaacgaaacgcaatatcatcactcagcggataatttctcaacaaaacgtttaatttcggattgatcgcgttggaatataaatagtttggagatttccatcctaaaatatgtttcgcaccttccgtaatcatcgtgttaaagccaagtttcgcgactcttgcaccgatttcgtcggaataaatcaattcagtatttcggaatgtggtcggcttttttccaaacaatttttcgatgcgatcgctgtgttttttcacttgtctttcaaattccgaagtgtcatttagcgaggccaacgaatgataatacgtttcggcaataaattcgacttgtccggtttttgctaatgccttaaaactgtctaaaacatgcggcgcataccattcaaattggtctaatgcgacgcccgaaatcgacaaacttacactaaatttttttccgtgctttttgattaaatccaacaacaaattattcatcggaatataacaacgatcagcgatacgatttaacaagtattgattttgataatcgtcataatagttgtggactgcccccatttcaaagaaacggtagtttcgcagtctcagcggttggtgcacttggaagtagaaacatagagcattcatggcagattagtttaggttaagagctttgttgtaaatttttatattgttcaacgccgcattttcccatttgagattattcacttcttccgcacctttttcactgaataatttatgtaaagagtcgtaatgtaaaagtccataaattgaatttgccatcgcatcaatatcccagaaatctacctttagcgcgtagtgcagaatttccgaacatcccgattgatttgaaatcacaacaggaacgcctgcccgcatcgcttcaagaggcgaaatcccgaatggctcggaaatagaaggcatcacatacacatcactcatcatgaacatgcgatcgacatccaatcctttcaaaaaaccggtgaaatgaaattttgtgccgagacccaattcggcaacacgccgaacagccctgttcaataagtcgcccgaacctgccatgacaaaacgaacattgtcgtccttttgtaaaacacgatgtgcggcttcgacaaaatattccggtcctttttggaaggtaatgcgccccaaaaaggtaacaactttttctttgaaatgtttgtttgctacaatttgttttttgttttcgatcggttcaacagcgttgtaaactgtatgaacttttttcgggtcgataccgtagcgttcgatcacaatttgtcgtgtgaggttgctaaccgtcataactctatcggcagcaagcattcctctgcgttcgatttcgtaaacaacttgattaacattttcgcccgaacggtcgaattccgtggcatggacgtgaatcaccaaaggttttccggaggcggcttttgcagcaattccggcttcgtagcaaagccaatcgtgtgcatgaatcaaatcatgattatactcttgtgcaattgtgcttgcgaccattgcatactgtttcacttcgttcatcaaattgctttcatactttcccgagaacgcaaatttacgtttgtaaaaagtatctacgcctacatcctcgtcctctgctttggacttgtcttccaatcgcaaataatcttcgaatcccatataaggtacaaggtttgaacctacttcaatatatgtcagattttgccaatacgtttgataaattgtatttcgataatcaatttcaatgtcgcttgcgttcacaatttttgccaccgactgatcttcgtcgccgtaggctttcggaactacaaaaaccacctctacgccttgtttgagcaaacccttacagagtccgtaactcgccgtgcctaaccctcctgtgatatgcggaggaaattcccaaccaaacattaaaactttcattgtttcgctttataagtttcaataatttggttaattcttaatagtgctccaacgctccatgcctgtgaaattgcaccttttggacgatgtggaggatcaccgtcataaatttcggcaatcgtgccaatacaatactctgaaatggtttgttcaaaaccgtggtataaattttcgataaaatctaatcgagagtcaccgtaaattttcaaatatccttccgcaaaaaattgcaacagccaaacccaaacggttccttgatgatacgccgtatctcgttgaagcctgttgccttcgtaaacggatttgtaattttcatctttgggcgaaagtgttcgaagtccgcgtgaggtaagcaattcctgacgatttttttctaaaactaactgcgaaattctttcgctgattggcgaatagggaagtgctgttgcgaaaatttgattaggacgcaccgaaaaatctttgtggccaccatttacacaatcggctaaatagcctttttctttactccaaaacatttctttgaaaacggcgggaaaattttgcatcaacggttcccattcgttcacaaaatttgtggcttcgagagcttcagccaccgcaatattggtcgttgaggctctcgaaatgaccttgtttgtatctttggctaattttgctgtttcaattgcaaacatcacggcgttgtaccaaagtgcgtttacttcaacagcaaaaccggtccttggtgtaacggcaacaccttccggagtagcgttcatccaagtcaaaggttgcttttcgtcgccaccataaatcaatccgttcggaagcatgtggacatgataatgcgaaccgtgcttatacatatttaatatagacaccatcgcatttccgtattgtttccaaattttattttgtgttttggtttgataagcgtattgttgcaacgcccagaaaaaccaaagttgcgtatcaactccgctgtatgttttttctcttgcacaaggatcgtccggaaaccagccgttgtgcaatttttcaaccaagctgtccaaaacctccttgcataattttttgtcgccaacggctaaagtcaatccgggcaaagcaataaatgtatctctgcttcgtgcgccaaaccaaggatgaccggcaactacatttgtgccgttctcattttttatgaaaaatttgagtgcagaatctttcaaacagtcttcaaaattattgcgaggaattctactttttgcttcagcagaaaacattttttttagcgtggtttgaggttttgaaatttcttccaggcctacggaaaaataaatgctttcaccttttttgatgtccacttcgaatgttccgggaacatataaatcttccaagccatcataaccacgatctaattctttttggtattctatattgtagtaccaatccggattgtgtttgtattcggcgtttttcgagacttgcatatacaaatgtggatacgtatcatacatgcgtgtgcggattccgctatcgattgtttcgaaagatttatttacatagtcattcgccttgctcaaagaatgaacatctcgaaatgccaaataaggtttgatgatgagtttggtttttgaatgcgcttcttccaatgtatattttacaatcgcacaatctttgtcggttgcataaagtgattcttttgaaaaaataacaccgccgacattgtatgttcttttcggaagaggagcgagtgtatattcacgaatatatttatgtcctttcggagaaaaattttgtccttcgaattgatgcaaacccaaattaaaatgttcgccatgttgttcgattgtttcatcaagagtcgacaacaaaacatgttttttatcatcaatattcggaacgggacaaactagcaaaccgtgatattttctagtgttacagtgaatcaaagttgtacatgaatgtgagccattacgattcacacgcaacaattctttgttgagcgaatactccaaatttacgagttgatgtttatcgaaactaatgtaactcatcacaatgcaaagttacatctttttttttacatggtcgatgtaaagtgaaaaagttattaacagaaaacttatctgaaattgttaataagtgtgaaggtagaaagtgtgaaagtgcgaaaatattttttcatactttcgcactttcacaccttcgtacttttgcgctatcagagttcttgatgaaaaattttcccatgttcgcaaactaaaattttcgatgggtattcactaatcatgatgaagtcgtgtgtcgcaacaattactgttcttcctgtttttgaaatttgaattagaagttgaataatttcttcggatgtatccggatctaagtttcctgttggttcgtctgcgagaataatttccggatcgttcaacaatgcgcgagcaatcgcaacacgctgttgttcgccacctgagagctgatgtggcattttgtaatccttcgtttccaagccaactttttcgagtacatctttgatgcgttcgtcaatttctttttggtttttccagccggtggctttcaaaacaaattccaaattttttctaacatttcgatctgtcaacaactgaaaatcttgaaacacgattcccaactttctacgcaaaaacggaatttgttttcgagagattttttttagattaaatcctgcgatttcggcatcgccctgttttatgggaatatctgcataaagcgtccgaagcagcgagctttttcctgtcccggttttcccgatgagatagataagttcgcccgggtgaatctcgatattcacatcggagagaattaaattatcacgctgaaaaatgtttagtgcggtggttttgattatcggcatattctacagtataactatattgaaagcaaagatacgaaaaacaaatggattatgcaatttttttttaattttcaactttcatttttttttcgtatctttgcaatccaaattatataatgatgaatgtaaaacaggaaaaattgaccgaacttacgtcgaaattgacgatcgaagttgtagaacaggactatcaaaatcaagttaaaaaaacgctgacaggttatcagcaaaaagccaatataccgggatttcgtccggggaaagttccatttggaatgattcaaaaaatgtacggaaattcggttttggttgatgaagtgaataaacttttgtccgaagcgctgaataaacacattgaagaaaataaattagaccttttgggacaaccgattcctgcggaagataatgaaattgcagatttcgatacagcgaaagattttacctttcattttgaaattgcggttgctcccgaatttgaattagatttgccgaaaatcaaagtaacgaattatcaactgacggttggcgacaaaatggttcaagagtctgtcgatagattgcttgagcgtttcaaagacgaggaaacaggaaagcttccagaactcaaccaagaattgttcgacaaagtttatggcgaaggcgcaatcaaatctgaagaggagttgcgtgatcgtattcgcaaggacggcgagagaatgtatcaacaacaggtggatcgtaaattcacacaagatgcgattgaggcggttgtagaaggaacaaaattcgaaatgccggatgattttatgaagcgctggttgttagtttccaaccaagataaaagtttaacgaaagaacaaatcgaagccgattacgacaaatatcgcaacatgctgaaatggcagttgatcgaagcaaaaattatcaaagaacgtgaaatcaaagtggacagaaacgatgtgaaagaatattacatcaatcacgttgtttcgcagtatttcccgattccggaagatgaagaaggacgcaaacgtattgagcagtttgccgaaaccatgatggaaaaccaacaagaaaccaaacaggtttatgacatggtttacgatatgaaaatttcggatatcttgcgtgcggaattgaaaatttccaacaaaaaaatggatgctgacgcatacgttgaaatgttgaaaaaagaacacgaggcttcgaccgcttcgacaggctcagcgaccgaagccaccgaaacaaagaaaaaagcaaccaaaaagaaagtcgaaaaagatgaacaagaatagtcaagaatttcgcaattacgccttgaaacatgaaggtatcagcagtttggcactgcaccgttttgaatccatttcgaaccgttatatttcgccaacgattattgaagagcgtcagttaaacgttgcgcaaatggatgttttttcgcgtttgatgatggagcgtattatctttttgggtgttccgatttatgatgatgtagcgaatattattcaggcacagttgctgtttttgcagtcgacagatgcaaatcgcgatatcaaaatttatatcaattcgcccggtggtgctgttcattccggattaggaatttacgacacgatgcagattattacaccgcaaatcgaaacgatttgcacgggtatggccgcttcgatgggagcagtgttgttgtgcgccggttcgcccaacaaacgctcgtcgttgaaacattcgcgagtgatgattcatcagccacttggcggtgctcaaggccaagcctcagatattgaaatcgccgctcgcgaaattcagaaaatgaaaaaagaattgtacgaaattattgctcaacactccggacaagattacgaaaaagttgttgccgacggagatcgtgatttttggatgaatgctcaggaggctaaggattatgggatggtggatgagattgttgtgaagaagtaaaattgagaatcctgccgtttttcggtgggattttttttacgaatgctgtcacaaaaaaaggcgacatttacatgccaccttgaatgttttcacaacggaataatccttattgtgaattgcttaaaaatttgtgatgcaaagttacggaaatattttggaatttgcaagttttttttgttgatattgtttcgtatcttcgcaaaataattgaatagcaaacaaaaaaacagtatgaacatgaaaaagatactcggattagatttagggacgaacagcattggttgggcgttggtagaacaaggcattgaaacaaacagtggcaaaattttgggaatgggaagtcggattattccgatggggcaagaattgagtaagtttgaacaaggacaagcccaaacaaaaaatgcaaacaggcgtattgcacgtggtacgaggaaactcaataaacgatataaacaacggcggaataagcttatctatattttgcaacaattagatatgttgccaaaacagatcaaattgtcagagccgtttaccaaccctttgaaacttgatagaatttccattttgcctatcgataaaaagcaaaaacaatattcggcacttgacttactagaactacgagtaagggcattgagtgaacaaatagaacttgaagaattaggcaaaatcttatatctgtttaatcagcttcgaggctattcaggcggcggaaatgaacctgataaagaagacaatgacgatgaaaacacagagaatgaaaaaaagagaaagaatgaaagttatgtggtttttggaaaaatcctttctttatccgagcctgaaaatattacacttaaaggtaaagagctaaaaaaacacaaagttttttttgaaacagaagacggtgttttagagggtgattcttttttggatattctcaaagtaggagaatcattagagttacttgtaaacattactgtatcgaaaaagtatggtgaaacgataacttttaaattgcccaataaaacaaattggcgtaaaaaaatggagaatctggaaaaagaattgacagaattatctcaaaaagaaggtagagaaatttacttgtcggagtattttttatccattctgaaagacaataaatgggcaaaaatcagaaacaatgtaatccttcgttatcgttaccaatcggagtttgatgcaatttggaaagaacaaagtaagtattatccatttttaagtaactgtacgcaagaaaaactatctaaaattctcaattttatttttccgggaacaaaagacagtcaagaaaaataccgacaagttggacttgaaaaaggactttatcatgtcattaaaaaccaaattatttactatcaacgagaattgaaagaccaaagtgatttaatttctgattgtcgttttgaaaagggcgaaaaagcggtatctaaaagccaccctatttttcaagaatacaaagtttgggagcaaatcaacaagttgaccattaacactaaaatagaagccggaacaaatagaaagggagaaacaaaatacaaatatgtagataagcctattcctgagactttaaaggagtggatttttgacgaattgcaggaaaagaaagaaatgaattttagcgtagtgctcaacaaattgaaaaaagaatataatttgcgtgatggtatcgattttctcaatggaatgaacccgaaggcgaagttgaggggcaatgaaacaaaattgattctaaaaaaaatactaggaaatgaactttgggaaaagttagaaatgatcgatatcgctcgtcaaatagaattatggcatattctatacaatgcaaaaggtaatgaatatgatattgatagtgaacgaacctcaaaagtacttgatttcctaaaaaaatattccggagaaatttccaatattgaacaaaccgcaattcaaatcagtaaaacgaaatttagcagaaactattctgctctcagtttgaaagcaattgaaaaaaatctgccacttgtaagatgtggtaagtattttgacaatgaattttcggaaattcttaatgaaaagatcatttacttattaaacgaaaatgtgagcgacccgtttgaaaaagcagtacaagagtatttggaaaacaatgttgatgtgcttttgtacggaggaattatgaatgcttatgccacaattttgacttacggcaagcatactgcaaaagaatatgcagagaatgagaggatagataattatcgaaaaatcacgaggctaaaacaaggcgaattgcgtaatcctttggttgaacagttaattaatgaaacattgatggttgtcaaggatatttggagaaatgagggttacggaaaacctgatgaaataagaattgaattagctcgcgagttaaaaaacaatgccgaaagacgatcaaaaatctacaaatcaaatagcgataggcgaaaaacaaatgatgaagttaaaaatttgctgatagaattaaaacaagaagtaacgttagccaatattgaaaaatacaaattgtggtcttcacaggaaaatttagaagaagaatttgtaaaagcatacaaagacccttctaaatcagaaattgaaaaaatgcggttatggcgagatcaaggacatatttcgccttacacaggacagcccataccactttctgaacttttcaatagagagcgttacgatattgatcacattatacctcagtcgcgatattttgatgactcttttgccaataaagtaatttgcgaaaagtctgtaaataaagaaaaaaacaatcgtaccgcaatggaatattttgaagtggggtcgtctattccgtctgttttttcaaaagaaaattttattaatcatgtaaacaggtactttcgagatgcaaaaagaaaaaatcttttagcgacaaaggttcccgaagatcctgtggcaaggcaaatgaaagaaacgcagtacatatctgtaagagttaaagaagaattgaataaaattgttggaaatgaaaatgtaaaaactacaacggggggtgtaaccgattatttacgaaatcaatggggattgacagacaaattcaagcagttattgaaatctcgttatgagaatgttcaacctctacttgctgaatcggagtacgaaaaatatactacatcagtagagaaaaagagaaaagagtatgagaagttgaatattccttttacagatgttgtgctgagcaaagaaaattttatccaatcattcaatcaaaacttcttacaaaaaaagaacaataaattagttatcaaaggatggagtaaacgtgttgatcacagacaccatgctattgacgctttgataattgcttgtaccgaacaagtacatgtaaatcgattgaacaatttgaataaagagcttcaaacttggttggataatcataaaaaagaaattctacccaattttgaaggaagtcctgctgaattattagaggaaattctgaatttagatgagcaaaaacaaaaagcagtattcatgcaaatagagaaatttaaaagcattgatatgccttggacaagttttcctgaagatgccgaaaaagctattcaagaaattgtagtttcacaaaaaccaaaagacaaattgttgattcaatatgaagagcgaaaagaaggcggaaaaattgttaagacagacaaattgcaactaaaaatacgtgggcaactacatgaaggtacattgtacggaaaaagtcagggtgttgaaacatacagaatacctttatcaaaattggcagtcaaagactttgccacagaaaaaacaatagataaaatcgcgaatgaatatcttaaagcaataattaaacagcatttgaaagattttgacaataaaaaagaagaggcgttttcggtagaggggatattgatattgaacaaaaaaatagcagaaaaggaaagaaaaaatgaatggaaaagaaagggtaagaagaaaaaaataggagaaattgcatcgcatactccaataacatcaataaagatcttttacagagacccacaaaaaatcagaaagaaaaaaggacaagaagaaatagaagatgctttacagaaactggatagagatacggcattcaatgataatctttatgtggcaacaggtggaaactatctttttgctgttatggaaaaagatgagaaacgagtttttgatcttatttctttctttgatgctaccaatttactgaaagatgaatttaacaaagcaaaaagtaagagggagtttaataaagatatggttttcaaaaactatttcgaagaaaaaaataaagccagactattatttacactcaaacaaggcgaacctgtgtatatgccttcaaatggtgaagatgtcatagttgatgtagatagtccattgtatgaaaatttttggaaagacaaaacagaaaggagtaaaaatatccattatgtaacaaaatatagtggaaaacagatatattttatcaaacataatattgccactcccatactaaacaaacaggaatttggcagtcaaaatgcttatgagaaggtaggcgatttgtcaatcaaggaacattgtataaagctcaatattgatcgtttaggaaatatcaaaccattataagccatgataaaacgtacgctctatttcgaaaaccctgcttatctcagtttgaaaaacaagcaacttgtggttaaacttccggaagtggagaaaaacgacgctttaccggaattgttgaaagcagaaagcatcaaaacaattccgattgaagacatcggcgttgtgattttagacaataaacaaatcactttgacacacggagtgatagaggccttgcttgaaaacaattgtgcgttgattacctgcgacagtcgtcgaatgcctgtcggattgcttttgcctttggaaggaaatactgtacaacaagaacgttttacggcacaaattgaagcgtcactgccactaaaaaaacaactttggcaacaaaccattcaagcaaaaatagaaaatcaggcgtatcttttgaaaaaatgtcgtggaacagaagttagaaatatgcaaaaatgggcaagcgatgtgcgaagtggagatagcgacaatttggaaggacgtgcggcggcttattattggaaaaaccttttcccggtgatagatgattttacacgcgatcgtgacggcgtgccaccaaacaatttgttgaattatggttatgccattttgcgagcagttgtggcacgggcgttggtgtcgagtggacttttgccaacattgggtattcatcatcacaatcgttacaatgcgtattgcttggcagatgatattatggagccctatcgcccgtttgtagataaaatggtggtagaaattgttgatgcgacgcattgcgatgcctcgcccttgtcggcagatttaaccaaagaaattaaaataagactgctacaaatccctgttttggatgttgtgataaatggacaacgcagtcctctaatggttgcggttgctcaaactacagcatcgttggcgaaatgttttttaggggaaaatcgtaagattgtttatccgagttttggataactatgaaacaaaaattatggcaacagaattaacaaaagagcagtttaaagaagttttacggaatgaggtgtttacaaaaccggaaaacatatttgattttcaatctatctattcgtttgataatcatcaagcgcctgccaatcttgttgtttggaaaaattcgaaacgtaaaaacttgttacttcataaggaaggtcctcgaccagtaggtcctatcaatttgcgagtagggttgttcggaaaaaaagttgcaaaaaaatatttgcttactcttgacaagtgggaaaatggcaagccgaagtattattctgtgtttttcaatggctggtgtgagggaaatctttttatatggcaattaaaaccaaatttagtcaaagcacttgaggagttaggcttagtagaaaaaaaatcagaccgagatttcacgcttgaccaaatcaataaagaatttgaagaaaaagtaaaatcctcaaaaaacgacagtcagcaagaacggcaaaaacgattaaagttagcaggcaagaaaccaaccagtacttcggcacagataaacgtatttctgcgtaatcctgatgttaaggctgaagttttgcacagagcctgcgggcactgcgagtactgccaaagtccggcaccattcaaaaaagacagcgatggagaagattttttagaagtacatcacattatttctttggcacaaggtggcgatgatacagttgaaaacgctgtcgcactttgcccaaattgccatagacacgcacattatggcaagaatagttttgacattgaaaaattgaaataaagcaattaaaaactttgtggaacgtttcagcgaatatcgaattatgtgggtgttagtattttttgatttgccgacggagacaaaaaaggagcgaaaagaacacgcattgtttcgtaaaagtctgatgaaagacggtttcacgatgtttcagttttcgatttatttgcgtcattgtgccagtcgcgagaatgcagatgttcacatcaaacgtgtgaagagacttttgcccgagaaagggcacgttggaattatgtgtattaccgataaacaatttggtgctatggaattgttttattgcaagaaagaagcggaggttgctacgccttgtcagcagttggaattgttttgaagaaggcgattggcaaaacatcagaaagtaaaatctcgctgatttcagcgagattttacttttttgcaaacatttttttgttttctaattatctttgcaagtcgttgtttttcattttgttgtgcgtaatgtactgtttgcgactacaaagatacaaatttttaaagcaattcacaactggaaaccacaagagacttaccactcttcaactgtttgcgactacaaagatacaaatttttaaagcaattcacaacacctctgaagtgcctgcatcaatggctgtgtctgtgtgtcaaatctaatctgacggagtgtatattcgaccgattgttcgtctatactgtttgctataagcatggagcggatacgctgttcagcct

SEQ ID NO: 295 - DNA, 16041 bp, synthetic construct
  misc_feature 1..16041: note = Synthetic
  source 1..16041: mol_type = other DNA
cggtaacatttacggccgtttaactaactccacacaaggagtgttcgaagcccgcatagccgcactcgaaggcggcattgccggactggcattggcatcgggagcggctgccatcacctattctttgcagaacgtggcccgtgccggcgatcacatcgtttctgccaataccatttacggtggcacctataacctgctggctcacacgctgcctcaatacggcgtaaccactacatttgtcgacccgtcggacctgtcgaattttgagaaagccattcaacccaacaccaaagcggtgttcattgaatcgttgggtaaccccaattcaaacattatcgacattgccgctgtggccgatattgctcacaaacacagcattccgctgattgttgacaatacattcggcaccccatacctgatccgtcccattgaatacggtgccgacatagtagtgcactctgccacaaagtttatcggtggtcacggaacatctctgggaggtatcattgtcgactccggtaagttcgactgggtagcttccggcaagtttccccaatttaccgaacccgaagccagttaccacggcgtaagatttgtcgatgctgccggtccggctgcctacattatcagaatacgagccgtattattgcgcgataccggtgcagctatcagtccgtttaacgcttttattttgctacaaggagtagaaacactatctttgcgcgttgaacgacacgtgtcgaacgcactcaaagtggttgagtatttaaagaaacatcccaaagtggcggcagtgaaccatcctgcgttacccgatcatccggatcatgggttgtacaaacaatacttcccgcagagccggatccattttcactttcgaggtgaaaggtggtgctgccgaggcacaagcgttcattgatcgtttacaaatattctcgctgctggccaatgtggccgatgtgaaatcacttgtcattcatccggcaagcaccacccattcgcagctgagcgagaaagaattggctgaacagggcatcaaaccgggaacggtacgcttgtcaatcggtacggaacatatcgatgacattatcgatgacctggagcaggcgttgaacttttaatagaatatgaatatagcaactttattatcgggaggtgtcgacagctctgttgtcgtacaccttttgtgcgaacagggctacaagcccactttgttttatataaaaataggtatggacggggcagaatacatggattgctctgccgaggaagatattgagctggccactgctacagctcgtaaatacggcctgccgttagagatcatagatttacataaagaatactgggacggggtggcgtcttacgccatcgacaaaatacggaaagggcttactcccaatccggatgtgatgtgcaacaaactcatcaagtttggctgttttgaagaacgggcagggaaggactttgataagaccgctacgggacactatgccagcattgtggaacaggacggaaagatatggctgggtactgccaaagatccggtgaaagatcagaccgacttcctggcgcaaatcaactaccttcaagtatccaaactgatgtttccgctgggtgggttgatgaagaatgaggtacgcgacctggcactcaaagccggtctgcctagtgctaagcgaaaagacagtcagggcatctgtttcttgggcaaaatcaattacaacgacttcgtgcgtcgtttccttggcgaaaaggaaggacctattatcgaactggaaaccggaaagaagattggtacccaccgcggctactggttccacaccatcggacaacgtaaaggattgggattgagtggcggtccgtggttcgtgatccgtaaagacattcaggaaaacatcatttacgtgtcacacggatacgatgtggagacacaatacggttatgagttcggcatgcacgattttagtttcatcactgaaaacccgtggacagaaggagcaggcgagtacgatgttacctttaaaatacgtcacaccccggaattccttcagggcaagctaacccgtacgggcgatacttacaatttggtttcgtcagagaagttgcaaggcattgcaccgggacaatttggcgtgatttacgataaagactcccgcatttgctttgggagcggcgaaattatcggttaattattccccttattataataaagagataaagccgggtactgcttaaatgtagtattcggctacatcaacaatacctgcacgcatggcatatcttgtagcctcatgcgcattgttaacccccagctttctgaaaatattcttccggtgactgttgatggtatgaaaactcaggttcttctccgcagcaatctccttggttgtctttcccaacgcaatctctttcagaatcaccttttcactggcagtgagcaaatgatcatcttgcatcgccgtggcagcagccgaatttccggtgagcagcatattgcttatgtggttacaaatgaaacgctctttacgtgaagcaaactgcatggcagtagtaatttcctccttcgagctatctttcatcaccacgctgaaggctttggccggcaataccacctgacgaataaaattcaaactcagctcgtcggaaaacaacaaccagtcggcatccttaaaccgctcgtgcagcaccaccagctcgtcggcggtgttaaagtcaaacaaagtataatccagcaccaccaccgcatcgggatgcagacgcaactctctgatcagttctgccttgctgtcggcttccacaatcacctgaatctccttctgtaggcctaataaaaatagaattcccgcccgggtgatatcctgattatctgcaatgatgtatttcctcattattcaaacgttggttactttgcaaaaatacactttttgatgaatttatgcttcttttttcactattttatatcccgttgccgcaataaagatactcatgagcggactgatgatattaaagaaacaataaggcaggtacgccagcgtggctacgttgagaatcgtagcttgcgtcatgccgcatgtgttccacggaataagtacagaggtaaccgtcacggcatcttcggtggtgcgactcagcaacctgctttcgtaacccttcttcttataaatattgccaaacatatttccggtcagaatgatagagatatactgatcggccgtggttatattgaggaaaatacccgagcatacagtcgaggttaccatgcctgtgcggcgtttcatgaaacgtacaaataccgatgtgatacttcccagcatgccgcttgccgtcatggctccaccaaaacacatggcacacacaatgagccacaccgtgttgagcatgcccgccatacctcttgtggcaactagttcggtgagtgcttcgtgattcgtgtgcaactccgtttcaccgtagatcgtcatcagtgcacctttgaacagcgcttcggcgttgctgcttgccgtaccggcaatttcctgcaacagatgaggctgaaagatgacggcaaataccgccgccagtgcagtcgacaagaaaagagtaaccagcgaaggtacctttcgggcaatcagtactccggttatgaccggcaccaagagcaaccatggcgtaatgtaaaacttatcatgaatagaagccgagaacgcagcgatatgttccgtgtgactcgcctcgtgtgataatccggccaccgtaaaaataaccagcgtaatgagcatagacggtatggtggtaatcagcatgtagcggatgtgtgtaaacagaggcgtatccgtaaccgaagaagccagtatggtggtatcggaaagcggggaaaccttatcgccaaagtatgctcccgaaatgatggcacccgcaatccatccctcgtcgaatccctgcgccttaccaatacccatcagcgcaatgccgatggtagctatggtggtccacgagctacccgtcatgaccgacaccagcgaacaaatgatgcacgttgaggccaggaagaagttaggatgaataatctgcactccataataaataagtgtgggaaccaccccgctcaccatccacgctccgcttagtgccccgataataagtaacacaatcagcgccgtggcaacgcccgaaatattattcgtgatggccagctcaaagtcatgccagcgagttttgcatacagccataccaatcagtacgcataccgccgtagtggtaagcaatgccacctgactaccgccgttgagtgcatcactgccaaatacccggataatggcaaacaataaactgaccagtaccacgatgggaaccagcgacaggagaggagacggttttcttttcatactttacgtatcagtggtttatgcagcatctatacccgtcagcgttttcagagcgtaaccgatgaggaaactgatacccgccaccgtgaagctgagtatagccatttccagaaaacgctttttgaaactctcgcctcgtgccactgcgtaataataattaaacaaagctataatggtaagtgccatgacaagcatcaaccccaatgctaccagtacattctcgatgaaaatgaacggagctaccagcgccaccactgttatgatgtaagcaatacccgtatacacagccgccttgaccggatgtttggagtcaccctcctccgatttggtcgacaaatactctgacgaagccattgacaaggccgctgcaatacccgtaatgctaccggtcagcgctatgaggggtgcgttactcaatgccagcgtgaaaccagccaaagccccggtgaactccaccaacgcatcattcaaccccaataccacggaacccatgtactccaatttctcctcattgataaggccaatcagcttttgttcatgcacctcctcgtcgcgtcccagcttctctaactcaggatattccgggtagcgggcataaacctcttgcgcatccctctcttccttctccatcagtttgatggcgaaagtcagtcccaagatgcgtgccagccaataatacttgaatatacgccaacgattgggagccacctctttacccgtatgccttttcagtatttcgtagtgcgccttttcctcggcagcaatctgtaacaacgtctttttattctcgctatcttttacgatatgggccagtttagcatacacaatgctgctggttatttcatcctcctgaaagaacaggaagtcagatattgcatttttatccgctttcatttcatttgaatttaatgtttatgcaaagttatattatttatgatagaacacattcgttgctttcttttttaacgcaacaacctctaaaaataaagcaggcggtgagagacatacatcttcaccgcctgtttgctaattgccacctgcctaacgccggtgagcaacgaaactattaatccacatcctcttccgcattggcatcgaatacaacgcttttggctacgtatgactcattgccggatgtatctgtgcagtacaccaccacgtgatacttaccctgacgagccaagataggtatctcgatgtgatcgtgaacgtggtgattcttctgattcacatcgaacgactgattgtaagtgaacgtaatggaatcgccgaccgccctggtcgaggccgaagtatgcgtgtgtccgtcgaatttattatgaatatcaaccttgtaagaagccaccattacatcatcagacaaatccatgtcgagatgcaacaaactacctgttttgatagcgcccccatctgtaggttcgttgataacgatcaccggtttggtggtatcattatcatcgtcagagcacgctacgaacaaactacttagtgatacaatacaaattgctgaaagaattaattttgttttcatttgaatacttgtttaaatggaattttgattaaaacctgtaagttcctgcccggttcgggaatctccactttgcggtagaaactcaggtgattgaaatacttcctgtccagtacatttctggcagtaagcgttacctctatgggagtgttgtgccatttgaagtcgaacttcccgcccagatgaaacaagttgccgcccgaagtcttgtcctcgttgcgatccaccctgttctgtgcgacaatactctccatctgcgcatacacactccacgaagcagcctcccacgtaagcgtgttacgcatggaagcaggcggtgagaaactcagcggcaaatgttcgtcgcagttatacgtgtacacataatcgccggcaaactgataagtcagcttgggcaacacgcggtaagacatactcagttccgcacccgtgaaaatagcctccgcacccgtgtatcggtaaatttgtccggcatcgggcagtacagaccattcacccgtaggcctcagaaaaatgtaattgtcaaaccaactgaagaaaggagacgccgtgaatgacaaccttcctttctcatatgtataagcagcatccgcctgccatccttgttcagacttcagcgtagccacaccctgctcgtgcctgaaggtgccgtgatgcaccccgttcgacgccagttcgttggcacccggcaagcggaaactccgccccacgttggctttcaacatgtgcacccgcgaaggattccatacaaaacccaccgaagccgaataatcgccaaagtccctgttcaccgcatagcttctgttcttatacacctctatcacatttgcatcatatccctgatcaacgagatactcctccagatacgcatcggtatacccggccacctttatcttgccataatcataccgcacacctccgctcagcgttagctgactgttgagtttgtagttactcaaccacaacccaccggtggtgacacgcgtgtactccggcaataaaaaagagtaaccggctatgttattatcttgatattgcacatcccagcccagcgtatgctcccattttccatttcccagaaaacgcaacttagcatttgaactatacgtgttcaacctgaacgccaactccttgtcgggatccttctgaggaatctgttgcgtggagtaatgcgtgtgaaacgaactccactcttcgcggtgattgttctggtaccccaagtcccacgacagagccagcggtccccacgcatacccttgatgcaacgccaccttcaggtgattcacaaaactgtaaggcaactcaatgttgcgactgttgccgtcatcggtcagtttcgacagatcaggaatgccatgcgcccccggaaagaaccccgttttctggtaagcattacttattgaaaaggaagcatcgtacccgtttttgcggtacgtggtgaaccagctcacgtctctttcgaaaccggctgtgttcttcatccttcggttatacaccggaattttacgggtcagatacaccaccgtatccgtgggaatacggtaatcggcaaaatgcatctcggtgtaccttagtttggtaaaccacgcattgtgtttcagccccagcatgagcgaaccgcccagcgtgccgttcaccgatttgccgatgagagccacttcacccagaaacatgttctgagtaggagcaggcaaggcattgatttcaattgctccgcccatggcatcactaccatataataaagacgaaggacctttgcgcacacttacctggccggcattgaacgcatcaatctccagcccgtgatccgcaccccattgctgcccctcctgtttgaccccgttttcggtcaccgtaatccggttaaaacccaatccccgaatcatcggtttggcaaagcccgaaccaatatccatggaatgtacgccgggaatgttacccaacgtctgcaccagatttcccgaaaagttatttcgaagaaaatcttcaccgaccacctcgagctgcaacgtagcattcttgtttcgtatgtggtgatacgtctctgataccaccacctccgacaagttgacactcttcagtgaatcggttgtctgggcgtgtgccgacaaggatatagctataccccatgcacacatacccgataaacatccgatacgcatactaacaaatagttattcgttaaacgaaaaaaataagatgagtgagataaaagtatgtcagcccacggcgggaggtgcacgcatgccacgagaataagagaaactgaatgttcccttgttctcaaaaaccggaacctcataaggaagaagttcggcaatgaaacatagttggagagaagatacttgaacgaaaggcgacagtgtgaaatgacagatagggcaggagtcgggccgactgctgttactgtcttcctcacaatcgtggtgacaggcagaagatgtgcacggctcgtgaaagtgaaaagccttcaccacatggaaaggcatgagcgttagtagtaacacccaggcaattcctatccgtaatctgtatttcctttttgccctgttaagcatagtgaatgcaaagttatatagaacttttctaaataaaaacagcttgccgcgcaaatttgaattcttttatactttattagttatagcatttccaccaatggagcagaaacagaaaccccgttgctacgagtgcggtagacagtcccgtgtagaagaaagcaatgaaccaggtaggcaataaatgaaaagtgcgaatgctgatacccataccaatcatgaacaacataacgagccaccctttggcatcaaaaaaagccagcggatgatttttgtcgcccatttcagcaattcgccgggtgtgtttaccgtgcagccttttaaatataagaaaaaaaaacaggcagaaaataaccaccgctccggctaacttcagttgccattgcagcgcatcgttcatccatgtataaatgcctattttcagtatgttggctccggcagctatccaaaccagtccggccattgccaccagtacttttctgcttacgtacactctcattctatcttgctgattttgtattcaggtacttaaacagcatggaggggagtaatgttcacgcagaaaaacaagtcagccgtccttgtctgttattacgttatactcacatgttttgaaaaccatacatgttgcccttactcctttatacgactctcctcctagagaaaaaaaagtgtggtttaccatcacttaccctcactaactgacttgaatcccctttctaataggctatatagaagagtgatggtaaaaaatgtctaccattaaaacggcagttttaccctcactatctatcacttttaactaagactatagattcattaactccaatttaactaaaaatcagacgatgtttgagcgatttcgaatgctttttgatgaaaaacggccaaaaacgacttcataagtcgtcgaaaataccttgttgtgcatagataaaccccttttttggcttcaacgcccttcagtcaatttgagattgaaatgcctctttttagtttatttttgtgagtttattttatttgtattgactgtgtttagatttggagaatggctactgtttatgcagtaacctttttgtaccgatgctttgatagactttttgggtggtaatggtacttttatatggagattttcttttgttatattgactaaatatattacttcatttcggaattggtctttgtttttgagtttgattcttgcttttttatgcgtacttgttttgtgtttgaaaaatagttattatgtatggttttaatgttggttgttttgatgtaattgtaaaccaacaatttataattgttggcctgcgattttaaaaagttggcgtaggattttgaaaagttggtgtagaatatatttcgtatgctgaactttgaattttataaattgatattttggatatatacaacaaaaggcgagaattgcttcccacctttaatgttttcacaacggaataatccttattgtgatttgcttcaaaattgtattgcaaaactatgaattattttttagtaaacaagtgatttctgtagaaaaatatatatttttggaaaaaatgtattttgaatcaaatattatgaagaaaatattaggattagatttagggactaacagtataggttgggcgctaatagaagccgattttgagagtaaacaaggaaaaattcttgggatgggaagccgtacaattccgatggggcaagaattaagtaaatttgaacaaggacaagcccaaacaaaaaatgcaaagagaagggttgatcgtagtgcaaggaaacttaataaacgctacaagcaacggcgtaataaacttatttatgttctgcaacaattagatatgttacctgaacaaattaaattatctgaagagtttaacaatcctttaaaaattgataaggtttcaattttaccgattgctcaaaagcaaaaacaatattctgcgattgatttactagaattacgagtgagagcattaaatgaaccagtttcacttaaagaattaggtaaaattatttatctttttaatcaacttcgaggctattccggtggaggtaatgagccagaaaagcaggaaatagatagcgatcttgttgaaaatgaagatagaaaaggaaatgaaagttttctggcttttggaaaagtaatttggatttcagaagctgaatcctttatttataaaggtaaagagttaaaaaagtataaagtgaaaattgaaacagaagacggcgagttagaaggagacacttttttaaatttgcttaaagaaggtgagtcattagaatttttaataattaagacaacaaaaaaaaacgaagaaactatcacctttaaattgcccaataaaacgaattggcgcaagaaaatggaaaatttagaaaaagagttgaacgaacaagcaaaaataaatggtagagagatctttttgtcggaatactttttgataatattaaaagaaaatagatgggctaaaattagaaataatgtagtccttcgttcccgttatcaatctgaatttgataggatttggaaaacacaaagtgaaaatcctaaaagcgaattatatgatatgttattacatctttcgcaaaataaattattcgatatattaaaatttatttttcctggaacaaaagaaacacaagaagaatatcgtaaagcaggacttgaaaaaggcctttatcatatcattaaaaatcaaatcatttactatcaaagagaattaaaagatcaaagcaatttgatctctgattgtagttttgaaaaaggacaaaaagccgtttctaaaagtcatccgctttttcaggagtataaaatttgggaacaaatcaataaattgactatcaatacaaaaattgaagatgggacaaatcgaaaaggtgaaataaaatataaatatattgataaacctgttccagcagcacttaaagagtggatttttgatgaattgcaggaaaagaaagaaataagttttagtgttattttgaataaattgataaaaatatataatttacgaagtggtgttgattttctcaatggaatgaatcccaaggctaagttaagaggtaacgaaacaaaattaattctgaaaaaagttttatgtaatggactttgggataaactgggcatgtcaaacattgaacggcaaattgaattatgggatattctgtataatgctaaaggtaatgaatacgaaataagtagtgatcgaacgtcaaaagtaattagttttctcaaacaatattctactgaaatcccagatattcagcaaactgctatagaaattagcaaaaccaaatttagcaggaattatgctgcaatgagtttgaaagcaatagagaaaatcttgcctcttgttcgttgtggaacaaagtatttcagtaatgagctttctgaaatacttaacgaaaaaattattaggcttttaaacgaaaatttaagcgatccatttgaaaaagcagcacaagaatatctagaaaataataatgatatacttattcatggcggtattatgaatgcttacgctataattttggtatatggtaatcacacggaaaataagtatgctgaaattgagcaaattcaaaaccccaaccagattttaagattaaaacagggtgagttacgtaatccattggtcgagcagttgataaacgaagcattaatggtggtcaaagatatttggaaagaatttaaggaaaaaccgcaggaaataagaatagagttagctcgagaactcaaaaacaatgctgaaagacgagcaaaaatctacaaattaaatagtgaaaaccaaaaaactaatgatgaagttagaaatctgctgatagaactaaaacaggaaataacgctagccaatatcgaaaaatataagatttgggcttcgcaagaaagtttggaagaaatatttgtgaaagaatacaaagatccctctaaatcggaaattgagaaaatgcgtttgtggcgagaacagggacacatttccccatacacaggaaaacctatacctctttcgaaactgtttgatagaggaatgtatgatgttgaccatatcatacctcaatctcgctattttgatgattcgtttacaaataaggttatttgtgaaaaagcagttaatagagaaaaaaataatcgcacagcatggagtattttgagattggttctctgactcagcaaatattttctaaagaagctttcataaagcacgttaataaacattttcaaggaattaaacgaaataatcttctgacaacaaaagtaccggaagatccagtggttcgtcaaatgaaagagacgcaatatatttcagtcagagtaaaagatgaattgaataagattgtaggatgcaataacgtaaaaacaacaacaggaggtgtcactgattatttgagaaatcaatggggtttgacggataaattcaaactgctgttaaaatcacgctaccagaatattcaaccattgcttgctgaaactgaatatgagaaatatataattggcattgaaaaaaagaaaaaggaatataaaaaaatgaatataccttttactgatactatattaagcaaagtcggttttattgaattgtttaatagtaattttatacaaattaaaagaaataaattaattataaaaggatggagtaaacgtattgatcatcgtcatcatgcaattgatgcactgacgattgcttgtactgaaccagctcatataaagcgattaaacgatttgaataaagaacttcaaacttggttagataatcacaaaaaagatattctgcccgattttgaaggaagtcctaccgaattattagacgagattcttaatttagatgaagccaagcaaaaagctatatttgttcaaatagagaagtttaaaagcgttgatatgccttggtctgcttttccagaagatgcagaaaaagcaattcaaaatattattgtttcgcaaaagccgaaagataaattattaattcagcccgataaaaaaggtcatctgcaaattaaaatacgaggtcaattacatgatggaacattgtacggtaaaagtcaaggtatagaaacgtatagaataccattatctaaattagcagataaaaaaatagcgacagaaaaaacaattgataaaatagcaaatgaatatcttaaaatagcaattaaacaacatttaaaagattttgaaaataaaaaggacgaggcattttcagcagaaggtattttggtgctaaataaaaaattagcagaaaagaaaagatttaatgaatggagcagaaaaaatcagaagaaaagagtcggggaaaatgcacctcatacccctttgacttcaattaagattttttatcgtgatccgctaagagttaaaaagaaaaaaggatttgaagaagctgaagaggtattagaaaggcttattagaaaaaaagcatataatgagaccttattagtcaagacaggtggtaactacctttttgctgtgatggaaaaagatggtaaaagagtttttgacctcatttctttttatgatgcgactcgtttattaaaggaagagtttaaccaaatactagacaaacagaaatttgacaaagaacaagtttttaaaagatattttgaaaaagaaaatagagccaaatttctttttacactaaaacaaggtgaccccgtgtatatgctatctaaagatgaagacattataacagacaaagatagtccgttatatgaaagtttttggaaagataaaatagcaagaagtagaaatatttattatgtaacaaaatttagtggaaatgagatctattttatgaaccatattgttgcaaatccaatcattaaaaaaaaggagtttggtagtcaggatgcctatcaaaaaatagaaggtttatctattaaaaattattgtatcaaactgaagattgatcgtttaggaaatattgaaccatattaaaatagcatgaatatagtttatgtgttattcataattattggtaaatatatcagttttctaaataacaccttgattgtttttttgaatctactttgctttacaaaattttgggagacttttagagtaactcgctaataatcattataaaaagtgctttcgggtgtaattatagatttatattacaaaaaatatatagaaattagtatgataaaaaagacactatatttcagtaatcctacttatttaagtttgaaaaacaatcaacttgtgatcaaattacccgaagtagaaaaaaacgactccttaccggattcgtttaagataaaaaacgtgcaaacaattccgatagaagatataggtatagtgatgattgacaataagcaaatcacatttacttcgggggtaatggaagctttgttggaaaataattgtgcgttgattacgtgtgacagtcgttcaatgcctcaggggttattattgcctttggaacaaaacaccactcaaagtgagcgttttacagcacagattaatgctagtatccctctgaaaaaacaactttggcaacaaactattcaaatgaaaatagagaatcaggcatctgttttgagaacgtgtagaaatgaagaagtgcgcaatatgctaaaatgggcaaacgacgttaaaagtggtgattctgacaatcttgaaggtagagcggctatttattattggagaactctttttcctgatattgataattttacaagaggccgggagggtgtccctcctaataatctcttgaattacggctatgccatattacgagctattgtagcccgttcgttagtttcaagtgggcttttgcctactttagggattcatcatcataaccgttacaatgcttattgtttggcagatgatataatggagccctatcgtccgtttgtcgatagattggttgtagaaattatgaatagtggagtggattttcaggaattatctaaagaaataaaagttaaactattgaatattccggttttagatgtgatgattaatgggcaacgcagcccattaatgattgcagtagggcaaacaacggcttcgttggcgaaatgctatttaggcgaactacgtaaaatagtgtatccttattttgagtaatgaatggatcgtttcagtgaatatagaattatgtgggtgttagtgttttttgatttgcctactgaaacaaaaaaggaacgcaaaatatatagtgatttccggaaaaaactattaaatgacggttttactatgttccaattctcaatttatcttaggcattgcgccagccaagagaatgctgatgtccacatccgccgcgtaaaaaatatattgcctgaaaaaggtcacataggtattttatgtgttacagataaacaatttggtaaaatggagctgttttatgggcaaaaagaggaagctgtctcaacgccttatcaacaattagagcttttctaataaaaaatcccgtagtaaatacgggattttttgttgattaacagctcttttttttaatcctaattcttcttataaatatctgatagtcagttctttatgaagattgagctgttgctgttaggacaaagatacaattttgaaagcaaatcacaactacaccaagatcaacaataccatcattgc

SEQ ID NO: 296 - DNA, 16012 bp, synthetic construct
  misc_feature 1..16012: note = Synthetic
  source 1..16012: mol_type = other DNA
cgtcgtacgtttttcgcaattcggcgcacgctgccgcacgcttcagtttgcaggatgccggtaacatttacggccgtttaactaactccacacaaggagtgttcgaagcccgcatagccgcactcgaaggcggcattgccggactggcattggcatcgggagcggctgccatcacctattctttgcagaacgtggcccgtgccggcgatcacatcgtttctgccaataccatttacggtggcacctataacctgctggctcacacgctgcctcaatacggcgtaaccactacatttgtcgacccgtcggacctgtcgaattttgagaaagccattcaacccaacaccaaagcggtgttcattgaatcgttgggtaaccccaattcaaacattatcgacattgccgctgtggccgatattgctcacaaacacagcattccgctgattgttgacaatacattcggcaccccatacctgatccgtcccattgaatacggtgccgacatagtagtgcactctgccacaaagtttatcggtggtcacggaacatctctgggaggtatcattgtcgactccggtaagttcgactgggtagcttccggcaagtttccccaatttaccgaacccgaagccagttaccacggcgtaagatttgtcgatgctgccggtccggctgcctacattatcagaatacgagccgtattattgcgcgataccggtgcagctatcagtccgtttaacgcttttattttgctacaaggagtagaaacactatctttgcgcgttgaacgacacgtgtcgaacgcactcaaagtggttgagtatttaaagaaacatcccaaagtggcggcagtgaaccatcctgcgttacccgatcatccggatcatgggttgtacaaacaatacttcccgcagggagccggatccattttcactttcgaggtgaaaggtggtgctgccgaggcacaagcgttcattgatcgtttacaaatattctcgctgctggccaatgtggccgatgtgaaatcacttgtcattcatccggcaagcaccacccattcgcagctgagcgagaaagaattggctgaacagggcatcaaaccgggaacggtacgcttgtcaatcggtacggaacatatcgatgacattatcgatgacctggagcaggcgttgaacttttaatagaatatgaatatagcaactttattatcgggaggtgtcgacagctctgttgtcgtacaccttttgtgcgaacagggctacaagcccactttgttttatataaaaataggtatggacggggcagaatacatggattgctctgccgaggaagatattgagctggccactgctacagctcgtaaatacggcctgccgttagagatcatagatttacataaagaatactgggacggggtggcgtcttacgccatcgacaaaatacggaaagggcttactcccaatccggatgtgatgtgcaacaaactcatcaagtttggctgttttgaagaacgggcagggaaggactttgataagaccgctacgggacactatgccagcattgtggaacaggacggaaagatatggctgggtactgccaaagatccggtgaaagatcagaccgacttcctggcgcaaatcaactaccttcaagtatccaaactgatgtttccgctgggtgggttgatgaagaatgaggtacgcgacctggcactcaaagccggtctgcctagtgctaagcgaaaagacagtcagggcatctgtttcttgggcaaaatcaattacaacgacttcgtgcgtcgtttccttggcgaaaaggaaggacctattatcgaactggaaaccggaaagaagattggtacccaccgcggctactggttccacaccatcggacaacgtaaaggattgggattgagtggcggtccgtggttcgtgatccgtaaagacattcaggaaaacatcatttacgtgtcacacggatacgatgtggagacacaatacggttatgagttcggcatgcacgattttagtttcatcactgaaaacccgtggacagaaggagcaggcgagtacgatgttacctttaaaatacgtcacaccccggaattccttcagggcaagctaacccgtacgggcgatacttacaatttggtttcgtcagagaagttgcaaggcattgcaccgggacaatttggcgtgatttacgataaagactcccgcatttgctttgggagcggcgaaattatcggttaattattccccttattataataaagagataaagccgggtactgcttaaatgtagtattcggctacatcaacaatacctgcacgcatggcatatcttgtagcctcatgcgcattgttaacccccagctttctgaaaatattcttccggtgactgttgatggtatgaaaactcaggttcttctccgcagcaatctccttggttgtctttcccaacgcaatctctttcagaatcaccttttcactggcagtgagcaaatgatcatcttgcatcgccgtggcagcagccgaatttccggtgagcagcatattgcttatgtggttacaaatgaaacgctctttacgtgaagcaaactgcatggcagtagtaatttcctccttcgagctatctttcatcaccacgctgaaggctttggccggcaataccacctgacgaataaaattcaaactcagctcgtcggaaaacaacaaccagtcggcatccttaaaccgctcgtgcagcaccaccagctcgtcggcggtgttaaagtcaaacaaagtataatccagcaccaccaccgcatcgggatgcagacgcaactctctgatcagttctgccttgctgtcggcttccacaatcacctgaatctccttctgtaggcctaataaaaatagaattcccgcccgggtgatatcctgattatctgcaatgatgtatttcctcattattcaaacgttggttactttgcaaaaatacactttttgatgaatttatgcttcttttttcactattttatatcccgttgccgcaataaagatactcatgagcggactgatgatattaaagaaacaataaggcaggtacgccagcgtggctacgttgagaatcgtagcttgcgtcatgccgcatgtgttccacggaataagtacagaggtaaccgtcacggcatcttcggtggtgcgactcagcaacctgctttcgtaacccttcttcttataaatattgccaaacatatttccggtcagaatgatagagatatactgatcggccgtggttatattgaggaaaatacccgagcatacagtcgaggttaccatgcctgtgcggcgtttcatgaaacgtacaaataccgatgtgatacttcccagcatgccgcttgccgtcatggctccaccaaaacacatggcacacacaatgagccacaccgtgttgagcatgcccgccatacctcttgtggcaactagttcggtgagtgcttcgtgattcgtgtgcaactccgtttcaccgtagatcgtcatcagtgcacctttgaacagcgcttcggcgttgctgcttgccgtaccggcaatttcctgcaacagatgaggctgaaagatgacggcaaataccgccgccagtgcagtcgacaagaaaagagtaaccagcgaaggtacctttcgggcaatcagtactccggttatgaccggcaccaagagcaaccatggcgtaatgtaaaacttatcatgaatagaagccgagaacgcagcgatatgttccgtgtgactcgcctcgtgtgataatccggccaccgtaaaaataaccagcgtaatgagcatagacggtatggtggtaatcagcatgtagcggatgtgtgtaaacagaggcgtatccgtaaccgaagaagccagtatggtggtatcggaaagcggggaaaccttatcgccaaagtatgctcccgaaatgatggcacccgcaatccatccctcgtcgaatccctgcgccttaccaatacccatcagcgcaatgccgatggtagctatggtggtccacgagctacccgtcatgaccgacaccagcgaacaaatgatgcacgttgaggccaggaagaagttaggatgaataatctgcactccataataaataagtgtgggaaccaccccgctcaccatccacgctccgcttagtgccccgataataagtaacacaatcagcgccgtggcaacgcccgaaatattattcgtgatggccagctcaaagtcatgccagcgagttttgcatacagccataccaatcagtacgcataccgccgtagtggtaagcaatgccacctgactaccgccgttgagtgcatcactgccaaatacccggataatggcaaacaataaactgaccagtaccacgatgggaaccagcgacaggagaggagacggttttcttttcatactttacgtatcagtggtttatgcagcatctatacccgtcagcgttttcagagcgtaaccgatgaggaaactgatacccgccaccgtgaagctgagtatagccatttccagaaaacgctttttgaaactctcgcctcgtgccactgcgtaataataattaaacaaagctataatggtaagtgccatgacaagcatcaaccccaatgctaccagtacattctcgatgaaaatgaacggagctaccagcgccaccactgttatgatgtaagcaatacccgtatacacagccgccttgaccggatgtttggagtcaccctcctccgatttggtcgacaaatactctgacgaagccattgacaaggccgctgcaatacccgtaatgctaccggtcagcgctatgaggggtgcgttactcaatgccagcgtgaaaccagccaaagccccggtgaactccaccaacgcatcattcaaccccaataccacggaacccatgtactccaatttctcctcattgataaggccaatcagcttttgttcatgcacctcctcgtcgcgtcccagcttctctaactcaggatattccgggtagcgggcataaacctcttgcgcatccctctcttccttctccatcagtttgatggcgaaagtcagtcccaagatgcgtgccagccaataatacttgaatatacgccaacgattgggagccacctctttacccgtatgccttttcagtatttcgtagtgcgccttttcctcggcagcaatctgtaacaacgtctttttattctcgctatcttttacgatatgggccagtttagcatacacaatgctgctggttatttcatcctcctgaaagaacaggaagtcagatattgcatttttatccgctttcatttcatttgaatttaatgtttatgcaaagttatattatttatgatagaacacattcgttgctttcttttttaacgcaacaacctctaaaaataaagcaggcggtgagagacatacatcttcaccgcctgtttgctaattgccacctgcctaacgccggtgagcaacgaaactattaatccacatcctcttccgcattggcatcgaatacaacgcttttggctacgtatgactcattgccggatgtatctgtgcagtacaccaccacgtgatacttaccctgacgagccaagataggtatctcgatgtgatcgtgaacgtggtgattcttctgattcacatcgaacgactgattgtaagtgaacgtaatggaatcgccgaccgccctggtcgaggccgaagtatgcgtgtgtccgtcgaatttattatgaatatcaaccttgtaagaagccaccattacatcatcagacaaatccatgtcgagatgcaacaaactacctgttttgatagcgcccccatctgtaggttcgttgataacgatcaccggtttggtggtatcattatcatcgtcagagcacgctacgaacaaactacttagtgatacaatacaaattgctgaaagaattaattttgttttcatttgaatacttgtttaaatggaattttgattaaaacctgtaagttcctgcccggttcgggaatctccactttgcggtagaaactcaggtgattgaaatacttcctgtccagtacatttctggcagtaagcgttacctctatgggagtgttgtgccatttgaagtcgaacttcccgcccagatgaaacaagttgccgcccgaagtcttgtcctcgttgcgatccaccctgttctgtgcgacaatactctccatctgcgcatacacactccacgaagcagcctcccacgtaagcgtgttacgcatggaagcaggcggtgagaaactcagcggcaaatgttcgtcgcagttatacgtgtacacataatcgccggcaaactgataagtcagcttgggcaacacgcggtaagacatactcagttccgcacccgtgaaaatagcctccgcacccgtgtatcggtaaatttgtccggcatcgggcagtacagaccattcacccgtaggcctcagaaaaatgtaattgtcaaaccaactgaagaaaggagacgccgtgaatgacaaccttcctttctcatatgtataagcagcatccgcctgccatccttgttcagacttcagcgtagccacaccctgctcgtgcctgaaggtgccgtgatgcaccccgttcgacgccagttcgttggcacccggcaagcggaaactccgccccacgttggctttcaacatgtgcacccgcgaaggattccatacaaaacccaccgaagccgaataatcgccaaagtccctgttcaccgcatagcttctgttcttatacacctctatcacatttgcatcatatccctgatcaacgagatactcctccagatacgcatcggtatacccggccacctttatcttgccataatcataccgcacacctccgctcagcgttagctgactgttgagtttgtagttactcaaccacaacccaccggtggtgacacgcgtgtactccggcaataaaaaagagtaaccggctatgttattatcttgatattgcacatcccagcccagcgtatgctcccattttccatttcccagaaaacgcaacttagcatttgaactatacgtgttcaacctgaacgccaactccttgtcgggatccttctgaggaatctgttgcgtggagtaatgcgtgtgaaacgaactccactcttcgcggtgattgttctggtaccccaagtcccacgacagagccagcggtccccacgcatacccttgatgcaacgccaccttcaggtgattcacaaaactgtaaggcaactcaatgttgcgactgttgccgtcatcggtcagtttcgacagatcaggaatgccatgcgcccccggaaagaaccccgttttctggtaagcattacttattgaaaaggaagcatcgtacccgtttttgcggtacgtggtgaaccagctcacgtctctttcgaaaccggctgtgttcttcatccttcggttatacaccggaattttacgggtcagatacaccaccgtatccgtgggaatacggtaatcggcaaaatgcatctcggtgtaccttagtttggtaaaccacgcattgtgtttcagccccagcatgagcgaaccgcccagcgtgccgttcaccgatttgccgatgagagccacttcacccagaaacatgttctgagtaggagcaggcaaggcattgatttcaattgctccgcccatggcatcactaccatataataaagacgaaggacctttgcgcacacttacctggccggcattgaacgcatcaatctccagcccgtgatccgcaccccattgctgcccctcctgtttgaccccgttttcggtcaccgtaatccggttaaaacccaatccccgaatcatcggtttggcaaagcccgaaccaatatccatggaatgtacgccgggaatgttacccaacgtctgcaccagatttcccgaaaagttatttcgaagaaaatcttcaccgaccacctcgagctgcaacgtagcattcttgtttcgtatgtggtgatacgtctctgataccaccacctccgacaagttgacactcttcagtgaatcggttgtctgggcgtgtgccgacaaggatatagctataccccatgcacacatacccgataaacatccgatacgcatactaacaaatagttattcgttaaacgaaaaaaataagatgagtgagataaaagtatgtcagcccacggcgggaggtgcacgcatgccacgagaataagagaaactgaatgttcccttgttctcaaaaaccggaacctcataaggaagaagttcggcaatgaaacatagttggagagaagatacttgaacgaaaggcgacagtgtgaaatgacagatagggcaggagtcgggccgactgctgttactgtcttcctcacaatcgtggtgacaggcagaagatgtgcacggctcgtgaaagtgaaaagccttcaccacatggaaaggcatgagcgttagtagtaacacccaggcaattcctatccgtaatctgtatttcctttttgccctgttaagcatagtgaatgcaaagttatatagaacttttctaaataaaaacagcttgccgcgcaaatttgaattcttttatactttattagttatagcatttccaccaatggagcagaaacagaaaccccgttgctacgagtgcggtagacagtcccgtgtagaagaaagcaatgaaccaggtaggcaataaatgaaaagtgcgaatgctgatacccataccaatcatgaacaacataacgagccaccctttggcatcaaaaaaagccagcggatgatttttgtcgcccatttcagcaattcgccgggtgtgtttaccgtgcagccttttaaatataagaaaaaaaaacaggcagaaaataaccaccgctccggctaacttcagttgccattgcagcgcatcgttcatccatgtataaatgcctattttcagtatgttggctccggcagctatccaaaccagtccggccattgccaccagtacttttctgcttacgtacactctcattctatcttgctgattttgtattcaggtacttaaacagcatggaggggagtaatgttcacgcagaaaaacaagtcagccgtccttgtctgttattacgttatactcacatgttttgaaaaccatacatgttgcccttactcctttatacgactctcctcctagagaaaaaaaagtgtggtttaccatcacttaccctcactaactgacttgaatcccctttctaataggctatatagaagagtgatggtaaaaaatgtctaccattaaaacggcagttttaccctcactatctatcacttttaactaagactatagattcattaactccaatttaactaaaaatcagacgatgtttgagcgatttcgaatgctttttgatgaaaaacggccaaaaacgacttcataagtcgtcgaaaataccttgttgtgcatagataaaccccttttttggcttcaacgcccttcagtcaatttgagattgaaatgcctctttttagtttatttttgtgagtttattttatttgtattgactgtgtttagatttggagaatggctactgtttatgcagtaacctttttgtaccgatgctttgatagactttttgggtggtaatggtacttttatatggagattttcttttgttatattgactaaatatattacttcatttcggaattggtctttgtttttgagtttgattcttgcttttttatgcgtacttgttttgtgtttgaaaaatagttattatgtatggttttaatgttggttgttttgatgtaattgtaaaccaacaatttataattgttggcctgcgattttaaaaagttggcgtaggattttgaaaagttggtgtagaatatatttcgtatgctgaactttgaattttataaattgatattttggatatatacaacaaaaggcgagaattgcttcccacctttaatgttttcacaacggaataatccttattgtgatttgcttcaaaattgtattgcaaaactatgaattattttttagtaaacaagtgatttctgtagaaaaatatatatttttggaaaaaatgtattttgaatcaaatattatgaagaaaatattaggattagatttagggactaacagtataggttgggcgctaatagaagccgattttgagagtaaacaaggaaaaattcttgggatgggaagccgtacaattccgatggggcaagaattaagtaaatttgaacaaggacaagcccaaacaaaaaatgcaaagagaagggttgatcgtagtgcaaggaaacttaataaacgctacaagcaacggcgtaataaacttatttatgttctgcaacaattagatatgttacctgaacaaattaaattatctgaagagtttaacaatcctttaaaaattgataaggtttcaattttaccgattgctcaaaagcaaaaacaatattctgcgattgatttactagaattacgagtgagagcattaaatgaaccagtttcacttaaagaattaggtaaaattatttatctttttaatcaacttcgaggctattccggtggaggtaatgagccagaaaagcaggaaatagatagcgatcttgttgaaaatgaagatagaaaaggaaatgaaagttttctggcttttggaaaagtaatttggatttcagaagctgaatcctttatttataaaggtaaagagttaaaaaagtataaagtgaaaattgaaacagaagacggcgagttagaaggagacacttttttaaatttgcttaaagaaggtgagtcattagaatttttaataattaagacaacaaaaaaaaacgaagaaactatcacctttaaattgcccaataaaacgaattggcgcaagaaaatggaaaatttagaaaaagagttgaacgaacaagcaaaaataaatggtagagagatctttttgtcggaatactttttgataatattaaaagaaaatagatgggctaaaattagaaataatgtagtccttcgttcccgttatcaatctgaatttgataggatttggaaaacacaaagtgaaaatcctaaaagcgaattatatgatatgttattacatctttcgcaaaataaattattcgatatattaaaatttatttttcctggaacaaaagaaacacaagaagaatatcgtaaagcaggacttgaaaaaggcctttatcatatcattaaaaatcaaatcatttactatcaaagagaattaaaagatcaaagcaatttgatctctgattgtagttttgaaaaaggacaaaaagccgtttctaaaagtcatccgctttttcaggagtataaaatttgggaacaaatcaataaattgactatcaatacaaaaattgaagatgggacaaatcgaaaaggtgaaataaaatataaatatattgataaacctgttccagcagcacttaaagagtggatttttgatgaattgcaggaaaagaaagaaataagttttagtgttattttgaataaattgataaaaatatataatttacgaagtggtgttgattttctcaatggaatgaatcccaaggctaagttaagaggtaacgaaacaaaattaattctgaaaaaagttttatgtaatggactttgggataaactgggcatgtcaaacattgaacggcaaattgaattatgggatattctgtataatgctaaaggtaatgaatacgaaataagtagtgatcgaacgtcaaaagtaattagttttctcaaacaatattctactgaaatcccagatattcagcaaactgctatagaaattagcaaaaccaaatttagcaggaattatgctgcaatgagtttgaaagcaatagagaaaatcttgcctcttgttcgttgtggaacaaagtatttcagtaatgagctttctgaaatacttaacgaaaaaattattaggcttttaaacgaaaatttaagcgatccatttgaaaaagcagcacaagaatatctagaaaataataatgatatacttattcatggcggtattatgaatgcttacgctataattttggtatatggtaatcacacggaaaataagtatgctgaaattgagcaaattcaaaaccccaaccagattttaagattaaaacagggtgagttacgtaatccattggtcgagcagttgataaacgaagcattaatggtggtcaaagatatttggaaagaatttaaggaaaaaccgcaggaaataagaatagagttagctcgagaactcaaaaacaatgctgaaagacgagcaaaaatctacaaattaaatagtgaaaaccaaaaaactaatgatgaagttagaaatctgctgatagaactaaaacaggaaataacgctagccaatatcgaaaaatataagatttgggcttcgcaagaaagtttggaagaaatatttgtgaaagaatacaaagatccctctaaatcggaaattgagaaaatgcgtttgtggcgagaacagggacacatttccccatacacaggaaaacctatacctctttcgaaactgtttgatagaggaatgtatgatgttgaccatatcatacctcaatctcgctattttgatgattcgtttacaaataaggttatttgtgaaaaagcagttaatagagaaaaaaataatcgcacagcgatggagtattttgagattggttctctgactcagcaaatattttctaaagaagctttcataaagcacgttaataaacattttcaaggaattaaacgaaataatcttctgacaacaaaagtaccggaagatccagtggttcgtcaaatgaaagagacgcaatatatttcagtcagagtaaaagatgaattgaataagattgtaggatgcaataacgtaaaaacaacaacaggaggtgtcactgattatttgagaaatcaatggggtttgacggataaattcaaactgctgttaaaatcacgctaccagaatattcaaccattgcttgctgaaactgaatatgagaaatatataattggcattgaaaaaaagaaaaaggaatataaaaaaatgaatataccttttactgatactatattaagcaaagtcggttttattgaattgtttaatagtaattttatacaaattaaaagaaataaattaattataaaaggatggagtaaacgtattgatcatcgtcatcatgcaattgatgcactgacgattgcttgtactgaaccagctcatataaagcgattaaacgatttgaataaagaacttcaaacttggttagataatcacaaaaaagatattctgcccgattttgaaggaagtcctaccgaattattagacgagattcttaatttagatgaagccaagcaaaaagctatatttgttcaaatagagaagtttaaaagcgttgatatgccttggtctgcttttccagaagatgcagaaaaagcaattcaaaatattattgtttcgcaaaagccgaaagataaattattaattcagcccgataaaaaaggtcatctgcaaattaaaatacgaggtcaattacatgatggaacattgtacggtaaaagtcaaggtatagaaacgtatagaataccattatctaaattagcagataaaaaaatagcgacagaaaaaacaattgataaaatagcaaatgaatatcttaaaatagcaattaaacaacatttaaaagattttgaaaataaaaaggacgaggcattttcagcagaaggtattttggtgctaaataaaaaattagcagaaaagaaaagatttaatgaatggagcagaaaaaatcagaagaaaagagtcggggaaaatgcacctcatacccctttgacttcaattaagattttttatcgtgatccgctaagagttaaaaagaaaaaaggatttgaagaagctgaagaggtattagaaaggcttattagaaaaaaagcatataatgagaccttattagtcaagacaggtggtaactacctttttgctgtgatggaaaaagatggtaaaagagtttttgacctcatttctttttatgatgcgactcgtttattaaaggaagagtttaaccaaatactagacaaacagaaatttgacaaagaacaagtttttaaaagatattttgaaaaagaaaatagagccaaatttctttttacactaaaacaaggtgaccccgtgtatatgctatctaaagatgaagacattataacagacaaagatagtccgttatatgaaagtttttggaaagataaaatagcaagaagtagaaatatttattatgtaacaaaatttagtggaaatgagatctattttatgaaccatattgttgcaaatccaatcattaaaaaaaaggagtttggtagtcaggatgcctatcaaaaaatagaaggtttatctattaaaaattattgtatcaaactgaagattgatcgtttaggaaatattgaaccatattaaaatagcatgaatatagtttatgtgttattcataattattggtaaatatatcagttttctaaataacaccttgattgtttttttgaatctactttgctttacaaaattttgggagacttttagagtaactcgctaataatcattataaaaagtgctttcgggtgtaattatagatttatattacaaaaaatatatagaaattagtatgataaaaaagacactatatttcagtaatcctacttatttaagtttgaaaaacaatcaacttgtgatcaaattacccgaagtagaaaaaaacgactccttaccggattcgtttaagataaaaaacgtgcaaacaattccgatagaagatataggtatagtgatgattgacaataagcaaatcacatttacttcgggggtaatggaagctttgttggaaaataattgtgcgttgattacgtgtgacagtcgttcaatgcctcaggggttattattgcctttggaacaaaacaccactcaaagtgagcgttttacagcacagattaatgctagtatccctctgaaaaaacaactttggcaacaaactattcaaatgaaaatagagaatcaggcatctgttttgagaacgtgtagaaatgaagaagtgcgcaatatgctaaaatgggcaaacgacgttaaaagtggtgattctgacaatcttgaaggtagagcggctatttattattggagaactctttttcctgatattgataattttacaagaggccgggagggtgtccctcctaataatctcttgaattacggctatgccatattacgagctattgtagcccgttcgttagtttcaagtgggcttttgcctactttagggattcatcatcataaccgttacaatgcttattgtttggcagatgatataatggagccctatcgtccgtttgtcgatagattggttgtagaaattatgaatagtggagtggattttcaggaattatctaaagaaataaaagttaaactattgaatattccggttttagatgtgatgattaatgggcaacgcagcccattaatgattgcagtagggcaaacaacggcttcgttggcgaaatgctatttaggcgaactacgtaaaatagtgtatccttattttgagtaatgaatggatcgtttcagtgaatatagaattatgtgggtgttagtgttttttgatttgcctactgaaacaaaaaaggaacgcaaaatatatagtgatttccggaaaaaactattaaatgacggttttactatgttccaattctcaatttatcttaggcattgcgccagccaagagaatgctgatgtccacatccgccgcgtaaaaaatatattgcctgaaaaaggtcacataggtattttatgtgttacagataaacaatttggtaaaatggagctgttttatgggcaaaaagaggaagctgtctcaacgccttatcaacaattagagcttttctaataaaaaatcccgtagtaaatacgggattttttgttgattaacagctcttttttttaatcctaattcttcttataaatatctgatagtcagttc

SEQ ID NO: 297 - DNA, 14380 bp, synthetic construct
  misc_feature 1..14380: note = Synthetic
  source 1..14380: mol_type = other DNA
ttaatacataatcaggagtcaaacaaaaagcccaatttatattgggctttttgtttcttattttgttttaaaaaactacaaaaaaactcattttttcctttttgcggattatttaaaaatcacagatttaggtaagcatacctccgtcaacgttcaatacctgcccagtgatgtaatcacttatatccgaagccaagaaaacacaagcattagcaacgtcttctggggttccgcctcgtttcaaagggatattgtcacgccagccttgaataactttttcatctaattttgcagtcatttctgtttcaataaaaccaggagcaatggcattacaacggatgtttcttgagcctaactccaaagcgattgatttagtaaaaccgagcatacctgcttttgaagccgcatagtttgattgcccagcgtttcctttaacccccaccacactactaatgttaattatagaacctttacgttgtttaagcattgtgcgttgtacagctttggtcatattgaacacagattttagatttacctcaataactttgtcgaaatcttcttcactaatacgcatcagtaggttgtctttggtaattcctgcattgttaatcaaaatatcaatgctaccaaattcggcaagtacttcatcggctaatttttgagcttcttgaaaatcagcggcattacttttgtatcccttagcttttatcccttcttggttaagttctttttccagctcattggcagcctctaccgaagcactatatgtaaatgcaatattagcgccgtgttttgcaaaaatttgagcgataccacgcccgatacctctactagctccagttataatggctgttttgcctgttaataatttcataatactatttaattttaattatatttttctttacagaatatcaattcgattccaaagatactgataaatttttaaatctgttttttaaacgatgtttttaataaatctaatttcgcttttgagagaattttattacgaattgacagatttttttgtactttaataacagatgataattaagtaattatggtgtttaaagcattgtaaagcagatgtgtaggaagccccattacgttattgtacgacccttgaatacttgtaacccctaccgagcctatccaatcttgtatgccataagctccagctttgtcgtaaggcatatatttttctatatagaagttgatttcggcatcggagagttttcttagtgttactttggtggtatctgtcagaaccatttgttgggcggaagtggttaagcctacagaagtaattacttcgtgctgtttatcagaaagtaaactcagtatggcttttgcttcgttgtgcgattgaggtttccctagtgctttgtcttcacaccaaacgatggtgtcggacgtgattaaaatatccgttggagttaatgtatttttaaaaggttcggcttttttctttaccaaaaattcggtaatctcttcccttgttaaatgcttaggataggtttcttctactggttttataaccacatcaaaatcaataagtaaatcttttagaaattgttgtctgcggggcgaagccgaagctaaaataatgtgataatttttaatcttttcgtataacatattctatattaaaacgttatttttcgatgtatatgaggtattttttacggatttttaaaaacttgtttaaatctttttgccaagtttttcggatttcatcttccgtcattttatttacaatttgtttttttaattcaggagttccagcgagtttatcgaaaaaagagttaaaaaaaacagttttaactccaacactttctgtgtgagctttttgaagccaaatcaagttcaattttgattgacgtggtgtagcacttaaatcttcaccatagcaaacttgtccttgatatagtggttttttatctcctacatttggggcaggaacgaaagagaaattcgttttgtttaaataaggtgcaccatagatttgaaattgcatttcggtacctcttcccacactgatatgggttccctcaaaaaggcataggctagggtagaggttaatggctacagcgttgggcaaattcggcgagggacgaacgggtaaatcatacgcctgttcgcgtttataaagcgcaagaggaattacgcgtaaaggagcttttattgcctttgaaagccaaccttcgccattgatcatttgagcatattcaccaatggtcattccgtaaacaatgggtacggggtgcatacctacaaaacttttttggctggatttcaatactggcccatccacataatgcccgtttgggttaggtcggtcaagtacccatatcggaatgttttgttcagcacaagcctccataacataatgaagtgtagagatataggtgtaaaaacgcacccctacatcttgtaaatcgaacaatacaaggttgatgccttttaggtgtgctacggaaggttttttgtctttgccataaagagaaatgattgaaattccagtttttgtatcttttccgtctttgatgatttctccagcatcggcatttcctcgaaagccgtgttcaggagcaaatacttttacaatgttgattttgtgttgcaataaggtatccaccaaatgtgtgtatgttcccaactgagtttttaccactcccgtttgattggtaacaatggctatgtttttatttttgagttccgataggtacaattccatacggttagcgcctaatatcaattccgaaggtgtgggtggattggctactgaagtatttttttgttgattttgtccattatttttgcacgaaaccatcaaaagtaagcaaaaaaatgtaattttgggttttattaaaaatcttgaaacattgaattttgaatatttcatagcgaaacgaattattttctttagaaaggataaagatacagtatcttctccgattatcaaaatggctgtggctgccattgctttagggattgtggttatgctcattgccattgctacaggaggaggcttacaacaaaaaattcgtgaaaaaataaccacctttaatggtcatatccagatttttaagtatgatgctaaccattcggaagtgtcggtaaaacctgtttcgatacatcaagatttttatcctaatttttcagatattcctcaggtgaaacacattcaagccgtagcatcaaaaggagggattattcgtaccgaaaatacgttcgagtccatcatagctaaaggggtaggagcagattataattgggataattttcgccaatatatcacctcaggtcaaatccctgattttaaatccgatgaaattagtaatgaaattattatttccgaatatttagccaacagattaggattacaattaggcgatttttgcaataccttatttcttaaagatgaaaattcacaaatgcctaatcagcgtaattttaaaatttcagcactttacagtagcggatttcaagattttgatgcactatatctttttaccgatttgaggcaaattcagcgtatcaatcgttggcaaaatgatgaagtgggtggttttgaggtatttatagatgattttgaccaaatagaaatcatagggcaacaaatttatgagcaaaccctctccacgttggatactcaaaccatcgtacagaaatttccttttatttttgaatggctcggaatgttcgactttaatatatatctgattatcattattatggttatcgttggcggatttaatatgataacagctattctcgtcttaattctggaaaaaacaccaatgatagggattttgaaaagtttgggagcttccaacaaaagcattcggaagatatttttattcaacgctgcttacatcatttccttaggattattttttggtaatgttatagggctaatattgttatatttacaacataaatatggctttataaaattagatcctaacacctattatgtttcacaagttcccatagatatccatcctttaactattgttattttgaatgtaggagtactgataatctgcttattgatattgttactacccacttatattgttgctaaaatttctcctgccaaaacaatgaaattttcataaatgttttatttccagcaattttcagcacttttttcgccccatataagtgttgccaaatacggattgtcaataaacggattacgattgccttgtgcggcttcaataacgttatttctatttttttcgatgtatgaaacagggtcttctgcgttccattttagtaataattctatacttcctgttgaaatatcgcttcccatattttcgttgtatctgatattcaagtagagtaccattctggctacatcgcctttccattcatcaccaggataccaacctcccccgatttgtcttgcttgtccttgtccttgagtgaaaggtaaattaccacgattgctattgaccttagtatcacaagcgcgtagatgatgtaagtcagcctgggcggtgctttctatttttgatcttggatacacgtgttcagtattgaaagtttgtgggtgataattacttccttcgtactccttccaataacgtttctctcctgtatataatagtactacctgattttcattgtcttgtgaacgatctgctttataaagataagcgtgtctttcaggatatttcaaaaaggtagcgtgtttgccgatggttagtgtagcgagtgcatcgcgtagttcttggtttcttttggaaaaatcaacgtctttgtaataagatttcaattcagaaggaatattaaaagaggtagaggtgttcccatttgaagaagtagtaaacgaaaaatctactttggtgttgcctcctttgccatcggttgctgtgacaaatccttggtaggttttgttttgagttaaatgagtgaatgtatagtttaatcggttaattgtcgcgatgttttttccttccagctcgatgatatattgcacattatcgccgtcagggtcaaccgattggctccacgaaatggtagccacttcttggtttacaattgtattttcaacacgaaacgattcaggggctcgattattttgttgttcattgctgttacaagcaatggcaaaaattactataaagtaaaaaatatttttcatatcaattttatggtttgcattgcaaagatatgaaaaaggattttaagaaaaagccccgcagataggcgaggcactagatgttttcacaacggaataatccttattgtaaattgctttctgccgcaaagatagaaaaaaataattgaatatcaaaaataattaactttttatttgtattttcatacccgttgatttttaaactattaactatgaaacacatactaggtctcgatttggggaccaactctatcggttgggcgttgattgaaagaaatatcgaagaaaaatacggaaaaatcattggaatgggaagcagaattgttcccatgggagcggaattaagcaaatttgagcaaggtcaagcacaaaccaaaaatgctgacagaaggactaatagaggagcaaggcgacttaataaaaggtataagcaaagaagaaataaactgatttatatcttacagaagttagatatgttgcctagtcaaataaagttaaaagaagatttttcagatcctaataaaatagacaaaatcacaattttatctataagcaaaaaacaggaacagcttacagtttttgatttggtaagtcttagagttaaagctttgactgaaaaagtaggcttagaagatttaggtaaaattatttataagtataaccaacttagaggctatgcgggaggtagtcttgaacctgaaaaggaagacatttttgatgaagaacaaagcaaggataagaaaaataaaagttttatagctttttctaaaatcgtttttttaggtgaacctcaggaagaaatttttaaaaataaaaaactaaataggagagcaataatagtagaaacagaagaagaaaattttgaagggagtacatttttagaaaatataaaagtaggagattctttagaacttctgattaatattagtgcaagtaaatcaggagatacaataaccataaaacttcccaataaaacaaattggagaaagaaaatggaaaatatagaaaaccaactcaaagaaaaatctaaagagatggggagagaattctatatttcggagtttctattggaacttctcaaagaaaaccgatgggctaaaattagaaacaatacgattcttagagctagatatgagtctgaatttgaagccatttggaatgaacaagtgaaacattatccatttttggaaaaccttgacaagaagacattgatagaaatagtatcatttatctttccaggggaaaaagaaagtcaaaagaaatatcgtgaattgggacttgaaaaaggattgaaaatatataataaaaaatcaagttgttttttatcagagagagctgaaagatcagtctcatttgatttcagattgtagatatgagcctaatgaaaaagctattgccaaaagccatcctgtttttcaagaatataaagtttgggaacaaattaacaagttgattgttaataccaagatagaggcaggaacgaatagaaaaggagaaaaaaagtataagtatattgatagacctattccgacagctttgaaagaatggatttttgaagagttacaaaataaaaaagaaatcactttttctgcgattttcaagaaattaaaagcagagtttgatttgagggagggaattgactttttgaatggaatgaatcctaaagataagctaaaaggaaatgaaactaaattacaacttcaaaaaagcttgggtaaattgtgggatgtactaggacttgattctataaataggcaaatagaactgtggaatattctttacaatgaaaaaggaaatgaatatgatttgacgagtgacagaacttccaaggtcttagaatttattaataaatatggtaataatattgtggatgataatgccgaggagattgctattaaaatatcgaaaataaaatttgcgagagcttattctagtttaagtcttaaagcgatagagagaattttacctttggtaagggcaggaaagtattttaataatgatttttcacaacaattacaatctaaaattttaaaacttctcaatgaaaatgtagaagatccttttgcaaaagcagctcaaacttatttagacaataatcaatccgttctttcggaagggggggtaggaaactctattgcaactattcttgtgtatgataaacataccgctaaagaatattcacacgatgagttatataaaagttacaaagagattaacctattaaaacaaggagacttaagaaatcctttagtagagcaaataatcaatgaagcacttgttcttataagagatatttggaaaaattatggtataaagcctaatgaaataagagtagaactagcaagagatttaaaaaatagtgcaaaagaacgagctacaatccataaaaggaacaaagataatcaaacgataaacaataaaataaaggaaacacttgtaaaaaacaaaaaagaattgtctttagctaatatagaaaaagtaaaactttgggaggcacagagacatttatctccttatacagggcagccgattcctctttcagatttgtttgacaaagaaaaatatgatgtagaccatattatccccatatctagatattttgatgattcttttacaaataaagttatttctgaaaagtctgtaaatcaagaaaaagcaaacagaacagcaatggagtattttgaagtaggttctttgaagtattctatttttacaaaagaacaatttatagctcatgtaaatgaatatttttcaggggtaaagcgtaaaaatttgttggcaacttctatcccagaagatccagtgcagcgacaaataaaagatactcagtatattgcaattagagtaaaagaagaattaaacaaaattgtagggaacgaaaatgttaagacaaccacagggagtataacagattaccttagaaatcattggggactaacagataagtttaaattacttttaaaagaaagatatgaagctctattagagagtgaaaaatttttggaatcagaatatgataactacaaaaaagactttgattctcgtaaaaaagaatacgaagaaaaagagattttatttgaagaccaagagcttacaaaagaagagtttataaaagaatacaaagaaaactacataagatataaaaaaaataaacttatcattaaaggatggagcaagagaatagaccatcgtcatcacgccattgatgcacttatagtggcttgtacggaacctgctcatataaaaagattgaatgacttaaataaagttttgcaagattggcttgttaaacataagtctgaatttatgcctaattttgagggttctaattctgaattgttggaagaaattttaagtttaccagaaaaggatagaagggaaatttttacgcaaatagataaatttagagctattgaaatgccttggaaaggttttccagaacaagtagaacaaaaattgaaggaaattatcatctcacataaacctaaagataaacttctattgcaatacaataaggcaggggataggcaaataaaacttcgtggacaattgcatgaaggaacactgtatggaatttcgcaaggaaaagaagcctacagaattcctttaacaaaattttcgggaaaaaaatttgcaaccgaaaaaaatattcaaaaaatagttagtccttttttaagtggatttatagcaaatcatctgaaagagtataataataaaaaagaggaagctttttcagcagaaggaattatggatttgaataataaattggcacaatacagaaatgaaaaaggagaattgaaacctcataccccgatttctactgtaaaaatctattataaagatccttctaaaaataaaaagaaaaaagatgaagaggatttgtctttacaaaaattagatagagaaaaagcatttaatgaaaaattgtatgtaaaaacgggagacaattacctttttgctgtgatggagggggaaataaaaactaagaaaacatcacaaataaaaagattatatgatatcatatcattttttgatgctacaaattttttaaaagaagaatttagaaatgcccctgacaaaaaaacttttgataaagatttgttatttagacaatattttgaagaaaggaataaagcaaaattactattcaccttaaaacaaggggactttgtgtatttgcctaatgaaaatgaagaggtaattttagataaagaaagccctttatacaatcagtattggggagatttaaaagagagaggtaaaaatatttatgtagtgcaaaagtttagtaaaaaacaaatatattttattaagcatactattgcggatattattaaaaaagatgttgaatttggttctcaaaattgctatgaaaccgtagaaggtagatcgataaaagaaaactgttttaaactcgaaatagaccgtttaggaaatattgttaaagtaataaaaagataaaaatcaaaataatgagtgcagaattgaatatcacaggaaaatgcttttttttgtgaagagttggttgctaaaagtaacatcaatacccaccttaaaaagcatttaaaagaattgtcaaaaacggaaagtgatcaggataaaaaatcatatttgttaaagatatttacttatcctaattacaaaaattccaattattttctttatctgttggtagatggagagactacgatgaagaaagtagatcgttttttgagggatatttggttggattgttgcggtcatttgagtgcttttgcgtataaggggggaggaaaattaggaatgtccaaaaaacttaaagacgccttaaataaaggtgatgtattggaatatgagtatgattttggttctacaacagatctccaaataaaggtggaagaagaatatcctatgggggtaaaaagtaaagttttgcttttgagcagaaatgaacctttagaaatttattgtcaaaaatgtaaaaaacttccagctgttcatttgtgcgtggctcatttgtatgaagaccagtctcattttttctgtgaatcttgtgctgaaattcacgaaaaagaatgtgaaggttttttagattatgcttctatgcctgttgtaaattcaccaagaatgggggagtgtggctacgaaggaggtttcattgatttagaaagagatggtgttttcgagattaaaaaatagaaacctatgctctaccgctccatttacattggcaatccagcatatttgaagttgaaagaccaacagatgaaaatcgtttgtcctgaaaccaaagcagagaaagggagcgttccggtagaagatttgggtttgttgatgctcgaccactttcagattaccatttcccatcagctgatacagtggctgatgggaaacaatgtggtgattatcagttgcgatacccatcatctcccacacggacaaatgctaccgctccacggaaatgcgattcatacccaacgcataaaagaccagatagaagccagtgaaccgctcaaaaaacagctgtggaaacaaaccatagaatgcaaaatagccaatcaagtcgctgttttggaacgacttggaacttactccagtccgatgtatgagtatctcaaccaagtgaaatcgggcgacaccagtaatatggaaggcatcgctgcacagcactattggaaatacctcattcaccccgattttttacgcgaacgctacggcgattcgcccaatcagtttttcaattttggttattccgtattgagaagtatcgtggcaagagccattgtagaaacaggtttattgcccgttttggggatttttcacaaaaacaaatacaatgcttactgcttggcagatgacctaatggaaccttaccgtccttttgtggatttattggtcatccgatggttggaaaagaatcctgaagccgaagaactgaccaaagaagcgaaagcctattttttacaaatcgctaccaaagatgtgaaaatagacgagcaggtgcgtccgctattagttgcggtaaaatctaccgtttcctctctttacaaatgctatacgggcgaaaaaagacaaatttcttatcctaaaatgttatgaattccgaacgatttaacgcttatagaattatgtgggtaatggttttatacgatttgccaaccgagaccaaggcaatgcaaaaagcagccaatctcttccgaaaacgcttggaagatgatggattttctttatttcagttttctatctatttgaggcactgtccgagtagagaaaatgcagaagtgcataaaaaacgagtaaaaatgatgcttcccaaatacgggaaagtagccgtaatgacgattacagataagcagtttggtgatatggaaatattccattctaaagtacgcgaagatccgccacctacttaccagcagctcgagttattttagaaatagaatgaaaaaaatggatttactcagcccgatttattctttttttgctcaattttttatttctaaaaataaaaataatcctctgacagacagaggattattttttgaggttgtaactaatcacaaagttacggaaaattgaaagcaatttacaacgccaacttaagtagttttgataccgaattagttgtaactaatcacaaagttacggaaaattgaaagcaatttacaaccagaggcgaaatcaatgctttatctctgttgttgtaactaatcacaaagttacaaaatttcaattccgatagcactcactgaatatcattgaaaaaactaatgaagtaaagcaatttacaacgttcttggggaaaagccccataaggtactcgttgtctttatccgccttgtaaccaagttctaaaaatctgatataaatcaatggttttacttataaagatttcgatgattttactttttcattgcaaaaagaattcctaaatttgcatacttctttattgaaaaggaattttttacttatctgtttaatcatttttaataaattttaattataaacaatgaataaatcggtttatataatcactcctgatgcttatagcggcaagtcgttggtaagtttaggggtgatgcaaatggttatgcgtaatacacctaaggtaggttactttaaacccattttggagagtaaaacccagaaagataatcatattgctacaatgctcgcccattttaatatcgaaatggaatacgatgaagcctacgtatttacccgtgcggaggtagccgcaatgaaaaataaggggaagataggagaggtgtacgataccatcatcaagcgttacaaggctttggaaagtcgttttgactttgtcttggtagaaggtaccgatttggtagaggaaagcaacgtatttgatgttaatttcaacgctcttttagcacagagcttaaacattccagttttggcggtgcttaaagataatttttcatcggagcaggaactcatcgagcacgttcagatggaaatcaatagccttttggaagccgaagtacaagtcattggggcttttatcaataaagctaaaaatgccgatgaggatactaaagccaaactacaacaaacctttaaagagattcttttttcggtaattcctaatgaagaggagctgggcagaccaaccctaaaagaaattgctgaagctcttgaagccacttttctttataaaggcgaaaatatcaatgtaaccacacaaaaaaccatcgttgggggaatgcagttgcacaatttcttgcaacatatttccgagaattgtttggctgtaattcctgctgaccgttctgatttgattgtaggtacagtaacggcaagtaattccaccaattacccacgtgtggctggaattgtactttatggtggtttctctttagaaaaatctattgttaagattttagacgggactcacaaaataatgcccattatgctggctaaaagcggaacttttgaaactgccaatcgtatcggcaaaataaaatcgaaaatctatccagaaaacaccgaaaagatacgtttaagcattcaattgtttgaaaaatatgctgaagtggacggactcaacgagcgtatttcagctttcaaatccgataccattaccccacgaatgttccaatacaatatggtgcaaaccgcacgtaaagctcagaaacacatcgtgcttcctgaaggaacggacgaccgtattctgattgctgcttcacaattggcaaccgatgaactggtgtatctgaccattttgggtaataaagagaaagttatcgaccgtgttaatgcacttgggctgaaatgggacgaacgtcgcatatcgataaccaatcctatcgaaagtcctaaatacaaggcgtatgcccagaaattgtatgacttgcgtaaatccaaaggaatggaactccctcaagcggaagaccttatgcttgatgtttcttatttcggaacgatgatggtctttatgggcgatgccgacggtatggtatcgggagcggtgcatactacggcacataccattcgtccgtctttacaattcgttaaaaccaaacctggagtaaatacggtttcttccgtattctttatgttgttgcacgacagagtattggtctatggcgattgtgccattgtgcctaaccctactgccgagcaacttgccgaaatagctataacttctgccgattcggcaaaggctttcggtatagagcctcgtgtggcgttgctttcgtactcgtcaggaagttcaggcagtggtgctgatgtagataaggtacgtcaggctacagaaatagtcaaaactcaacgtcctgatttgttagtagaaggtcctattcagtatgatgctgccgttgaccccaaagtgggtaaaagcaaaatgcctgattcaaaagtagcaggacaagctaatgtgcttattttccctgacttgaatactggaaataatacctataaagctgtacaacgtgaaacgggcgctcttgctattggtccgatgctacaaggtttgaaaaagccagtaaatgacctaagtcgtggggctaccattcctgatatttacaatacggtgcttattaccgctattcaatcggtaatgaaagaataacatagcgttttcattttataatttatttttatagttgaaatgacaaaggcaacagcgatgttgcctttgttgattttaatcattagcgtatcagttttaaggtaataggcaataggtgataggcattaggcaatagtagttagtgatgaata

SEQ ID NO: 298 - DNA, 14181 bp, synthetic construct
  source 1..14181: mol_type = other DNA
  misc_feature 1..14181: note = Synthetic
agcttgtcttctttattcaaaagaggtgatgacagctatcaggaaacttataaaagttaaatacggagaaaaatgcgatgatgaagaaatattaaaaagcctggaaaggataatctgcgaaaggtttgatcctttgactattaagccttataaacccggaagatcagaaaaaaaaccgaagaaagtaatttcaaatggagtaccacgaactaatagttcggaagaagtggagaagaaggttgacatatctccggaagaactgaattgatttagaaataaaaaaagcgacttacgccgctttaataaaattcacaacggaataatccttattgtgatttgctttcaaattgaggactaagataaagaataattatataaaacactaattgatatgaaaacaattctggggcttgaccttggcactaattcaattggctgggcattagtttcatcagaagaaaagaaaattcttggcatgggtagccgtattattcctatgggtgcagaattaagcaagtttgaacaagggcaagctcagactaaaaatgctaaccgacgtattgccagaggcatgcgaaagctcaataaacgttataaacaacgtcgaaataaacttatttatgtgttacaggaattaggaatgttacctgcacaaataaaattagctgaacaatttaccaaccccttaaaaattgataaagtttcgattctaccaattgaaaaaaaacaaaaacagtattctgctcttgatttattggaattgcgggtaaaatcacttaagcaaaaaattactttagaagaattaggaaaaattatttatttattcaatcaattacgtggctattcaggtgggggtaatgaaccagaaaaggaaaaggaaaaagataacgatgaagggcaagaaactgacgaaaaaaaaggcaatgagagctatgcaatttttggaaaaataatcgaattatcagcacccgaaacaattacttataaaaacaaaccgcttaaaaaatttaaaattgccattgaaacagaagaaggtattttaaaaggagatacttttctggaaatgcttaagatagacgaatcatttgaattgcttgtcaatattacaaactcaaaaaaacatggagaaacaatcacattcaaattgccaaacaaaacaagttggcgaaaaaaaatggaaaatcttgaaaaacaactgactgaaatctcaaaagaaaaaggtagggagatttatttgtcagaatattttattgaaatcttaaaggaaaacaggtgggccaaaatccgaaacaatgttattcttcgctccagataccaatcggaattcgatgctatctggaaagaacaaatcaagcaccatgcaattcttgaaaaattagaaatatccagactttcagtgctcctacaatttatttttcctggctctaaagattcacagattaaatatagagaagaaggtattagtaaaggactgagtcatgtcatcagaaaccaaattatttactaccaacgggaactaaaagatcaaacgcatctggtaagtgattgtaggtttgaaaaaggggaaaaggctgtagctaaaagtcatccggccttccaagagtataaaatttgggaacaaattaataagcttactattaatactaaaacggagagtggtaaaaatagaaaaggcgaggtcaaatatacttatgaagacaggcccattccttcggaattaaaggagtggctttatgatgaactacaaagtaaaaaagaaataggttttgccactattttttcaaaattaaaaaaggaatataaacttcgtgaaaatattgactttctaaatggaataaacgctaaggcaaaactcagaggaaatgaaacccagttaatgttaaaaaaagctttaggtgaagtgctatgggaacaattaaatctcgaagcaactgataaacaaattatactttgggatattctttataatggaaaaggtaatgagtatgatttagaaagtgaccgcacatcaaaagtgctatcttttttaaagaattatagtgtagatatttccaaccttgagttaactgctgtacaaataagtaaaataaaattcagcagaaactattcatcacaaagcctgaaggccatcgagaaaatactccctttggtaagatcaggaaaatatttcgataccgaactatcagaagcaatccaggcaaaaattgtgcgattattgaatgaaaaagtaagcgacccttttgaaaaggcgctccaggagtttattgagaaaaacgaaacagagattttaacaaacggtggaatcatgaatgcttatgccactatacttgtttacgacaagcatactgccaaagagtataatacgaatgaaagaatagataactacaaacaaataatcaggctaacacctggtgagcttagaaatcccttagtagagcaattagttagtgaaactttaattatagtaaaggatatatggaagcaatatggcaaaaagccggatgaaataaggttagagctttccagagacctgaaaaacaatgcagaaagaaggtcgaagatgtataaatccaatagagaaaatcaaaaagctaatgaggaagtaaaaaatcttttaatagaattaagagaagaaatcacactagctaatatagaaaaatacaaactgtggctttcacaggaaaattttcaagaagaatatgtaaagaaatataaagacccttctaagtccgaggtggaaaagatgaagctttggaaagaacagggacatacttcaccttatacaggacagcctattcctttaactgaactttttaacagagagcggtatgatgtagaccatattatcccacaatcgaggtactttgatgattcttttacgaataaagttatttgcgaaaagtcggtgaataaggataaaggcaataaaacagcaatggaatatttcgaagccggttcagtcattccaaatgtactttctaaatcagatttcattgaccatgtaaaccggcaatttcacgggttaaaacgtaaaaatctattagcaacaaaagtacccgaagacccggtagcaagacagataaaagaaacacaatacatctctgtcagggtcaaagaggaactaaacaaaatagttgggaatgaaaatgtaaaaaccactacgggaggtgttactgactatctgcgaaaccaatgggggcttacagataaatttaaactgctattaaaagagcggtatgaaaaagtacaaccattaatggctgaagtggaatatgaaaaatacattaccacttttgatgctaagaaaaaagagttagaaaaagcggaaatttctctcaatgtaccagcattagacaaagaatattttatacaatcttttaatcaaaactttattcaaagaaaaaataataaatggataataaaaggctggacaaaaaggattgaccaccgtcaccatgccatagatgcacttattgtggcttgtacagaacctgttcacatcaaacgactaaatgacttgaaccaagaactgcaaaattttttagatcataatagagaagaatttctacctggctttgaaggaactccaactgagttgttggatgaaattctaaatctggatgtagaaagacaacaaataatttttagacaaattgagcggtttaaaaacattgaaatgccctggagcaaattcccagaagatgcagagcaaaaaataaaagaaattattgtatcgcaaaagccaaaagacaaactattgattcagaaagacggcaggagcgggaaattgcaaataaaaattagggggcaactgcatgaaggcactttatacggaaaaagccacggtgtggaagcttatagaataccattaagcaaacttgttggaaaaaaatttgcaactgaaaaagtaattgataaaattgctaacaccttcctaaaagactccattaaagaacatttaaaagactacgataacaaaaaagaagaagccttttccgcagaaggcattttaaatctaaacaagaaactggcttctaaaaaaggtaagaatgacaggccagcaccacatacacctatatcctcgataaaagttttttaccgtgccccggcaaagcaaaaaaagaaaaaaggacaggaagagccggaggaagccctgcaaagattagacagagcaaaagcattcaataaatccttatttgtaaaaacaggggacaattatctgtttgcagtgttagacaatgaatataaaaggatttatgacctcattactttttttgatgcggctaatctgctaaaagatgaatttaataaaaccaacgataaaaaaaaatttaataaggagttagcgctaaaacaatattttgaacaaaaaaataacgcaaagctattatttacactaaagcagggagatgcagtttatatgccagagaatggtgaagaggttatccttaattcagacagtcctttgtataaaaattactggggaaatactgaagcgagaagtaaacaccttcattatgtaacgaaatacagcggagaaagaatatattttataaaacacaatgttgctgactcaatattaaggggaaaagaatttggaagtcaaaatgcttacgaaaagataggagaatactcaataaaagatttttgcataaaattaaatatcgaccgcctcggcaacatctttcctgcgagataaataataaacccccgtttcctccgttctatcatagtaaaccaccaattcctatgataaagcggacgctttattttggcaatcctgcctacctcaaaacgcttaatgagcaactcgtcatagagatgcatgacagcggcgaaaccaaatcagctcctattgaagatataggattgctaatattggatcatcagcaaattactatcacccagtcgctattagccaaacttttagcgaataataccgcggtcattacctgcgatgatacccaccaccctaccggcatgatgctgagccttgatggccatacacttcaaagccagaaatttcaggcgcaggttgatgcaacagttcccttaaaaaagcaattgtggcaacaaaccgtagcagccaaaatagaaaaccaggcagctatgctggcttttcgcaaggaagaaaataaaatattgctgaaccttgctgcatctgtaaaaagcggggatagtgaaaattacgaagcacaagctgctgcatattactggaagagagtattccctgatttcctggaattcaggcgtgagagatatggccctccgcctaataatctattaaattacggctatgccattctccgggctattgtagcaagaagcctgacagccagcgggcttttacctaccctcggtattcatcaccgtaaccaatacaatgcttattgcctggcggatgatattatggaaccctataggccttttgtagattatatcgtttaccagatcataagaaataacgggccgcatcttgaaatgagcccttcgatgaaaaaggctttgcttgaaataccagcaatggatgtaaaaatcgatgggaaaaaaagcccgctgatgaatgcagttcaacgaacaaccgcatccctggcaaaatgctacgaaggagcgggtcgaaggattttatacccggagatggaaggataacaatggcctgaataaatatcatgtttgaaagattcaatgcatatagaataatgtgggtactcgtattttttgacttaccaacggaaactaaaaaggaccggaagatatacgcccggtttcgcaaggatattatggcttatggctttaatatgtttcaattcagcatatacctccgccactgtgctagtcgtgaaaacgctgatgtacatataaaaagagtaagagctattttaccacccaaaggtcatgtaggtatcatgtgtattactgataagcagtttggaatgatggaaatattcaggggaaaagaactggtagatgctccggaaactgttcaacaactagaattattttaagtagatagaaatgaaaaaatgccccgctggggcattttttacattgtaaaacttagctcaaaatcattaaaatcagcagcttataccaatcgcgttgttaaagagctaagctacatgataatttgaaagcaaatcacaactaacatagactgtatcaagaatttgcgctgaagttgttaaagagctaagctacatgataatttgaaagcaaatcacaactacggggatcgatatcatcttccaatgcagaagttgttaaagagctaagctacatgataatttgaaagcaaatcacaactaacaggcagaaagaattaaaaacagcatgagttgttaaagagctaagctacatgataatttgaaagcaaatcacaacactaacgacgtagaactcgtataaaaataagttgttaaagagctaagctacatgataatttgaaagcaaatcacaacaacaggtgtaaaggatgccggctgggcaaagttgttaaagagctaagctacatgataatttgaaagcaaatcacaacttcagccacaattgttgctaattcttctacggttgttaaagagctaagctacatgataatttgaaagcaaatcacaacctggtgatggatggtttaccggctatggcggttgttaaagagctaagctacatgataatttgaaagcaaatcacaacaagataggtacacgtcttgcgattgagcaggttgttaaagagctaagctacatgataatttgaaagcaaatcacaacacctgctataccaaccggataagcccactggttgttaaagagctaagctacatgataatttgaaagcaaatcacaacttggtagcgctcatcgaaacgttgcccacggttgttaaagagctaagctacatgataatttgaaagcaaatcacaacgtaagaggcagggtggtacatttcaacctggttgttaaagagctaagctacatgataatttgaaagcaaatcacaacgtcggctacgctggcaagtatcttccttaagttgttaaagagctaagctacatgataatttgaaagcaaatcacaaccgcatggaatgataccggggactaatccaggttgttaaagagctaagctacatgataatttgaaagcaaatcacaacagtaaactaaaggttaaaagcgttaatgatgttgttaaagagctaagctacatgataatttgaaagcaaatcacaactggtaaggcatgccaccccatttttgcagggttgttaaagagctaagctacatgataatttgaaagcaaatcacaacactacatcgtatagctgctgcagggtggctgttgttaaagagctaagctacatgataatttgaaagcaaatcacaactcaaaaagcattggaaagtggctggggtaaagttgttaaagagctaagctacatgataatttgaaagcaaatcacaacaataccagggatcggaatataattctaagggttgttaaagagctaagctacatgataatttgaaagcaaatcacaaccaatagcaccgaacatatcaattgacattggttgttaaagagctaagctacatgataatttgaaagcaaatcacaactgcctcaacggtcaatggcttattgatgccgttgttaaagagctaagctacatgataatttgaaagcaaatcacaactacaccggtagtgaatcgccaaaagaaaaggttgttaaagagctaagctacatgataatttgaaagcaaatcacaacagcgaaatacggtgctaaatcgaacacagggttgttaaagagctaagctacatgataatttgaaagcaaatcacaactatgtatatgtgtaccattcccattgttatgttgttaaagagctaagctacatgataatttgaaagcaaatcacaaccagttcttcttgttgtctttgttgtctttgttgttaaagagctaagctacatgataatttgaaagcaaatcacaacgcatccaggttaatattcattgatgccagtgttgttaaagagctaagctacatgataatttgaaagcaaatcacaactcgtatacgttccggacatcggcagaataagttgttaaagagctaagctacatgataatttgaaagcaaatcacaacacattgaaggatgctcctgtaggtgctatggttgttaaagagctaagctacatgataatttgaaagcaaatcacaactgtacaaggtattagcatcatcatcattttgttgttaaagagctaagctacatgataatttgaaagcaaatcacaacgcaatttgaatgcagaataaccctctgcagttgttaaagagctaagctacatgataatttgaaagcaaatcacaacaccccataataaattagtcaaattattttgttgttaaagagctaagctacatgataatttgaaagcaaatcacaacgtatgtccgggtaccatcccgccaaccaaagttgttaaagagctaagctacatgataatttgaaagcaaatcacaacttcgatattttggaactacgttcagctccagttgttaaagagctaagctacatgataatttgaaagcaaatcacaaccttgtccatatgattggccatcttaccactgttgttaaagagctaagctacatgataatttgaaagcaaatcacaacacggttataaagtaaccaatccttctacagttgttaaagagctaagctacatgataatttgaaagcaaatcacaaccagaactgatgatgttatcaccgagtacagggttgttaaagagctaagctacatgataatttgaaagcaaatcacaacgcttccagcatcgctctcacttcactttcagttgttaaagagctaagctacatgataatttgaaagcaaatcacaacacacctgaatgagtatgcgtcttaaggcttgttgttaaagagctaagctacatgataatttgaaagcaaatcacaactgtctgaccaagataatctattcataataatacttctccaacaacattttttccattccactccttcttgctttttttgccagccatttaaaaaccgggaataacaatccgaacagtcctgtcggttttgtatccgtaagaacaataagcaatgccagatgcgtaaggcttttgggaacaccttttttattggtttttccatcagtggctaatccataagcaatagctaatccttttggaaaaccttcgtgtcccggtgtaaattttatatgacaggtaaccgtctggctggtttcattaaaaaaatggtgcggtgtattgatagggacagtcatggattctcctgggcttaaaaaatgttttttatcgttcatcattacacccaatataccttttaccgcggtaaacgtttcttcaaaggcactatgcttatgcatgtaattaccaccacccggtaatacttccagttctcccaacgaatacagcccgcctgtttcttcgctggtttttaatatcgttgctttgtctttgaacgccgggtttataaatacccgctttgcctgcaattgctttttcatgttctttttatttttaaaaattagtatcatcaaaactatccgcctggtactacgcaataaatagtataattctactattgcatggttctccccactttcggggattgctccgctacctgtaattcctgaagtttaccggtgaaaccattgtacaccatttaaaccttatgtgatggtaggaaaagcgacactactgcgttccgcagaaagagtagttaactatgttcagcaatgcgtgacgctggcaggcgcagataaacgcgatgaagtattacaactatttgataatatacaccagttgttcccgcaatgggtgatctccacctgccctatgatgcacccggatattcattatgtaagtaataacggtcctcatgtttttggatataccaatgactacctgatcaatcatgcaagccctgaaaaatattttactcatattcatgaggccgatcagcaggatttgtttaaatgtttttcttttatgcatgatttcctggagtctgttccatcagaagagcaccattattacagggccgtgtttcattatcgttttagaaaagcaaatggacaatatatacacctgcatgatgaaaaggccaccttacatcttaatggatccggcaatttgtactatacattatttcgggatattaccgcggagaaggtgttcaacggcgttaaggtggagatattcatgaaggaacaaggcggactgatgaaagtaaaagagcacaaaccatccgccaaacgaaacctgctttcaaaaagagaaggcgaactggtcaccctgatcaaacagggcctgagtaccaaagaaatcgcctggtatctcaacatcagtcataatacggtgcgtaatatcaaaagcaacctgttcgaaaaatataatgtaaacaatacaatagagttattgaacatgacagggtagcaatcaatgtataaacaaaatctcccgtactaaatgatcctcatttttgtttactcgctcattcaaacaatctatttctatttatcatacctggcgcctcaaacaaaaactaagttacccgtgttgggttataaaaagatcatcctctttttttgacagatgcaaatcgtttatcggtcagtgaaaggagaaaagctttaagatctttcttctcccgtggcgttaaacccaatggttttgccaatatactatccctgttaattgaacggggtacgattttatccggctcattgtaaaaatcaattacggcctcaatcgtcttaaacattccattgtgcatataaggtgcagttactgccacgttccgcaacgatccaattttaaacttaccgagatcttcttttaaccctgttatagccattcgcccgctatcattcaaatttctgccattgaataacccgatattcctgaaatcattttgggtaaaatctgcgccgaaatgacattgactacatttaccttttccattgaagatggcaaaccctttttttaccgcatcactcacagcattagagtcatccgaaaacttccaactatcgaatgggctgtcacttgtttccagggttcgctcaaaagcggctaaggcagctgcgagattttcccggttaggttcgctcttaaagatatttttaaaataagcgctgtacgttgcacttagttgcaggcgttgcagtgctgaatcaatgtgcaggttcatttcaacggggttctcaattggggccagcgcctgatcttccagtgtttttgcccggccatcccaaaagaaaaatctttgcaataaaacattcatagcagatggggtattccgggttccctttttgccccctactccaatacttacactagatgtgtccgcaaatgcaaaaccaggtttgtggcaactggcgcagctaatagtgcggtcttttgaaagaattgaatcaaaaaacaataacttacccaactcagccttattagctggttcattagtaacagaagtagcctgaataaagagaatggcgagaacgccaattataacgatgatatactttttcattattaaattccttattttttcactcttccaagaatcaggcggctcataccatttcttctttcatcacagtcatcgcttaccggctcaagacgcagtgaatcttcattgctgaaaaagataattttataaattccctctttcccttcacagccattatcggaaaaggaaaaaatattgtcctttaatttgtagctgccgcttacgaacggcttcctgttaatatatccctcaaacgtattatcgttcttgaatacaacaccggtaatatttcctttttcagatggccttgtttcccatctgcctgtcaatttatcggaagtggtaaaagaaattagcacactcattacaaggaggatcataattgatttcataacttatttttttggtttaatgattgatgtttttttgagtctatttagcctattgataagtgtttgcattgtctactttattattcgaataaaattgaaagaaacatcgcaatactgcaatccccgttttcacaggcttacatcaccatatccgtgcatttttacttgttttccccggctgtggttaaaactgcgtccgcttcaacctttcctgaggaattgcggcagtaaaaatgcataagatgttttcgttcctgatttatgcaaacatgcctcataaaagaagcaagagcaatagtatatttgtactactaactgcagatccggttttttaacctgttagtgaccaatgcaaaaacctttagtttacaccaaggaaccaatatgaaatacatccttagcctttgtctcctcgccttaccttttacaggcctgacacaaactgaaaatccagtcgttgaaaaagattctgtactacttcttacaccagttctcatcaaaggatatgaatccacacggccgttattagaaacacctgtcgctgtggggctcatctcggccagagacatggaacgttatgccaacacttcgttactaccgtcaataaacactattcctggtgtacgaatggaagaacggtccccgggcagtttccggttaaacattcgtgggagcttactccgctcaccttttggtgtacgtaacataaaggtgtattggaacgacatgccctttaccgatgccggtggtaatacctatctgaaccttgttgatcccagtaccattggatcaatggaagtactgaaaggaccgggcggaagtttatatggagctaatacaggtggaattgttgttttgcataccgatgatcttccgttgactaataatttaagggatcaccagtttcgtgtacaattaaatggaggttcttatggcaatttcggtgaacaggctcaatggaaataccgcaataataaattaagctcgtcctttacccaaagtcaccagcaagcagatggctacagggcaaacagcaagttgcgaaaagatgttttccaatggaatggcaatacaagaatttttggaaataataagttggaatggttactactgtatagtgacatctattaccagaccccaggtggattgactctagcccagatgcagcaaaatccgaagcaggcaagacaaatcgccattgaccaaaaggccgcaatttataataagaccttatttgctggcaccagctatactcatgagttcaataagcagtggagcaacgtaacatcatttgctttctcacacactgatttcaggaatccttttattaccaattacgaaaaaagaaatgaagacaacttatctataaggagcaaattcatttatgcgatttacagaaatgaacaggatatcaggttgatagggggcgctgaatggcaatacggacatgcaggcattgataattatggtaacaaaaaaggcgtcgctgataccgttcagtcaaaagaccggatctcggtgcggcaatggttcccttttgcgcaaatagagtggcaactaaagaaaaaattattggttcaggctggcgcaagcacgaatgcgtatcaatacaggtataagaggcttactgatgctgataatgctaaaaaaaggaaaaaattcgatgagcaatttctcccacggctcgcaatactatatccttttacaaaacatctgtccacttatgcatctgtgagcaaaggcttttctcccgccacgctggctgaatttcgttcttccgatgcaaacatcaatacagcgcttcaaccggaatttggctggaactatgaattcggtatcaggggaaattcttccgacaatcgttttgaatatgatattgctgcttattattttaaattgcaacaagccatcgtcagaagaaataatagcgccggggaagaatactttatcaattcgggtggaaccgatcagaaaggcctggagctacgggcatcttattcgctgatagataatccatccggctgttttagattaataaaaatatggtccggttttactttaaacgattacacttttaccaactatattaccggtactgatgatcattccggtaaatccttaacaggagttcccgaacgtatttctgtaaccgggctagatattaatacagctcccggaatctattttcatacaactttcaatcatac

SEQ ID NO: 299 - DNA, 24302 bp, synthetic construct
  misc_feature 1..24302: note = Synthetic
  source 1..24302: mol_type = other DNA
cagagaaggcctcgttaaattcgaaaaaatctatttcatctatagttaccccagcctttgctaaggcttttggaagtgcttttgcaggcgccgtggtaaaccattttggttcttgggcagcatctgcatatccttttataagcgctaaaggttttaaacctaaagcatctgctttttctcgactcattaaaataacagcaccagcaccatcatttatcgttgacgcattggcagccgttacggtaccatcttttgtaaacgcaggtcgaagcgaaggaattttatcaagttttacatttgtaaattcttcgtctttactaaaaattaaaggttcgccacgacgttgagggacttcaacaggaaccacttcgttatcgaatttcccagcttcccaggctgcagcagatctggaataagactggatggcgtaggcatcttgatctgctctactaaatttatgttcggtagcacaagcatcggcacaaacccccatagcattttggtcgtaagcatctacaagaccgtctttttgaaggccatctattaatgttgcgggtccaaatttagtgccagttctagcatgcatataatgcggaattaagctcatgttttccatacctccagcaacaacaatttcggcatcgcctaaagcaatggtttgtgctgcactcataatagctttcatacccgaagcacacactttatttaccgttgtacaagggacagtatttggaattccggcgtaaatggctgcttgtctagcaggagcttggccggcaccagcctgaacaacatggcccataaagacttcttcaacagcattggcgtctagatttattttatcgagcgcacctttaattgctatggcacctaatttaggggcaggaattgtagaaagtgatcctaaaaaacttccaataggagttctagctgcagaaacaataacgacttctttactcataacaacacatttacgatttatacttgcgaaattaatcaatttaataggatttaggaaggaatacactcttataaacctgttaaaacgctttaatttttattacatttgatttacttaaatgtattcatgaaagactttataaataccctttataggaatcataccctgctgtataaggcattactttttatatgtaccacatttttaattgtgtatttgtttccaaaaagtggccgctttaagtacgattttgaaaaaggtaaaccttggcagtccgaaaacttatatgcgccctttaattttgctataaaaaagagtaacgaagaaatagagaaagaaaagcatgaaattaatactaatgccattcgttattttgacattgatagtggtataaaacaaaaggtttttaaagattttgaagccgcttttgaagaaaccgttccggattcgattccaaaaaaagattatcgaacgcttttaaaagaagggactaaaattttaaatgatttttatcattacggaatccttcatgaagatctcagttttaatagtcaggccacagttgttttattagaaaatagggttgaaaaacttaatacaacctattctagtttagtgaaacaagaaaatataaaacccttactaataagaactttagaagatgttaagttagaaagttacgagaaggtgtttttatctgttttctacgatgttattcagcctaatttaacgtataacaaagagtttacggaacgtgcgttagatgaagaattagggaaaatatcttatactcgtgggagtatagaaaaggaaaccttactcatctctaaaggagaagttgttgaaggcgataaatttcaaattttaaaatcgttagaatctgaatatgaatcgcaagtttggaatgcttcaaactataattggatcgtttttgcatacaccttgttggtcgcattagccttattaatgttgcttttgtttttaaggaaatacaggcgcgatgttttcgaaaataataataaagtaacttttattttcttcaacgtgttgtttatggtttttataacctctttggttgtaaattacaattcacattatatttatgtggtcccgatttgtattcttccactggttttaaaagcctttttcgatgccagattaggcctcttcacccatgtggtaaccatgttgttattggggtctatagtcccgaatagttatgagtatatgtttttacaaataatagcgggtatagtcactattttaacggtgtctgaattatataagcgtgccaatttatttatttcggttggacaaattacactgatttatattattgcatatttcgcatttttcgttattcatgaaggaagcatagacaacttaaaatgggaaacttttttaatgtttattttatgtggattggcgacactttttgtacaacctttaatctatgcttacgaaaagatgtttggtttagtgtctgatgtctcgctgttagaacttacagataccaattcgaagttattaaaagaattagcagagaaagcccctggaacctttcatcactgtttaaacgttgctaatttggctgaagcatctgctaacgaaataggagcaaatggtatgttaattcgagttggtgccttgtatcacgatttaggtaaaatgaagaatccaaccttctttacagaaaaccagtctacaggaataaatccgcacgatgagttatctccaaaagagagtgctcgtataattatagatcatgttttacatggaattgaaataggaaagaaaaataatttgccagatcgcgttatagattttataagaacgcatcatggtacaagtgtggtgtattatttttatatgatggaaaagaaattgcatcccgacgatgtaaatattgatgatttcagatatcaaggtccaaagccttttagtaaagaaacagccattttaatgatgtgcgatagtgtagaagcggcctcaaaaagtttaaaagaacccacgtcgacaaagattgatgaatttgtagaaaatattataaataagcagatggatgaggggcaattcttaaattctaatattacgtttaaagaaattcaatctataaaaaaagtgctaaaactcaagctagcaaacatttaccatttacgaatagaataccctgaataatttttataaaaaaagattaaaaaaggttgtgaaatctaataacaaagcttaaatttgcaaccgcaaaaatattgcaacgttcataatttttaggagaggtgccagagtggtaatggagcagattgctaatctgtcgacgggtaactgtcgccagggttcgagtccctgtctctccgcaattagtctttaatataatatcgggaattaaagagtttaaaatacatcttcggggtgtagcgtagcccggttatcgcgccgcgtttgggacgcggaggtcgcaggttcgaatcctgccaccccgacaattttgacatattgtaaactaaaaaagtattaaatatattgattatcagttatttaatattttttagtttcaattgttttcaattgaaactaatggttaatatgtcctatagcgtgtcctatttttaggatgtactttcgtataatagagtcctttagggcttttctaagatttgactttcactttaaaatatgtctaattaaagtgaaatgtaatgaaaactacaaaatcattcagtgtaaacttttggctgaaaaaaagatcaattaaaagcaatggtcaaattcctatttatgcgcgtattttagtaaatggtattggtgctgatattagtgtacaacgtactacattggaatccaattggtgttaccaatcctttagggtaaagcctagattaaaggacgctaaatctattaatgactttttggatgggatttataccgatttattggaatgtcataaacaattgtgttccgaaggtgttccaataagttcccaaagaattaagaaacgctatcttggtaaggataaggttatggaaaccctagatgatatccttgaataccatagaacagtggaatcgaagaaattgactccagggactttaaagaactatactgcaacagaaaaatatttaaaacgttttataaagcaaaagtatggtggttctgatatccaattgccctttattgattacctgtttgtaattaaatttgaggattttcttcggacctgtaaaccgctaagagcatcacagtctctaaataacaatggggtgatgaagcatatggaacgcttaaagaagcttattaatattgccatgaagtttggtggttataagtgcagtccttttagtttttacgcttttaagtatgaggattacgatagtgtgtttttagagtcttgggaattagaaaggttaaaaagtgttagtttaccttctgtacttttaaaacagataagggacttttttgtattttcttgctatacaggactatcttatgtagaagttaaacagttgagaaataatgatatagtggaaggaattgatggcgctttatggattaatgtaaaacgacaaaaaacaaagacacctgttcgagtgccgcttttgccacaggccttggaaatattatatagatatagttgttatggtaatcaaaataatgggtttaggctgtttcctatcatttctaatcaaaaagtcaatgataatattaaaattctagctaagatagcaggtatttccaaacatctgacttttcatgttgcaagacatacttttgcaactaccattactttgctcaacgatgtgccattggagacggtttcaaaattattgggacataccaaactttctactactcaaaaatatgctagggtagtggagaaaaaaataagtaaggatatggggaggttgaagcaggtattaatagaaaatgagaaaaaaaataaaattaaaaagtcatcgtttgaacctgttcccctacgaattgtttaaatagttgtaaaatttggaattagagagccacctttgttggacaaatgaggatagttaaattttaggtaagatattatttaataatgatattttttacatttgaggtagtgttttagttagccataattttatataaatgcctttaagtagaaaacgaaagaaaaaaagaagactaaaaatcctagaaagaaaagctataaaccttatgaagttgttaaacaagattttattaggtttgaaagcccttcttttggtcaagatttatcatttgaagaaaggttgggtgtttttttagaacttggagcagaagccaataaaaggtttgaaaatgaatatgttgaactgcttaattattttaaagaatatgatcctctatacttatgttcattttgcgcctattattttacatccagtgaagaggggatagatgaggaagcaataaaaggatatttggaatttcctcaattctatgtagaaattttacaggctttttctttaatggctgaaagaactatttcggctaaaccattacatgaaaaagttgaagacttcaaatctttagttcaaaacctcaatcaaaatcaaagcattgggtattataaactcataaaaaatatagaacaaaatgaaaatgggttaaatgaatttatacttagagccgatatgatgctacatactttagctgttagaaattgggcttatgtaggtcaaatgaaaacaattaatcaagaacttgcttttcttatttctgaggattttaaaagagttattggatttaattcaagtgatttcattgaagttttttctgggttggttaacttaatagagaataagttcaatgctcatagaaataatacacgtctttttatacaacagaaaaactataatgatgtttttaatacctatgagaaaagttttgattcagtagagaaacagggggaaaagcaaagagaacaatttagggaaaagatagtaaagaatctaaaagcactaaaagtctttcttttagaacattctgatttattcttgtctgatatatttaccctgaacattgaagaaatctttaatcattttgaagggaaatataataaagttgatattgaatatatgctagagaatttaagtctgtcctttggagaattgtctgaaattaataaggactttgtgtttcttgataatcctattcattctaagcctttcattaaaactgaggacggatacttttcttcaataccgcatatgtttgaccatctaggagtaagtcttttagaaagcttaatctggactgatgttaaattaaaaaacatttatttagaaaagaaaggtaagtatcttgaagaaaaggttgagctattgtttaaaagctccttccctaacgcaagagtgctttcaggtagtaaatggtattgtccaatggataagaaagattatgaaaacgatttaattgtattaattgaagaatttgcaattatagtagagtgtaaatctggagcaatttcatcttcagctaagagaggtgctcccgataggttattcagaacaatgaaagatttggtgatttcaccatctgagcaagctattagatttcaaaattttttaaagaacaatccaaaagaacacttatttacaactaaatcatcagaagttaaaaataaagttgattcttcaaaaattaaatactttgttccattaggagtaacattgtcacatttaggcaatattggatgcaatttaaaaaagttaataaaagcaaatgttgtcagtaataaactagaagaattagctccttcaataagttatactgatttggaggttatttttgaaatattatcgtcacagtctgagaaaattcattatttgtcaagaagaagagagtttgaagcacatgttgaatttaatggagatgaaatagatttatttgccttttacttagataatggttttaatattggagaagtggaatacaatgatacaactcattttgattttacccttaaatccaaagagctagacccatacatgattggtaaacatagaggagtagaagttaaaaaacctattcttaaaaagactaaatattggcaagacttattagataaaatagaattaagaactaaaaattggctaattaattcttttattcttttgaacttaccagaacaagaccaaaaggaatatgaaagaaacttgaaaattctgaaaaaaagaatccttgatggaaaggttgaaaagaaatataattacatgttaatgaaggttggagttgaaagaagacgttatacacttgctggatttccttataaggacattgataaagtaactcgaaataatttaataaatgatataatcgcagaaggcttagaagatgagaatagtagaggagtattggttattggatatgaccttaattataatcattatccttattctgttatagcaggcagttatgagtcaaatttatttgatgatttgtcctaaattttatttaattactgctgttcttattcaaaggattcaaattaaagagaattgtataaattagctttcgatatggctaaggagaggaagtttaattacgggataggttacattttaactcaataaagttaggatttaagtgattttaaaattgaatttctatcgataatttaaaatttattttttaattgaaggaaccaaattaaaaaaatatcaggttcagatttatcaagtgctggggatgactttcatatattatgggcaatcaaaaaatctcttgatttattaaattttgattgaaaggaaatgggttttgtactaaaacgaaaacaaatcttaaattttattttaagaaaggaatatattatttttatgcttataggttagtctctaagaactttaaatattaagttttttataattaaaaggaaccctatttaggtttttcacgaataaaaggcttggttttaaagtgctaagaccgtttttccgtgaaaaataaatctagatatttccaaagaggcctgaaaagccttgtaaatagggggattgaaaccgtaaaatcgctttagcgtgttaccctctggcttttttcctttatacaaaattatgtgtgtttaagattgataaatacaaataaaatagaaattaccatttttttatttctttaacttatatatttttagagtattacaattggaaacttaaaaagctatgaaaattttctcctacttaattattgcctttattaccattacgataggttgtttcagtgatgagaccattccaccaattactactgaaaatactttttcctgtaggattaatgatgatgtgtttttgcctaaggatcacggttcattgccagtgattaaaagggtattagtgtctttacaagtgaaaatgattggatttttaactttcaaaattcaaaattcaaaatctcaaataaaattatacttaaaagacgttactcatacaggtacttatgatttaagtttaagtgatggaaataaagatctttatgaggaagatgggaataaaatggttgttgatttggctactgaaataactcaatccacccattttctggtaaaataaaagtattggaattgaatgaaaagaaacaaattcaattaacatttgataatcttaaactacaggatttaaatgatccggttaaatacatcttattaagctcaggtaaattgaatattaatttggttactttgaatgctgaatctgaataaaaactgccttataaattataaggctaggtcatttcattaataatctaaaatttttatgtcataaattttaatgtttacttacttaccattttatatttgattccccttatatctgcaattaatttataaccataattctaatccttatttaccatgagaaaaagattacttttattgctaatgcatgtgtttccagtattgatttatagtcagacttatactgattatattgatgacaaatttcagttattaaacaaatcttatgtaacaacggatattctttatgatagggtatttaatatgtctgatttaccatcatttaatcaaacttcgaccgacaattccagtgtacatcatttttataggcttatgctgaactacaaatttctgattatttaaatagatggcaagaattatcagatcttcaaaatgatgtaaaagaataatttcttcaaaataaaattgcgattggtataattaacactgaatatgaaataattgatgaaaatgctttggttgaaaatttatttgatctttcaggcagcgatagtttatttgtagatgtaagcggtagatcaagaagtccatatttaaaaaagactgctttagtattaagtccattaaaagaaaatagcaatagtacttctgtaacctttgtaacaggtagtgactttactatgcagtcttccagtacaactatcacaagtcttcaagcagattttggaaatggacaaggatatcagactattccattgagtggtactaaatctattaaacattatactgcaggtatatacaattttaaatttaaagaatccttatcccatgggactacgaaatatacctatgggaaaattggaattaatagtacagaagtttaaagagaaatatatatggaaaatagggttaaatcaaataagatgaaaaatgaaaaacactggaaattaagtggttaaatttgaaaatcccacggggtacgcaggatttaagatttttcttcggcttatagccttattatgaattgctttcagttagtaaatatagaaaaaataaagcaattcacaacatacaacttgtgcaggttcaatttaaacctgtacaaaagtataaaaagagataaatctattaaagatcagaaaatgggtttggaccaccaaattcaattatttgtgcacaaataactttctctctataagcaaagaaagcttttattttcaaatatacaagttgtatagaacctttttttaattaaatttgaatgataacaatcttgaagataagatttgaagcataaatcttcagatatttaaaaaaacaaaacacgcattatgaataacttaactttaggaatcgaccttgggacaaattcaatcgggtgggcgataagagatgtatcagcatccgaaaatcaaattattaaaaatggcgttttaattttcgacaaaggtgttggtgaagaaaaaggtgtagaatttcctaaagttaaaaagcgtacagaaagtaggggaaaacgaagaaattatcaagctgaaaagtatagaaaatgggaggtgcttgaatttttaattaataaaggcatgtgtcctttaagtattgaggagttggaccaatggcgaaaatattcaaaaaaggataaacgtaaatatccgcaaacggaaagatttattaattggcttaggtttgattttaatggcgatggtaaacctgattttaatttattgggaggtgataaacatgaaagttactatttatttagggcgaaagctataagtgaagaagagaagaataaaaaggtgtttcagaataatcctgaaattttaggccgtgttttttatcaattagtacagagaagagggtttaaaggccgcgatgaagaggaagcgaaaactatgcttcaaggttcaaaagatggagcgacaaaaggtagagatgaaatagcagattatatagaaaaacatataagtttaggggccgcgctttactattatcaaaaggataaatcctctaattatgaaaaaataagaattcgtcaacgttataatttacgtaaagattacgaaaatgaattaaaagaaatttgtcgcgtacaaagtttaaacgaggacgattataaaaaattatataaagcgattatctggcaacgccccttacgaactcaaaaaggtttggtggggttatgtacttacgagaagaataaacgtcgagtgccaataagtcatccgttttatgaggaatatagaacatgggtatttattaataatcttaaaattgaagctccacagggggaagatttagagaattatcttcagaaaaaaatatatccgttgtttttaaaaagcggtaacgattttaaattgaaaaccgttctggatagaattaatagagatggggcaaaaatacattccaaatttagtgaaaggccagatacaaaagttttatcggctaaactactaaaaaagctagaggatattttaggcgaaaattggaaagaaaattatagttggaaagcttcttttgagcgtcaagcacagcccaaaaagaaactaaataaagattatacaattgaagatatttggcacgtattgttcacttttgataatgaagaaaaactaaaagagtttggaatacaaaaactaggactttctgaagaacaagctgaaaaattttcaaaaataagattacagcaggggtatgcaacgctaagtctttcagcgataaaaaagatacttccctatctgcaaaaaggatttatttattcaaaggctgtttacatggcaaatcttcaaaaggttttaggaacgcacgaagtatctgaaaattttatcaatcattttgctcatgaaattgatagaatttatgaacatgcttctacagtaaaacaactcaacaatgttttaaatagtctttttagagcagaattggttgctgagggtgactatcatctttcggaaaatgaagatttggatgtctctgatttagattcgattcagcaaaaaattattgaaaatttaggtaaaaaaacttggaaggagacagatgatataactcaaaaaaaatatctagattatgtaaaaaaacactttaaggagttcttgcaaaagccacttcaagccaaaaaaggtgggtttatggaacagcctagaattcatgaccagatttttacatatttacaagaacattatcctgagcaggtgccaaatggaaatatcaagtttttatggcatccttccgagcaagaaaagtaccctaatgcgtccgattatcaagaagtttccttaaagaataaaactatttatattaaagaaaccgaattagatagatttttacataaatacccagaggcagaaaccgagggtatttctttaaaattattgggagacccagagcccataagtaaaggctttaaaaatccaatggctttaaaaagtttgcataagctaaaacaattattaaactttttattgcaaaccaatcaaattgatgctcatactcgtgttgtggttgaaattgctcgagaactaaacaatgccaactatagaaaagctcttgaaaaatggcaaaatgaacgtgagcgagaaaacgagtcttttaaaaaacgaatagaggaaatcaataaagaatgtagcactagttttgatgttaatgataaatcgctattgcgcaaaattcgtctttgggaagagcaagataggaaatgcctttacacaggagaaaccattaatatgtgcgatgtacttaatggggagcattacgatattgaacataccattccagcaagtatcagttttgatagtgagttaaagaatttaagtctagcaaataaagatttcaacaacctgattaaaggaaaaagatttccttcacaacttaataattataaagaagcttcaacttttaatgggaaatcaattgagcctgttataaaaaatattgaaagcatttttggaaaacgaactttttacaaaaagaaaataaaaaggggtaaagttgaaaaagaaatagttgttgaaaaatgggctaaaatagctgatttagaaaaacagttagatggattaaaaaatctaagttatatagataataaagacgctaaagattataaaattcagcaaagacatctcttaaaattcaaactggattatttaaaacaaaaactacaaacttttactattgaagaatataaagcgagttggaaaaatagtcagttacgagatactcaaatcatgactaaatacgctgtgccttatttacgaactgtgtttaatcgtgttgaggttcaaaaaggcgcagtggtagatatttttaaagaagtttttaatgttaaatttttagatgataaaaaagaccgaatgaaacacagtcatcatgccatggacggtgctatattaacgttaatacctaaaccagagcatcgtgataggatcgttaaggaatatcaacttaaaaaagaagaaaactttaggtatatacatcacgaacaaccgatagattgggaagactttaaaccttattacattaagcaaattgaagaagaatctcttatcaataatttaactgagccacggactttaagccaaacctttaaaaaagttaggaaacgtggtgaggtagattatataaaatacaaagatgaaaaaggaaaatggcaatacaaattagatgaaagatataataagattaccaagtgggcaaaaggagatagtattcgcggacaattacatggagagtctttgtatggagctataaaacaagccaaacgtaatgaagataataccattgtttttgatgaggaaaagaacatggtattagaagacgaaatcaaacttgtcgtaagaaaaccactagtctacgctaaagatgctgcttcaccaggttttaaaaatttagcagatgttgaaaaagttattgtagataaagctttatttcaaatgattgcaaaacaagttgaagaagcgggaagttttaaagatgctttagaaaaaggtatttatatgctggataaaaagggagaaaaggttaataaaataaggcatattaggtgttttgaaagattaaaacatactactgcggtaagtccacatacacatgattttgcttctgataaagaatataaacaaaccacttatgcgcaaaatggtgaaaatgtattttgtcttttttataagggtaaaataaaaggaaaggaagaacgagctattaacattatcggtatttacgatttagcaaaaatgaaagatagtataaaagaggaaaaagatttttttgaaattccccattttaattctattcaaaagaaaaagtatcaacttccactatatactgttttaaaatcgggtcaaaaggctgttttttataaggaaagcttagaagagttaaaagagcttagtgataaagaactttctgaacgtttgtataagatgtacatttttgaaaatgatggaagaataagattaaaacatcatttaatttcagggagcaccactgatatcaaaaaagagtataaagaatcttcctcaatgaattttgcagagtacactcctcttttaagaattacagcaaatggctggaattttgctattgaagaaaaagattttgaaatgaatttagatggttcaataacttggaaattctaaacaatgataaaacgtactctcttcttcggtaatccagcctatttaagtacaaaacatgagcaattggtagtcaactttcctgaggacgataagaaagaagtgactattcctattgaagatttagggtatgtagtgttagaagatccgcaaattaccattacaaatggtttgatgatgaaattggtacaaaataaaaccgcagtaattacttgtgataaacaacatttgccttgtggttttttacaaccattagtggggcatagtgaacaaacccaacggatacggtatcaattgaatgcttcggttcctttaaaaaaacaactttggcagcaaacggtaagtgctaaagtcgataatcaagccaatcacttgttgcaacaaggtaagcgagcattaaagttaaaacgttgggcaaaggaagttaaaagtggggactcaggaaacattgaagcaattgcagcggcctattattttcagtcattgtttgaagaagttgacaggttcagtcgaaaccaaaaaggcgtaccacctaataatttgctgaattatggttatgctattttaagggctgttgcagcaagggctttggttagtagtggattattaccttcggttgggatttttcatagtaataagtacaacgccttttgtttagccgatgatgtaatggaaccttaccggccatttgtagattctttagtgtttgatatcgtagaaacaggttgtaatatagaagacttaacacaatctttaaaagcggaattgttatgtattcctgctatggatgttataattgatggcaaacaaagtcctttaatggtagctatgagtaggacaacaaatagtttgtatgagtgttttgcaggtgtaagtagaaaggttatgtatccggagtttacttaaagcgttgtatttgttctgatgttttggttatgaaagatgataaattttcaagattaaataaatatagaagtatgtgggtgttagtgttcttcgatttgccaacagaaactttaacagagcgtaaagtagctacacgttttcgaaagcagcttttggatgacggatttaacatgtttcaatttagtatatacatgcgattttgtgcaagtcgtgagaattcagctgtgcatattaaaagaaccaaaatgaatttacccaaaaaaggtaaggtgtgtattatgcaaattaccgataaacagtttggaatgatggagctatttcatggtcaaaaagagattgaacaggaaccaattagtcagcaattagagttgttctaggattgttgaaagtcagataatcagttattagaaattaaagaatagtaaatatttttaatttctaatattgtggttaataaacaggataccagttgtttgtggttggtatcctgtgaatcatctactaaaatagtaatctgaaagcaattcacaaccgtaaccatgcgtaacctattaagcgaaacctgtgaatcatctactaaaatagtaatctgaaagcaattcacaacccaagcaatggaacctgttttacaacttttcctgtgaatcatctactaaaatagtaatctgaaagcaattcacaaccagcataaaggtttttagttttcggctgttcctgtgaatcatctactaaaatagtaatctgaaagcaattcacaactaatacgttgattggccgcttcacctagtccctgtgaatcatctactaaaatagtaatctgaaagcaattcacaaccaaccagacctctattttatccgcatcatgcctgtgaatcatctactaaaatagtaatctgaaagcaattcacaacgcctaatgttttctggaaatgtggcaaatcctgtgaatcatctactaaaatagtaatctgaaagcaattcacaacatttacaccagctggacttaagaactcgcacctgtgaatcatctactaaaatagtaatctgaaagcagttcacaaccataaatttgattaaaaaagaattaggaagtcaacccctaaattttcttaactgctgtatcggaaaagccttctcggggctttccgcgattcatcataaaaattcaggacttgtcaaatcattttaaggggtttataatgtttgaggcctttgttggtttttggtacaacaaaaaccaggcatagccaaagccacttctaatttgaaattttaaataccccatgcttaactttccgtacacctgtggtattgaatatttcaaaagaagggctaaggctatagtagaacttgtcaagaccaagtaaattttagcaaaacttaaggtttctacagccttgaaaatccaaggattttactacgtagcagacactcctgaactttcactaaaagccttgacaaaacctacctcaaacatggttctcttttagagagaagtatacaaagcaccccttaaaatttacatcacattaaaacttaaaaactaaggggtatttattaaccttttaaatttttcaatcatgagtacaattaaaaacagagtgcaattaattggtaatgtaggacaagaaccaagtattaccattttagaagacggaaaaaagttagcccgtatatcattggcaactaatgaacattacagtaataagaaaggcgaaaagcataccaacaccagctggcataatttaattgcttggggtaaaaaagccgatattattgaggaatatgtgtttacaggaagagaactagctattgaggggaaactatcttctcgaagttatgaagacaaagacggcgtaaaacgatacgttacagaaattacaattagtgaaatccttcttctaggagcctaattttaaataaaagggtgctccctttatcctagcacccttttttaattaacgtttaaacttttaaatccaaacatatgaaaagcaaagttaatgaaattcaggtacgttataaagagaaattaaaagcttctttttcaattggttgctcgcaggatgcttgcaatatattatatgataactgggataaggatactataggattgcacgaatcttttaaaattcttcttttaaataattccaacaaagttaaaggggtttatgaactttcaacgggaggaattaccggaactttagtagatattcggatcctgtttgccatagttttaaaatcggtgagtactgccattattttagctcataatcacccgagtagtaaattaaaaccgagtgaagcggataaacagattacacgtaaaattaaagaggcggccacgtttctagatattaaagtattggatcatataattattgttccaaatggagcgtattatagttttgccgataatggtatcttataatttataattttagtattatactattaaagcctctggtttctccagaggtttttttatgtcatagttttcataagttaaattcaaattgcatttcaaattgtatagattttgaaaattcatatggtttaattttaaatcagtgtaattgagaacaatctagttttttggttttcttcataatataataccttgagacgaacgcatacggtgtaagatctcaattattttgagagttaaaagtgtatgaaaattttgtccctacgggacgaaatcgaatagcaagagggtaacacgctgcgcgatgttacggggttcgatttcgctgttatccctttgtttatagggggttgttagaatatggtacatggcagtaatcttggttttttagtaaaaaatcagttcagcccagtaaaatcaataaatttttactaaaaaatggatgaggggtttgaaaaagaaaggtttgtaacatttaaactgaaatcttcagtagctaggaagtttagacggttctgtaagcattatggaaagtcgcaatcgcttagtttactagatatgattttattttttgaaaccaatgagattagtccttctgaacgttttggggaaactattacgagtttaaagtttcaaatgaaaaaacgttttaacgcccttatagctattataaaatcaattgaaaaacaacaaacagaaccgacagctttcttaataaaacggttatttgaagttagtgcacaacaagaaaaagaagatcaaattgaatttaaacctcaggagcttattacagaaaatgaggagctagagtattatcaaaagcagtataaggacagtcagaaacactatcagaatctcaaatcggacacccaattaatgcttgaaaaattgaagtatgtaaggaataattttggggtaggatattatcgactcaatttaagcaaagaagatatagaacgcattaaaaacaatatagatcatgtacattacaataaccgcgcagaaaattggtgagagttatagtagttctgtatctgattttgtggcttatttagaaaaagagaatgagaataaaccgcttgaagaaacggagtacttttttaatcaacaaggtgatgaatttctagctaaagatgttataaaagatattgatgggaatacatccaaactgaagaaaaatgaacctcgattttattccataacagtaaatcctagtaaatcagaattaaaacatattaaaaatgatactgaaaaattaaaaatgtataccaaaacgattatggaggattatgctaaagcgtttaacagagaaatagaaggaaaacccatacgtattcaggatattaaatattatgctaaaattgaacatgagcggacttataaaggcacagataaagcgattaaggaaaatgcaccttactataaagaaattgtaaaactcaggaacgatatacaaaaaatagaaagtggtaagctagtcggggatatagataaaaagcacaaacaaattaaaaatttggagcatgaagctcctcataaaatcaatggtataatgattacacaaggtatggctaaagtaggggagcagtcacacattcatattattgtaagtcgaaaggatcaatctaatcggtatagtttgtctcctggtagtaaatataaagcctccgaagtgaaatttaatggtaagaccgtaaaacgtggatttgatcgggaccagttttttggacaggcagaaaagcgttttgatggacagtttaaatatgatcgtaattttgtagaaacatatcagtcgaagaagttattaactaaaaatccacaacgttattatgcctctttaataggcttaccaaataatgaaaaagctatcgcttttaaattattatctcaggctggggtatctgttcccatacttaatgttccaactagtcagactcaattggtacttaaaaccataaataaaatgaaacagggaataacaagagcgctgaattctggatctatttctatatgataaactcactcccacatatagttttatttgtacttatacctgcactagtgatgctaattttactatatataggtttgtttaaatcagaatctaaagctttagataaaaagtatagggttatctttaaattaaactcaggtcgttttaatatagaaaatattaaacgaggtgtttccattatcggatctgcaggaagtggtaaaacggaaagtgtagtgtataatttattgcagcattttagtaaatataatttttgtggagttattcacgattataaacattttgaacttactgaaatagcgtatccgctttttaaagcacagtcagatttaaacttttatacggtctcttttgatacaatatataataaagttaatcccatagcacctagatatctgccaaacgaagaaagtgtgaatgaactttctcgggtactcatcgaaaatttattagaggtacatggtgagactaatgcgacttctcgcttttttaatgatgctgttgaaggtttgttagcaggcatgatctggaaaatgaaaaccgattatccgaaactatgtacgttgccacatatcattgcgttgtttcaaagcttaacgactaagaggctaattgcttttctaagtacaaatttaacggctaaaagtatggctagtgcttttataaacggcatagaatccgaaaaacaaacagcggggataaagagtacgttatctaatgcttttaaaaaaattagctcacacaaaatatttatggtgttatctgaagatgaagtgcctttagatatcaattcagatagaaatccttcagttatatctgttgtaaataatccgaaatacgaatctgcatacgcacccatcatagcgacaattatgcatactattgtgaagcagatgagtgaacgacacagaaggtcctcttttgttttgatggaggaagctcctactattaaactattaaatatgccacgtatacctgccactttaagaagttttgatgtgtcaacaatttatgtgatgcaggataagattcaaaatgatattctttatggagataaagcgagtaaagcaattttgtccaatctctcttatcagttttttggaaaagtcaacgatccagatacggctaggtattatgaacattttttcgaaatgattaaagtggcaacaagaagtgttagccaaaatagtggtttaagtatggagagtcgtatcacaaaaggggaacgcgaagtatctaaacgtcgtgctagtatattttttagactgaaacaaggtgagtttattgcttttgctgatggtaaggatagaaaagtccgccttaagtatcaacgtattataaaagccttacccgattgtacagaaaatgtaactgaagagcaattaaaatttaattatgaaaaggtttacagagagataggatttattaatgggtgatgaactttattaaacgaagttatatatgttttgagttaaaaaagtttaaaggtattaatctttggcaaatattatgtaatttgccaaagattaattaagaactttacacattgattgatacattaaaagataaaatagaatcttattttaagaaacaatcaactatttcaaaagagaaattggttaaatgtattattttagattttcctgaattaaaacaaagcactataaacgtgtatttgtcacgtttaaaaaaggaaggacttattaaaaatcccgcaagaggcatgtatgctctaaaagaaaaaaaagcttacaatcctgttgtagatagtcatttaaaacgcttgttcaataaaataaaaaaagactacccctttgcagcgttttgtatttgggacaccaaatggttaaatgaatttatgaagcatcaaccatttaaattctatacggttttagaattagataaagatgttacagaagctgtatttcatgagctgaaagatcaaggaaaacaagtttatatagaaccagatgcagaaacgttcaatctgtatataaacaatagtgaagatgttattattttaaagcatttaatatcagaagcaccattgcaagaaataaataaaataacgctgccaatgctggaaaaattattagttgatatgactattgataccaaactttacgcagcacaacaaagtgaaatagagtttatttacgcttctgcatttgaaaagtatgaggtaaataaaaataaaatgaagcggtatgcatacagacgaaatagagagaatgaagtagaaaatttaacggatttaactttggcaaaaattaaataatttgccaaaacataattacgaatgatagaaccaacaacataccatccagattggatttatgaagtcaaaagtaatttaggaaaaaagaaattagatcctaaattaattgagaaggtgatttatgcattgctgtttttagaacaattaaaagtaaacggattagaatttatttttaaaagaggtacggcattattactagcaaccaaaatacctaaacgattttcaatagatatagacattattacagagcaaacacaaagtgaaatagaaaacattttagaaaagattagtaaaaataaggtgtttacacattgggaagacgacaacaatagaaaacacacacaagatgcaccaataggacattttaagatgcattataccagtaatgtagatggtagtgtagaaccaatactattagatgtattatacacaccaaatccatatccggctcttatggaaattcccatagcgcatgattgggtccaaactacaggagaaattattacggtacaaatgccaacttttgatgctatattaggagacaaattaactgcttttgcaccaaaaacaacaggaatattatatagtaaaaacagacccgtagaaatcataaagcaattgtttgatgtggcctttttaacagataacatcacagatttaaaaacagttcaaaatagctacaacaaagtagtggcagaagaaattaaattcagaaagttaaacgtatctgccattcatgtattagaagatacccaagaagcttgctacatattagcaactagagatgtcaaatcagaagaatttaaacatttacaactagggattagtaattttacaaatttcatcattacaaaatttaatattgaagaagcgattacagctgcagccaaaacagcttatttagcagaagtattaaaaaatgaaatagtatcagatttagaaaaatttaaaagcccaaaacagattaaagattggactattgaaaaccaacagttcaataaattaaacaaactaaaaaaaagcaatccagaagcatttttttattggtataaatcaatgtataatgattaaaacaaaattaaatatatctaatatagggccttttttaagatggacagggtctaaaagatggtttgtaaaaaagcacatagatgattttctgccaacttcattcaataattatcacgaaccttttttaggtgctgggtcagttttttttcatttaataaacttagatataaatagagaaaaagaatattatttatctgacactaataaagatttaattaatacttatattcaattaagagacaatcccaatgatgtcatcaaatatctaaaaaaattaaaaaacacttctgaaaattattataaaattagaaatgagaatccaagaataaatgaaaaaagagcggcacgattcatttacttaaataaaacatcttttaatggtatttttagagtgaatagtaaagggaaatacaatgttccatatggaaaacaagaaaacgttaattttattaatgaagaattattattgaatataagtataaagcttaaaaatgttataatccgaaatgaaagttttgagaaaaatctggataatataaaaaaaggagatttggtatttatagaccctccatatactgttgctcacgaaaataatggcttcattgagtataatcaaaaattattttcttgggatgatcaagaacgattaaaagtttacattgaaaatattattaatcgtgaagcattttttattttaacaaatgcatctcatgtttctataacaaaattatataacaaaattgggaaaactaaaaagttatccagaaatagtcaagttggtggtagaaataaaacaagaggaatatttaatgagttaataatttacaatactagatcataatacatgagtgaaaataagctaagaattgcaattgtaagtgatttacattgtcatccaactaaagttggagatagtcctagtacatatttattaacagataagttacgctatccaacgaatgatcatccagtagagagtttgattaaaataataaataacgaagaaagtaagctaaaagttgatctaaccctttgtccaggagacttcacagataaagcaagtcttcaaggtttaatatctggctgggaattttctcttgaaataaaccgagaactagaatcaaaaaacattatagctactattggaaatcatgatgttgatgtatacaaaaacaatagtaaatatagttctgaaaatgtaaggggtgtaaaaagaggttttccaattaaaaaggaagcagatagggatatattttggtctaaagggtgcgtttttattgaagaaaatgaatacagaatactagtg

SEQ ID NO: 300 - DNA, 24263 bp, synthetic construct
  misc_feature 1..24263: note = Synthetic
  source 1..24263: mol_type = other DNA
tcaatagtctctccatcatcattttctacttctacagtatagtcataagtataatatagagtaatagcagcgttattaaaatttaataatgacatattaccttctcctgtttgagaatttactttaaagtataatcctcgaaagtaatcttgaaaattagcattgcttaataaattagaagttccttcttgatttataataacatttgtaaagtaatctatgatatcttctgaaaacttaactcttaacgctggtgcagttcttgtaacttctatttcttcagttggctcgccgtcttcatcttcgaggggagctgttgtaataatttcttctgcagaaggaacaaaattttcatcagtatataatgcattggtctctatattttgttcaattacatcaccttgatcgctataataaatttgtggatcataattattggaaggatctaaacttcttaggtagtaattagacctatgaatagaaaagtttataggttcatttccatatacagaatctaactcataaatagttttttgtccgtcaatatctattactgtactaaaataaggtatattaagcactacgctatccaaaactggatcgtcgccaaaagacgggtctggggtgtttaagcttagttggcttaaaatattagcttccgtttttccgtaaatttcatcactatatgtacctaataaaaatacattagagttattggtttgaactcgatctacctttgcactaaatgcatcgatttcagtattctcaaataaaagcgcattgaagttgttgttattaactaaatctgaacctacttcactaaaatcctgctcacaggctgtaaaaattgaacttataactagcgttaaaacaaaaagattaattactctttttacagcgcttccgttttttttcatataaattattcttctttttcgtttaatacttcttgtgtataaaagtcttggtatgcttggccaaactcttctttagatttatagcctaaggtcggtttttctaatttgcttatatatttctctaattcttcaggtatttcttcacttccttgaataatcgcatcagagttatcaatagctgttttcatgatattgatatagctgggcgtgtttaaatgattaaccgtatcatcttccaaaccatcaaacagtacttttttcttcatttcttcatctaaagtatcttcaaagcctttgtcataaaccgaggtaacaatttttgaagctttaaataaaggttcattaccataataatttctaagatataatggaagtaaagaagccaaccagccatgaacatgaataatatctggcgcccaatttaatttctttaccgtttctattactcccttggcaaagaaaatagctctttcgtcattatcttcaaagagtttgccatcttcatcggtaaaagtagctttgcgcttaaaatagtcttcattatctataaagtacacttgcatacgctctttgggtatagaagctacttttataataagcggcatgtctaaatcgttaattaccaaattcattccagatagacgaatcacttcgtgtaattgatgacgtctttcgttaatattcccaaaacgtggcataaatatacgtatttgaccaccttggctattcaccattctcggtgcttcaaaagacatagaggatatttctgtttccggtaaatagggaattacttcagacgatacgtacaagattcgtttatctttcataaatagctgtactctttgtgttagtattaacgataaaaaacaggcaaaattacaaaattttatgcagtttcccagtattatattaattttgcacgagctaaaaaagagcaatttgcaactatatcaagaaaatcaaccgcttcaagctgcaatgctgaagttaaaaaataacgctcaaattgtaggtcttatccctactatgggggcattgcacgaaggacatttatctttaattagggaagcaaaaaggcaaagtgatgtcgtggtggtgagcatttttgtaaaccctactcaattcaataattcttcagatttagataaatatccccgaacccttgaggaagatttaaaattgctgaaacaaaattttaaagatttaattatattttcccctaccattaatgaagtatacggagaaagcattacttctgaaaaatttgagttcggcaagcttgcccatcaaatggaagggaaataccgtgacggacattttgacggggttggcaccatcctaaaaaagctctttaccattgttcaacctgataaagctttttttggagaaaaagattatcagcaattactgatcgtaaaaaaattaatagcccttaccggccaaaatgtagagataataggttgtcccattagtcgggaagagaatggtttggccagaagttcaagaaacaaaagactctctgaagaagaacaagaaaaagctacttttatttttaaaaccctgaaggaggcgaaagagaaatttggcacaaaaaatgtcctattattaaaacaggaaatagaagaaaaatttaaccaccaagcatttctagaattggaatattttgaaatttccgaagcagatactttaatccctgctacccaaattgaagaacataaaaaataccgcgcatttgtagcggcttatgccaacgatgtaaggttaatagataatatcgcactaaactaaagactgtaaacaagtaaaataaaatgcaagtacacgttgtaaaatctaagattcaccgcgtaaaagtaacaggcgcagatttaaattacattggtagtattaccatcgatgaagatttaatggaagccgctaatattattgaaggagaaaaagttcaaatcgtaaataacaataatggagaacgtttagagacctacgtgatccctggacctagaaacagtggtgaaattaccttaaatggagccgcggccagaaaagtagccaaaggagatgtgcttattttaattgcctatgcattgatggattttgaagaagccaagcaatttaaacccgcccttgtttttcccaatgaagaaaacaatcttttaaattagtggcttgaataaaaaacgcctcataaaaattttaaaaaccatactcccattactcttgggagtttttttcattctatactcaataaaaagtgctacaccggaagaaagagaaacgctgtggcaaaatattaccaaagccaatcctttttggatttcgttttctttgtttttagggattctttcgcatctttcccgtgcctaccgttggaaatacctcattcatcccttgggttataaagtaaagttctacaaccgttttatggcggtaatggcaggttatttagccaatttaggaatcccaaggtcaggagaagtcttgcgtggagcaagtattgcttcgtatgaaaaagtaccttttgaaaaaatttttggtactattatttcagaaagagtagccgatttactaatgctgttactcattatatcgctgacacttgtttttcagtacgaccaacttctttatttttttgaagaaaataatatcaatcctatccttagcattcttttattaataggagtggttgttgccggcttttgggttctcaaattcattagaaactccacaagttcgcgatttaaaaaaatcagggaatttttaaatggtattttagaaggaatggtgagcatcttgaaaatgaaaaattctgcagccttcattttccacaccgttttcatatgggtgatgtacatcgccatgttttatgtagtgaagtatgccgttcccggaaccgaagctttatctttatcttccattttagtagcctttatcgtcggctcatttgccatttctttaaccaatggtggtattggggtttatccaattgctgtaggggcaattttaatggtgtttggcattcaccaacaagacggggaagcttttggctggatcgtttggggaacacaaacttcgctaaatttaatactcggggggttatctcttatatttttgcctatccttaacaaaacaaactaaaaatttaagtaaattgctaagaccaaattcttaaaaatgaaaaaactactatttctcatagcaataaccccaatgtttcttttagctcagccggagtatagaaccatacaatcccaaatcttaaatcaaaaacgggaaattaagattcagtttccccgaaattacaaaagcaatactgaaaaatcctatccggtaatttacgtattggacggggattatttatttgaacccgttgccggaaatgtagattattttggttattggggagatatgcctgaagctattgtggtaggtgttaatcaattaggtaatcgacaaggagatacttcttacgacccatctaattattttccggtcgatggcggagcggacttttttgaatttttaggaatggaattaatgccgcttgtagatgaagagtttcgaactgccaatttctccattgtcgtagggcacgatttaaccgccaatttcattaactactatttgtttaaagaaaatcccttatttaaagggtatattaatttaagtcccgattacgctccagaaatggaagaacgaatttttaacgcacttgaatattcagaaaagaaaatctggtattatttagccaccgggaccgaggatgtttcttccttaagaaaaggcattttagcgatgaacgaaaagttaagtcaggtaaataatgatttgattcattataactttgataattttgaagaagataatcattattcattagtaactaaagctattcccaatgccttggaaaatatgtttaccctttaccggcctatcacccaatacgattatgaaaaaatactggctgatgaagaaaccactgattactttgaatacctaaccaagaaatatgaagaaatagaaaatcaatacggcttgtcccttcaaataagggccaacgatattttggcggtttccaatgcgatgattgaagaagaaaaatgggatcagctcaaagacttagctaaattagcttccgatgaacatcctgatagtatgcttggctattatttaatgggttaccactatgaagccattggaaagcctaaacgagcgctaaaagaataccaagcgggttatgtagccgaagaagtggcatttattaataaagaattaatgatgaacaagatagaccagataaaagccgatttcggagagtaatttatggcaaaaacaaaaaccacattttattgtcaaaactgtggcgcacaatacgcaaaatggcaaggccaatgttcttcctgcaaacaatggaatacgattgctgaagaagtccttcaaaaggaagataaaaaagattggaaatctcccagtacaaccacaaaaaaacgagtcccaaaacccacgctggtcaatgagattcaatacgaacaagaagcccgtttcaataccaataaccacgaattaaaccgggttttaggtggcggtttggtgcccggttcgttaacgcttctaggcggagaaccaggaattggaaaaagtaccttattgcttcaaatctccttgaatttgagctataaaactttatacgtttcaggagaagaaagtgcacaacagattaaaatgcgggcagagcgaattaatcctaatccggccaattgctatattttaacggaaacaaaaacgcagaatatctttcggcaggtggaagccattgaaccggaagtggtcattatcgattccattcaaacactgcatagcgattttattgaaagctcaccgggaagtatttcccagattcgggaatgtaccaccgagctgattaaatttgccaaagaaacccatacgcctgttcttctcattgggcatatcacgaaagaaggaagcattgccgggcctaagattttagaacatatggttgatactgttcttcagtttgaaggcgaccgtaaccacgtttaccgaattttacgtgcccacaaaaaccgttttggttcaaccaatgaactgggcatttacgaaatgctaggcgaaggcttgcgcgaagtaagcaatccttcagaaattttaatttctaaaagcgatcaagacctgagtggaacttccattgctgctaccttagagggaatgcggcccttgatgatagagattcaagctttggtcagtaccgcggtttacggaactccacagcgctccgctacgggctataacgtcaaacgtttgaatatgctcttggcagtactggaaaaacgtgccggatttagattgggagcaaaagatgtctttctcaatattaccggtggaattaccgttgatgatcccgcgatagatttagccgtcatcgccgccatcctttcttctaatgaagatatttcgatagcacgggatatatgctttgctgcggaagtaggtttggccggcgaaattagacccgtcaccagagccgaccaacgcattatggaagccgaaaagttaggttttgcaaccattatggtctccaaacaagtcaaacttccccaaaaagagtttagcattcatattcagaaagtatcaaggattgaagaggtggtggaatatttatttggctaacatggcatagttcatgagcttatctttccgtgaaaaagaaaaataaatccttatttatcctatcaattttggtgttgacttgtgtatgggcttgttccaagttgaatcaagtcaccgatgccataacccaaccttcagcaagggaaatttacgagcgggagtttcaagaacgtccggcggttttttcccgttggcaagccgaatttgaagcagccaaaaaagatagccttcgggtaaacttaccttatgcggaagcgggaaagttttcatttcagcaaaatgaagtgttgagctatgaagtgcagttgcaaaagggaactatttttaaggtagaagtaaaaaaagattccgtccatcatcgggtgtttatcgatttatttcaacaaaaagattccacttttcatcatgtagaaagcaatcaattagaagaaaatcatctccgttttcaacccaaagaaagtggaacctatcgaattatggttcaacctgaagtggctgcccatacgcctttttttatttcattttatgaagaacccacctatcattttcctgtagccggaaaaggaaatgaagccatccagagcttttggggcaatgagcgtgatggtggaaaacgcagtcacgaaggcatcgatatttttgcaccacgtggaacgccggtagtggcggccaccgatgggcgcataagccgaaccggaaaccgtggcttgggcggcaagcaagtgtggttgcgggaagggatgtttgggaattccctgtattacgcgcaccttgatagtattatcgcgaaatcgggacagaaagtaaaaataggcgataccttaggtttagtaggaaataccggaaatgcacgaactactccacctcatcttcattttggaatttatcggagtggtgccattaaccccttgccttttgtttttcaaaccgaaaagttgaatcgaacttcctttcctcagcaattccaaacgaactacctagtgattgccacagcaaaagccaacttacggcaaggccctgatacttcttatcaaaaaataggagaagtaagccgtaacgataccattcaattattaggggaatataaaaattggttacacgtaaaaactcctggtcaacaagcctttctgcatgcatccttggcaaaaggtttaaaataaaaagccattcaaaaaattgaatggcttttcccttatctcattccatatcttttaataattcggaaatttcatcgagtttaggtgtgaggatcacttcaatcctacggtttttcgcttttccttctgtggtttcattactggcgacgggaacaaactcccctcttcctgcagccgttaaacgattcgggtctatcgaactgttttcttgtaaaatatgtacaatcgctgtggcacgcttcgtagaaaggtcccagttgtcctgtaagggaccgtttcctccatacggatcatcatcggtgtggccttcaattaatacattaatatccgggttttgtgctaatacggttcccaattgctttaccgcttgacgtccttgactgcccacggcccaacttccggaagagaacaagagtttgttttccatcgaaacatatacttttccattgcgttgttctaccgttaagccttttccttcaaaatcggttagggctttagaaatactgttttttaaagcttgcattttcgcatctttcgcggcaatcacgctttccagttcatcaattcggttagacctggcctgtaaatctttttggagtttgtctagtcgggcttgctctttagctaaagcagcttctttttcttccaattgcgctaaaagctccctattttgcctagagttttctgccaaggcggaagaactgtttttttctaacgcattgtaagaatcctgtaggttgtgatgagcaccggttaactgatcgtactctttctggaggtggttcttttcttcttttacttgttgcaattctttttcgatggctcccagttctgccgtttgagaagtattgaaatcttcacaatcggaaagttcgttgcgtagctcttcatttttcttttccaaattggcaaaacggtcttccagttccttaaactttttagccggtacgcacgccgtggttaaggcaaaagcgagggctgggattataaaattttttttcatcttctttaattatagatcggttaattcaactaaaatagggcagtgatcgctatgatatgcttcctgtaagataacggcccttttaatattttcttgtaaaggctgggaaaccaggttgtaatctattctccaacctttgttattggcgcgggcattggcacgatagctccaccaagaatattgtactttttcgtcgttgaggtgacgaaaagaatccacaaagccgctctccataaaattgccgagccattcccgttctaccggtaaaaagcccgatacatttttaagccggacgggatcgtgaatatcaatcgcttcatggcaaatattataatcgccacaaatcaccaaattaggataatccgttttcagttcattaatatactgctgaaaatcggccatatattccagcttgaattctaatcggttaatattggtgccggaaggtaaatataagctcattaccgaaacttcatcaaaatcgacccgaatatttcggccttctgcatccatatagtcgatgccggtgccataactaatgttattgggctcctttttactaaggatagccacaccgctataaccttttttctgcgccgggtaccaatagcaatggtgatagcccaattcatgaaaaacagtttcgtcaaactgatcgggattggccttaatctcttgcaaacagaccacatcaggattggcgtgggatagccaagttaaaaaatcttttcggagggcggcccgaatgccgttaacgttataggaaataataaccatgaatatccttttgcgccaaaaatagtattttttaaatggaaagttggggagagggtgataatttaaaagtcgttcttacggttttccgtaacaaaataattaaaagaaatgattatatttaaaaaatagaaaatcccacggagtacgcaggatttaagatttttcttcggcttatagccttattgtgaattgctttcagactgtaaatatagaaaaaattaagcaattcacaacatatgttttgcataggtacaatttattagaacctcgcaaaatatataaataaaagattgctaagtgtcaataccaaggttagaagtttggaccctcctctctaatttaatgagacgtgcactcctcaataaactttcacaatcttttctttgacaaagatataataatatttaaatttacaaaacatatacaacctattattaatcatttttttaagcatttcatatatgaacaacttaaccttaggaattgaccttggcacaaactccattggatgggccattagggacactacagaaattgacaatcaaatcattaaaagtggagtattgatctttgataaaggtgtaggagaagaaaaaggaattgaattccctaaggtaaagaaacgtaccgaatctcgtgggaaacgtaggaattaccaagccgaaaagtacaggaaatgggaattgctggagtacctcattcaacataaaatgtgcccactaagtatcaacgaacttaatgagtggagaaaatattctaagaaagacaaacggcaatatcctcaaaccgaagaatttttgaattggcttcggtttgattttaatggcgatggcaaaccagattttcaccttctcgggggagataaacacgaaagttattacctttttagggcaaaagctgttagtgaattggaaaaagacaaaaaagtatttcaggaaaaccctgaagtgcttggtcgtgttttttatcatttggtacaaagaagggggttcaaaggtcgagatgaagaagaagcaaaaaccatgcttcaaggctccaaagacggaaccacaaaaggacgggatgaaatagcgggatatatagacacctataaaagtttaggtgcggcactttaccattatcaaaaagaacattctaagaactatgagaaagtacgcattcgccagcgctataatcttaggaaagattatgaaaatgagctaaaggaaatttgtaaggttcaagaactaagtgatgccgattacaagaaacttcacaaggcaatcatctggcaacgtcctttgcgcacacaaaaaggtttaataggcttatgtacttacgaaaaaaacaaaagaagggctcccataagccatccgctatacgaagaataccgtacctggatattcatcaacaatttaaaaattgaagccccggaaggagaagaactagaggcatatcttaaagaaaaaatctatcctttatttcttaaaatcggaactgattttaagcttaaaacaattcttgaccgtgtaaataaagatggaggaaaagtacattcaaaatttgctgatcgcccagaaaccaaagtactatcagcaaaattgctcaaaaagtttgaagaccttctgggtgagaattggaagaaagatcaccaatggaatgattcttttgtacgtgaagcacaaccttcaaaaaaacaagaggaattttatactgttgaggatatttggcacatcttattcacctttgataatgaagagaagcttatcgaatttgcctccactaaattgggcttatcgaaagaagcatctacaaaattttcaaagataaaactgcaacagggctacgccactttaagcctttcagcaataaaaaaaatactgccctatcttcaaaaagggtttctgtacccaaaagcggtttatatggcaaacttgcaaaaggtactgggaacatacgaggtctcagaagattttatcgatcattttgccggcgaaatcgactctatttatgagaatgccgctacagagaaaagattaaataacatattgaacagtctttttcgggctgagcttgtttcagagggcgactatcatttagctgaaaatgaagatttagatgatgctgaccaaagtttaattcatcaaaaaataattgaaactctgggagaaaagacctggaacgaaaccgatgaaaaaactcaaaaggagcactttgattacattaaaaaggaatataaaaggttcctgcaaaagccatttcaggcaaaaaaaggaagctttatagagcagccccgcattcacgagcaaatatttaactacttgcaagaacactacccggaacaagtacctgatgaaaatataaaatacctttggcatccttcagaacaggaaaaatacccgaatgcctcaacctatcaggaaatcaatctaaagagcaaaaccttttttataaaagaagctgaattggatcgttttctacataaaaatccagacgcagaggctgatggcattttcctgaaattattaggtgatccagaacccataagcaaagggtttaaaaacccaatggcgctaaaaaccctgcacaagttaaaacagcttttaaactttttattacagacacaacaaattgacacccatacaaggattgtcgtagaaatagcgcgcgaactcaacaatgctaattatagaaaagcattagagaaatggcaaaacgaacgagaaagggaaaatgagtcttataaaaaacgtattgaagaaatcaataaagaaagtaagactagttttgaagtaaatgacaaatcacttatacgcaaaataaggctttgggaagaacaagatcgcaaatgtctatacaccggagaagtcatcaatatgtgtgatgtgctgaatggggaatattatgacattgaacataccatcccagcaagtatcagttttgatagtgaattgaaaaacttaagtcttgccaataaagattttaataaccgaattaaaggcaaaaaatacccaacgcaactggacaactatgacgatgcttccacatttaacggtaaacgtatagaaccaatcctaaaaaacattgaaagcatttttggtaaaagaaccgtttataaaaagaaaataaaaaaaggaagaagtgaaaaagaaattattgttgaaaaatgggcaaaaatagctgatttagaagttgaattaagcaagctacaaaacttaagaggtttagaatctaaagaaataaaagatagattaatacaaaaacgtcatcttttaaaatttgaactggattacttaaaacaaaaactgcaaacctttactattgaagaatacaaagcaagctggcgtaatagtcaattgcgggacacccaaataatgacaaaatacgccataccctatcttaataccgtctttaatcgagtagaagttcaaaaaggcaatgtggtcaatgattttaaagaaatttataatgtaaaattgtttggggataaaaaagaccgttccaagcacagtcaccacgctgttgatgctgccattttaaccttgataccaaaaccggcacaacgcgaccaaattctaaaagaatacaatctagcaaaagataatggtatcgcaaaagcctatcacgagcaacctatagattggaaagagtttaaggcatactacattaaacaaattgaagaagaaaccctcataaataacctaaaagaacaacgcactttgacccctacttttaaaaaagtaaggaaacgtgggaaaatagtaaaaaaagaaaatggtaagccaatatgggcaaagggcgataccattagagggcaattacatggcgaatcattatacggtgccataaaacaggccaaacgcgatgaggataacaaaattgtatttgacgatgacaagaaaatgattttagaagacgatattaaactcgtcattagaaaacccttgtcctatgctaaagatgccgtttccgcaggatttaaaacccttaaagaaatagaaaaggtaattgttgaccgagctttatttgaaatgataaagactcaggttgatgaagccgatagctttaaaagtgccttagaaaaaggtatttatatgctcaacaaaaaaggagagaaagtaaacaaaataagacatataagatgttttgataggctgaaacattcaactgctgtaaggccgcacaaccatgattttatttcagataaagaatataaacaaactacttatgcacagaatggtgaaaatgtattttgtctgttttacaaaggagaactaaaagataaggaagaaagagctattaatattattgggatttttgatttagctaaactcgatattcaggatgaaaaagattttttcaaaattccacattttagttctcttcaaaagaaaaagacaaaactaccattatatgctgttttaaaatctggtcaaaaagctattttctacaaagaaaatttagaagaattaaaggatctcagcgaaaaggagctttccgatagaatgtataaaatgtatcaatttgaaggggattctaataaaataaaattcaagcaccatttaatatcaggagctaataccgagattaataaaagtttacctaaagggtataaagaggcctcaccattcggaagttttgaaaaacaaccgttgatgagattaacagcaggcaattggaattttgcaattgaaggtaaagactttgagatggatttagatgggacgataaatttcaaattatgatcaaacgtacccttttttttggcaatccggcctatttaagtacccgcaatgaacaattagtggttaacttcccgaaagaagaaagggaagaaaaaactgttcctattgaagatttgggttatgtagtcttggaagatccacagattaccattaccaatggattgctaatgaagctaattcaaaacaaaacagcggtcatcacctgcgataaacaacacctgccctgctctttgttacaacctttagtaggccataccgaacaaacggtgcgttaccggcatcaacttgatgccagtatcccgttaaagaagaatctttggcaacaaacggtaactgcaaaaatcagcaatcaggcggcacatttaaaactcttaggtaaatacagtttaaaattggaacgctggagtaatgaagtaaagagtggcgatacccaaaatcacgaagccattgctgccgcccattattttcagaacctgtttgatatcgaaggctttagccgtaaccaaaaaggtattcctcctaacaatctattgaactatgggtatgccattttaagagctgtggctgcaagagctttggtggctagtggtatgctcccatcggttggaatttttcatcataacaaatacaatccgttttctttagctgatgatgttatggaaccttatcgcccttacgtagatcttatggtcaatcagatcgtaaacaccggagcaaatcttgaagaattaaatacgaatattaaatctgagcttttaacaatacctgctatggatgtgagtatcgatggcaaaaaaagtccgttaatgaatgcgatgagccgtactactaatagtttatacgaatgtttttatgggagtagccgaaaaattttatatccggagttcggttagccgtaacggtggctgagtgaaattcgatagaattttgcgtcgcattgagcttgtcgaaatgtatcgaagccaaagcgaaaccggacacttcggtacgatttttccaaaatcactcagtgacctacgtatagcggcggctgagtgattgcgacaaaggagcaattatatcgaagccatagcggatgaaaaaacgaagttaatgataaaaggatatacctatattttatgttgtaatgatggaagttactataccggtagtaccaaagatcttcaaaaaagattaagtgaacataataacggaacgggagctaattatacggctaaacgattacctgttaccttactttattacgaagaatataaccggattgacgatgctttttatagggaaaaacaattacaaggttggagcagaaagaaaaaggaagccttaataagtggtgcaagcgaattgttaccgggattagcaaaaaagatttatgtaaagaaaaatagttaagcgaagccggttacttcgatacgattttttcaaaatcactcagtgacctaactatagcggcggctgagtgattgcgacgaaggaggaattatatcgaagccaaagcgagaccggcacttcgatacgtttgctcaccgcaaacactcagtgacctaaatctagcggtggctgagtggtccgactaaaaggaggagcgtatcgaagccaaagcgagaccggacacttcgataggtttgctcatcgcaaacactcagtgacctacatagcagcggcggctgagtgattgcgacaaaggagcaattatatcgaagccaaagcgaaaccggcacttcgatacgtttgctcatcgcaaacactcagtgacctatgatatagcggtggctgagtggtccgactaaaaggaggagcgtatcgaagccaaagcggattaacataaagaataaataaaccaaaaacgatgcaggaaagccgtttttcccgtttaaatcaataccgatgtatgtgggtacttgtattttttgacttaccgactgaaacaaaaagtgaacgaaaagccgcgacgaagttccgtaaacaattattggacgatggtttcgggatgtttcagttttctatttattcccgtttttgcgctagtagggaaaatgcactggtgcatataagacgcaccaaaaataacctgcccaaaaaaggaaaagtagcggtgatgcaaatcaccgataaacaatttgggatgattgagctttttcacggaaaaaaagaagtagaaccagaagttcccacgcaacaacttgaacttttttagtagataaatccattttcttagaattataaatgtcaggtttagcggagtcgaggcctcaattgttgatctgaatttttaatcctaaatatcggtttaaaaatcagcataccagctttttagggcgggtatgctgtaaatcatgactaaaaatacaattttgaaagcaattcacaacttgtaagagatacccaaatccctgattatggctgtaaatcatgactaaaaatacaattttgaaagcaattcacaacagttgtgtaaaaacaacataaaataacaggctgtaaatcatgactaaaaatacaattttgaaagcaattcacaacctattaacaatcccaaaattgtacctataggctgtaaatcatgactaaaaatacaattttgaaagcaattcacaaccagttataggtatttccattccaaattttagctgtaaatcatgactaaaaatacaattttgaaagcaattcacaacgaaattcaggcgaccgcagaaaccttcgagctgtaaatcatgactaaaaatacaattttgaaagcaattcacaactcttctttgtcaagaccaagaagtttatctgctgtaaatcatgactaaaaatacaattttgaaagcaattcacaacctttggctcgctttccgctgcttggcgaaagctgtaaatcatgactaaaaatacaattttgaaagcaattcacaacctttggctcgctttccgctgcttggcgaaagctgtaaatcatgactaaaaatacaattttgaaagcaattcacaacattagtatgctcgatgatagcttgaagaaagctgtaaatcatgactaaaaatacaattttgaaagcaattcacaactcggctgtaattaatgttgtaccatcgctggctgtaaatcatgactaaaaatacaattttgaaagcaattcacaaccgcagtttgtctgctaccgcagccacagccgctgtaaatcatgactaaaaatacaattttgaaagcaattcacaacattatttaaagtggtgagaaactattagatgctgtaaatcatgactaaaaatacaattttgaaagcaattcacaacctattaacaatcccaaaattgtacctataggctgtaaatcatgactaaaaatacaattttgaaagcaattcacaactagtgttcttggtgttaattgtttactttcgctgtaaatcatgactaaaaatacaattttgaaagcaattcacaactgcatctaatccgctacgacaccataccacgctgtaaatcatgactaaaaatacaattttgaaagcaattcacaactttgacgaatctaacggcatttatcaagctgctgtaaatcatgactaaaaatacaattttgaaagcaattcacaaccaataacaaagtacaggtaaatgtagatgagctgtaaatcatgactaaaaatacaattttgaaagcaattcacaacaatggattaatggaaaaaaccctttaattggctgtaaatcatgactaaaaatacaattttgaaagcaattcacaactagctttatcgaataatgaattttgcgcttgctgtaaatcatgactaaaaatacaattttgaaagcaattcacaacgcttctgcttcaagctcttcaaaccaaatggctgtaaatcatgactaaaaatacaattttgaaagcaattcacaaccctgtgtcacagaagtaaaatttatgatctgctgtaaatcatgactaaaaatacaattttgaaagcaattcacaacccaagaaaatgttgtcataaagtcaaagcgctgtaaatcatgactaaaaatacaattttgaaagcaattcacaacgtcgctaaattagctttagccattgcaatagctgtaaatcatgactaaaaatacaattttgaaagcaattcacaactatgagttacttcaagaaagaagaaaaaaagctgtaaatcatgactaaaaatacaattttgaaagcaattcacaacatataaactcgataagaaaaaagaaattcggctgtaaatcatgactaaaaatacaattttgaaagcaattcacaactgctgctgcttttcctttttttcttcatacgctgtaaatcatgactaaaaatacaattttgaaagcaattcacaaccagctagttctaccacattttcaaacacttgctgtaaatcatgactaaaaatacaattttgaaagcaattcacaacaagacgaataacgaacccccgaaaggggtggctgtaaatcatgactaaaaatacaattttgaaagcaattcacaacgattactgaaagagctcttctacgatatgtgctgtaaatcatgactaaaaatacaattttgaaagcaattcacaaccaatcactctcaaaaatcaaaaatgtttccgctgtaaatcatgactaaaaatacaattttgaaagcaattcacaacgcataagagatacctaaatccctgattatagctgtaaatcatgactaaaaatacaattttgaaagcaattcacaacgtacaaagagttagcgcttaagattttctggctgtaaatcatgactaaaaatacaattttgaaagcaattcacaaccatacttgcattttccgtgttcaaatattggctgtaaatcatgactaaaaatacaattttgaaagcaattcacaactagcgtgcaatctagtagaaaaagccacagctgtaaatcatgactaaaaatacaattttgaaagcaattcacaactatttcagcaatatcggagttagtcaatcgctgtaaatcatgactaaaaatacaattttgaaagcaattcacaacggaatgggtaccactgccgcatttcaaatagctgtaaatcatgactaaaaatacaattttgaaagcaattcacaacgtagagctgtacacatactttatgtatggtgctgtaaatcatgactaaaaatacaattttgaaagcaattcacaaccgatgatatgaaaaagaatcaacgtgaactgctgtaaatcatgactaaaaatacaattttgaaagcaattcacaacggggcttgtccttttttacgcttgctaactgctgtaaatcatgactaaaaatacaattttgaaagcaattcacaaccccccggcttgtatactgccaatttcttaggctgtaaatcatgactaaaaatacaattttgaaagcaattcacaacctgaacaactcacgggttttgatggcaggcgctgtaaatcatgactaaaaatacaattttgaaagcaattcacaacgtaagttctggtgaatggaattttgaaaacgctgtaaatcatgactaaaaatacaattttgaaagcaattcacaacgtgatgcgcaagtctatccgcaggatagacgctgtaaatcatgactaaaaatacaattttgaaagcaattcacaacgacggcggtagccggcaaaaaaacgtaatagctgtaaatcatgactaaaaatacaattttgaaagcaattcacaacaggcttttaattttattactgttatacatagctgtaaatcatgactaaaaatacaattttgaaagcaattcacaacctattgctaaatcaaattgtttatcctcgcgctgtaaatcatgactaaaaatacaattttgaaagcaattcacaacttgcatctaaacgcatacgcgccactacttgctgtaaatcatgactaaaaatacaattttgaaagcaattcacaactgccgatggtggtaaaatgaatgatgaattgctgtaaatcatgactaaaaatacaattttgaaagcaattcacaaccaagcagatatagctgatagagctttagaagctgtaaatcatgactaaaaatacaattttgaaagcaattcacaacccttggttacgaatgtgtaatttttgcttggctgtaaatcatgactaaaaatacaattttgaaagcaattcacaactttgatgatctattacaccctaacaatatagctgtaaatcatgactaaaaatacaattttgaaagcaattcacaaccagtatcttgtaattttctttaagcagtgcgctgtaaatcatgactaaaaatacaattttgaaagcaattcacaactacgttgcttgccaatgccttcacctcaaagctgtaaatcatgactaaaaatacaattttgaaagcaattcacaacagggggcgtgtccttttttaaggtgtcagcgctgtaaatcatgactaaaaatacaattttgaaagcaattcacaacaggcttttaattttattactgttatacatagctgtaaatcatgactaaaaatacaattttgaaagcaattcacaaccaagtccttctacttatgagaaattaaatcgctgtaaatcatgactaaaaatacaattttgaaagcaattcacaactaaggccacgatcgccaattacaaccaacagctgtaaatcatgactaaaaatacaattttgaaagcaattcacaacctctagacgcctggcgttttatacgcgattgctgtaaatcatgactaaaaatacaattttgaaagcaattcacaacccgtaggtcggggtggtaaaaaattgagcagctgtaaatcatgactaaaaatacaattttgaaagcaattcacaacgccgtgaatatggtttgtatagctgctggcagctgtaaatcatgactaaaaatacaattttgaaagcaattcacaacaaagaaattattgccaacaaaagagctgaagctgtaaatcatgactaaaaatacaattttgaaagcaattcacaacggtgtctcgtatataatcataagtatttatgctgtaaatcatgactaaaaatacaattttgaaagcaattcacaactatactgatttattagacgtgagagggacagctgtaaatcatgactaaaaatacaattttgaaagcaattcacaaccctaattattattaaacattccttttttggctgtaaatcatgactaaaaatacaattttgaaagcaattcacaactacttgccagcagccgccttgtatctttttgctgtaaatcatgactaaaaatacaattttgaaagcaattcacaaccttgcatcatttcatcaaatgcttttccggctgtaaatcatgactaaaaatacaattttgaaagcaattcacaactcagcgacggtataatcaacgtaacgctgagctgtaaatcatgactaaaaatacaattttgaaagcaattcacaacctggcttgccgcccgtgttaatattattttgctgtaaatcatgactaaaaatacaattttgaaagcaattcacaaccatttccgccgccgtatttacgtgccgcacgctgtaaatcatgactaaaaatacaattttgaaagcaattcacaacttaacggtaagggcttttttcatttcgtgtgctgtaaatcatgactaaaaatacaattttgaaagcaattcacaactgaatagctgtgcgagcgtttttcgggattgctgtaaatcatgactaaaaatacaattttgaaagcaattcacaacttaactgttttctttgtgtacgctccgtcagctgtaaatcatgactaaaaatacaattttgaaagcaattcacaacgggtttatgaaagttatttggacggtaattgctgtaaatcatgactaaaaatacaattttgaaagcaattcacaacgtagaagttatggttttagactgcggtaaagctgtaaatcatgactaaaaatacaattttgaaagcaattcacaacggtgtttgtgttgttctttccagagcagttgctgtaaatcatgactaaaaatacaattttgaaagcaattcacaaccacttgcaaaatccccctcgtcgtgtagcggctgtaaatcatgactaaaaatacaattttgaaagcaattcacaaccaaaaatataaaaagaacatataaaaaggtgctgtaaatcatgactaaaaatacaattttgaaagcaattcacaactaaaaagttggaatccgctgagcttaatgagctgtaaatcatgactaaaaatacaattttgaaagcaattcacaaccataaggttgaaatagtacctgaaaccgggctgtaaatcatgactaaaaatacaattttgaaagcaattcacaacccaaatgtagtgcggaaattatcgccataagctgtaaatcatgactaaaaatacaattttgaaagcaattcacaactcttcaattctttcagcaattactacttctgctgtaaatcatgactaaaaatacaattttgaaagcaattcacaaccaagactcattaacggtgaaaacccgttacgctgtaaatcatgactaaaaatacaattttgaaagcaattcacaacttcagcaccacgggtttgctaccaaaaagagctgtaaatcatgactaaaaatacaattttgaaagcaattcacaacgccgttctgtataaattgtacctccatagtgctgtaaatcatgactaaaaatacaattttgaaagcaattcacaacgcgccgttagtcccgccaatataaaaattggctgtaaatcatgactaaaaatacaattttgaaagcaattcacaaccctcccctacgtgcttataacctttgtattgctgtaaatcatgactaaaaatacaattttgaaagcaattcacaaccgtgcagatgttatcgaacttttagaagaagctgtaaatcatgactaaaaatacaattttgaaagcaattcacaacatagttagtggttttaaaaaaggacgcgcagctgtaaatcatgactaaaaatacaattttgaaagcaattcacaactcatccctagttctttcatcatgtcgtaatgctgtaaatcatgactaaaaatacaattttgaaagcaattcacaactttgtctaggttctctattttatcacatatgctgtaaatcatgactaaaaatacaattttgaaagcaattcacaaccatgtagcgatcggtcatcttgagggccagctgtaaatcatgactaaaaatacaattttgaaagcaattcacaaccggtgatgcctttggcggtattgctgcgggctgtaaatcatgactaaaaatacaattttgaaagcaattcacaacgggaaccatcaccacaacaaattaccttaagctgtaaatcatgactaaaaatacaattttgaaagcaattcacaaccaagagattaagaataaagagctttttatagctgtaaatcatgactaaaaatacaattttgaaagcaattcacaactcacgaactacagcattacgctgaacaaggctgtaaatcatgactaaaaatacaattttgaaagcaattcacaaccgaaccgttacataacatcgggcggaaaatgctgtaaatcatgactaaaaatacaattttgaaagcaattcacaactattagcgtttcacctttatgtaatccaagctgtaaatcatgactaaaagtacaattttgaaagcaattcacaataaggattattccgttgtgaaaacattcaaggtggcaaaaataaatctgccaccttttttattggaagttttcgataataaaaaatgcactagcttttctttttcagagggcaactttttatcaagcgcttcctttttataaagttttccctgcctcgagcgtacgttgactatggtcatccccatcacaccagtcacttgcggtaagttgagcgaagcggtaggaagactgaaaagtagccttttaaccctccctacccacttccgt

SEQ ID NO: 301 - DNA, 24263 bp, synthetic construct
  source 1..24263: mol_type = other DNA
  misc_feature 1..24263: note = Synthetic
tcggggatgtatatctaaacctttggcaagttcaatgatagtttggaattccagacttttttggcctttctcaatttttgaaatggcactaaaatcaagatcacatttttgagctagctgtctataacttaatttaagttctgttctccttttaagaacgttttctccaaattttaaaagatatgtttgatcggaaatcatttgacagccttgtgaataagcaagctcacaaattttaacataaataatgtaggtagtactaactacaatttgtttttttttatatatttacctcataattatatatttgcgaaacttcttagcataacatattagaagcattcgctttgaatctcgaatcaaaaactggtactttttagcaacgagaggataagccgggatgctcacgacccgggcgtgggctctcacttattgttgcgcggtataccagtaccttgattcgataagttgagacctgcgcctttttgtattattctcagcatttctcaacattcaagctatgcttcttatttaatgaagcctcgcagctataccctaatttaaaatgtgctcttgggctggtataatcatacacctgcttaagatcagtacacccttattttaaaactatgtggaataaataaaaacgggtacagttatgaagcattatcccagtgaaatacactttgagtcttttaaatcgggctgcagccaggcatttaatgcgttatacaaacactattaccgccccatctactggatgggcaggagtatgcttaaagatgtctttgtggtagaaacactcgtacaggatgcctttttaaggctgtggtacaaacgcgacgatatcgagtcgcctcaacacctggttaatttcctctatgcggtcatttccaatgaatgcaagtggttttacacacgaccggggaatcagtttcaacgcagtatttactcctatgactctattctcaattatcaggactataggtggggctatgatcctgaagcagtcgatacgcatctggaagatcagcaaaacagccaaaaagaatatgagcaggtagtcggtatattgcccttgctcggaacgcggttcaaacgccttatagaactgggaatgcaacacggctttaaatacaaaaccattgcggagcatatggggatcagcattaaggatgccagcaacctgatgaaagatgctattcagcagctcaaaaatatcctgcagcaggagtgtctgactgaggaggaacgttcggtttcagaagcttccaatccaccccaggagctgaccgaacaggaaacccgggtattgaccctgcgctgcgaacagcagtattcttttgcccagatcgcaaacgaactcaagctttctcaaaaggaagtacaccgcgcctttacgacggcttataagctgttacaacagcacgaacacttacaatccgcttaatgatgaaaaacaaaaccctcagcctaactcgcaagatccaactcaatatagacctgcccgattatgaggagcgtaaagcagcaatggccaaactttacgattggcaatactgctgttttaaggcttccaatatcatcgtctcacacctctatgtgcaggaaatgatcaaggaatttttttatttgaccgaggacattcagtataaactggcagatcaaaagaaagacgaaaacggcattctaaaccgctcgcgtatcaacaccacctaccgggtgatctcagaccggtttaaaggtaaaattccaaccgaaatcttatcgagtttaaaccggaacttagaaagtgcatttaaaaaaaatgcaccggagtactggagtggggagcgctcccttcaaaattttaaaagagataatggctttccgtttggtcccaacagtatgttcagctttaaatacgatgaagaacgaaattgtttttgtttccgactttttaagattcccttttgcacctatttgggccgggacttctccgataagcgggttttgttacaccgggtactcaaagcggatacccgtttacgcacctcccagatccaattaaaaaacgggaagatattctggctggcggtctttgatatcgagcaagagcaacacgccttaaagcctaatgtggttgctgaggcttctttatcactagaatatcccattaccgtcaagattggtagtaatcgaacgactattggaacaaaagaggagtttttataccgtaggctggcgatacaggccgcccgtaaacgggcgatggccggatcggtacattcccgtggtggccacgggcgcaaacgcaaactcaaggccgtagaaaaatataaggataaagaaaccaagtatgtcaatcagcgcttgcacgtgtatagtcgtaaactcattgatttttgcgtcaaacatcaagccggtaccttgatactggtaaatcaggaagccaaaatagaagccgcacatgaaaaggattttgtacttagaaactggaattattacgaactcatgactaaaatcaaatacaaagcggaaaaggctgggattgagttggtcgtaggataaatttgaactgaataagcgggtgcttgtacacccctaaggtgagatcaaagatactcactaagtgtaacgggcacatacaacgcgcgagctcatcgtatatttatactaggcggtaaaaacggactttgaatataataatttggaaatttaaactaattaagcgggtgcttgtacacccataaggtgagattatagctactcactaagtgtaacaggcacatacaacgcgtgacatctgacttttgacaaatggcgatttaaaaaataaaaaacgctgaactcctaactcaaaagtctaaactaaaaaagagggtgcttgtacatccgtaaagtgagattccagatactcactaagtgcgacggagcacatacaacgcgtgagcttgcttattaaccaactcaagaaacgaagccgtactgatgaaagaaaagtaaatgatattttgaatgaactataaaatgacctttagggttgagggtacttgtatacccgtagggtgagggttacgctcactaaatgtcatagggcatatacaacgggcgtgagtgaactgtaaactcaaatacttagaaatccttcctattccagttctcaaacttttcgtcatccagttcattttagcaccttttatcgctttgaactaatcatccaaattcggaactccattggttttctgaaaaaaatctgacacctgaaatgcaagcagattaaatcgatttgtcgcaaaatcttcactaaaaataggggctcccagagcttttgtcgcaaaaatctaaagatcaatcagtaataaaaaattatcaattaactgattaccaacaacttaatccataaatgtataccgtaacagcgcgcagcgtgttaccctcttgctatacattttcctccgcttcgctccctaaaatgctacttattttacctgaaggtaagtaaaaaagtttccattaattttgatatcaaatgctgtcaaattaaatgagaagcaaacccctttacttattatatctggagcgtttttctgtttgtaacaacggtttaaaaaatcattgaacagataacggcgtagcagattgaaaaaacgaatacgctgggtaacttaagttacaaatgggtaagaagtattgaattacatttgtgcttatggttttacccaggtcttacataccaatttttttcacctttatctttctgataaagtttattgctattgatacgaatgcagtgagtttactattcaagggttcagagaccacttttgtaaatccctattgtaaaaagaaaaactccccaaagcaaaccggtcaaactaaaaacctgacaaaatctgaaaccgaaacctatactattttgattttgagtggtttttgtgcctcgccattacaggtgacctttaacaactgggagacatcgcttgatgtgagtactccggtaccacctgaagaatcaccttcggcattaatgtatcgctattctgataacgactctccccctccccgaatgggttgagtccctcctcaagagaacttataatgtacttgccctaccggcaggatcaaagtgttctcaattggtacgaacctttacggtaacgtacttcatttaaattcacatctataacattagtaacaatggctactacaattcgggtaagccgtcgttccattcaactgttacgcatactgataagcggtatttttctcgtggcgggttttaatcacctcgttcatgtagaagaaacagctaaacgtatagaacaggccagttttaagggtattgcctatttctttggtgatccccaagtgctgattgttctatcaggtattgtaatgctaacagctggtttcctgttccttattgggtacaaaaccaaatgggcggcattgctgttaatggcagtactcctacccatcacactaaccattcaggtagggcaaataaacacattgggccctctctttaaaaacatagcaatttttggcggacttctcttttttgtatggaacgataccagtaaccttttaaaaaaataatcatgaaattctatttattcagttatatccttttgatactaagcacctttaatacggctaaaacacaggcacaggaaaatcaaccaacaaaaagtaattatgtggtactcactaaaaaagtacctcaattgcaacccatactcctcacagccgaagcccttcgggctgaacagggcgattcttttggggattttcaggtcattatttgcggaaaagaaattggagatataactcaggatgacctaattaccccattcattgaacgggcaaaaaaagcaggggtccagataatagcctgtggattttcactgaagaagtttaaggtgagcagagcggcggtaccttccgggattaaaattgtggaaaacggaatcctgcacaatttccggttacagcataaaggttataaaagcttaagtctttaagaacataagaaagagatgaaaatgattcacagatttaaattaaacatccttgtatttttgagcttgcccgtaatactggtgaactgtaaaaccgaaaaggtcaaggctacagatcgcccaaatagctcaggggataccttaagtataaccatcctgcaaactgcggatattcacggacagctggatccgcatcccgaactttttcgcgaagatggaaaaatcgtattcagggaacgagggggactggcccatgtaaaaaccctctttgctgaggagcgtaaaaagagtcccggtcgcacacttattgtggatggaggtgatttaatacagggcagtgggtatacagcgctttctcaaggtaaggtaatgcccgaaatcataaagaacatggggtacgatattatcatacccggcaactgggaagtagtttatggaaaagaggtgatgatggaaatcatgcaaggctatgacacagaggtcatcgcgcagaatatggttcacaaagggagcatggacctcttatttcctccttattcaattcaggaaattgaagggattcgtctggggtttatagggattaatgatccagatgtaccggtgcgacagaatcccatattcagcaagggtatcgggtttagtggtcttaccgatgatcttaagaagcacatggaacacctcaagttacaggagcgtgtggacgttctttttctggttacccatttgggcatatttaagcaggtagagctggcgaataatccgttggcagcgcaagccgattatattttgggcaatgacactcatgaacgggtacgaaaacccataacgggtaaatatgccaaggttacagagcctggagcctttggttcttttgtaggtaagttgatcttgcattttgtaaacggagaactggtaggtgatgattatgaacttcttgatgttgaccctgaattataccctgcagatccggggattcaggatttaataaataggaaaaaagcgccctacaaggattctctggaaaccgtgatagggtatacaaaaactccgctttaccgctatctcaccgttgaaaacccgatggataatatgattacgaatgctgcccgctggaaaaccggcgtggatattgccatttcaaacggctttcgctttggaaaccctatagtacctgaacctgataaacctgcaccaatcacccgggccaatttatggaatttacttcctgtcaacgaaaaaatcaaaacaggtaaagctaccggaattcagattaagaactggttagaacaggaaatgcacaatgcgttttctcaaaaacccacggagcgttttggaggatggctcgtccgattttcgggtatgaacgtggtttttaacagtcagaataagaaagggcatcgtattgaacgtatcaccgtaaatggaagacccatgcaggatgatgtgtattataccctgtcggcctgtttgcgtcccggggatcccatagataatttatgcaggatgccagatgtaaaggatgttgaggttaaagattatacgatacatgaggcagtagaagactatttaaaggaaatgtcgcccgtttcccctaagctggaaggtcgggcgtattgtgaatatctgggaactgaatctttttcaacagttccggaaacaaattatgaatttcattaaaaaaaataattatgactataaagagaaagtgggttcagtatgttgctctactgggtattggttttattgtgtatagcactgggtttcttactgaaatcagtgctttcgcacaacggggtttacttgaaacgggattggtgaatcccgatctaaacgatagggagcagttaagcagcacccatactgatgcccaaacgcagcctcttgtacctaaagccgatttcaactttgaattaaggagttcagatggtgagcttacaaatttaaaagcatttgaagggaaagtcatttttctgaacttttgggccacgtggtgccctccgtgtattgcagaaatgcccggtattaataatcttcataaagaaatgggagacgaagttgcttttataatgctgtcttttgatactgattttgaaacagcaaaaacgtatatcaaacgcaaagggtttaatttgcccatttacagtcctgtatctgctataccgtcagtttttagtaccaatgggcttcctacaacgtacgttatcgatgcccatggggacattgttatgacccatcagggtatggccgattatgataaccgggaattccgggattttttaaagagcttaaaataagctggtctggtaaactgtactggggtcccatttacttattatatctggagcgtttttcttggtgtttcatccagctcagaacgcttcaacaaccaccttttttaagatcaaggcaacgaaaaaaaggatctgaattgcagttccatttacttcccatagcgccatcgcgtttccttttcgacagacttccttttaaaatttagcaaggaagcgcttttataaaaagtgcgacaggggagcctggttatgcaaagcggctccggctaaattttagttcttaaccgaaaaggaaatgggtgctgtgcaggatgtcaactaccagtttggagttggttaaaagtttcttgtaaaacgcaaacttgaagtcagcaggatcagcgaacgcaatcctcccgacagctgtcgagatctgggattgggttcaagattttggaataaacctctttttctggaatgaaacccttcgactttgctcaggacaggccttttgcggaatggaggaaaatggggtttattcccattctacattatccatttaagagcttttaagtccttaaaaagcaatagaaaataaggaattataagttaggcttaagccttttaagtcgtcgctgataggcttgtaaataatttcgtttagattgctcatttaaaaaagaagcctgaaccagctgttctacgtgttcagcaccaccaagcatggtagacataatcttgttgaattgcatttcagttaacttaattttatctgccagggtcgtaaactgggtataaatgcttccttgcccgtcctttccggacaataaaccatctaaggcaaaaaccgcatcatctacgtgcatccgggtattgagtaaatcataagccggactcaagcgatgatctcctaaaggagtctccaaaatcgaaaaattcttgaggtgtgcatctccattcgaaaataaataattaaagaccaatacttgaaacagcttaggaatttctgtcctataagctggcaaatacgtcttcatcaattcgaaaagttccagataatagccatcatatttataatgtgcaccgtgtgtttgtggtgttttacctgcaagtgtagcaaagtcttctttagcaagtttacttccgtccgctgcaatatcaaatcgtttcgttaaataggcaggatccccattcttaaaaaatatcagtgcattttctgcggtttcaatttgataaacctgccgcgcgagttgcatggtaagatgttcgtttgccggcatttgatcactgcgctttgctgcattagggataggttttaaaatatatgctccttgttctccttcgtgaattaaccgcagtgtattcttctctaaaagaaccgaaaatttctcctgcacacccgatatcgaaatacgcttttgattatctctaaagatctggctttcgggcaacccagcacccggtgaatcataagaaagtatatgggatacttttcggttattgaacatgcgttttaggcaatttctactgtaagttgtatgaccttcaaccagggttccggggcagtattgaatggtaggcatatccattagctttcagaaactcgttttagggttatggcaccaatagtatcataagcagcagtagtgagcaaaatgccaaaataatcatcggtatccagacgcatttcggtacacaccacttgccgattggtcccttccggcaacatattataaaaaaaaggaaataaatagggcgattgataagtctgttgtgatttgggcagggtcaaacttattgcaggtttatcggggttattcagccaatcttccaaatagttaaactcaaaacctccatcatcgtgctgaatgagcgatccggcttcttcttgtttatataaaactttagccatcctcatacctcaatagatttgagttgcagcgtaagttctaagcccaaaaccgacgtgagtttctctaaggactccagggtgggattcgcttgcccacgctcgatcttatataaggtatttacactaatcccagccagatcggcaacttcatattgcgtaatcttaagatgatcccgtctttcttttaattgaattccaatactctttttagacataatttacatccttaaaaatcacattatactgtgattttaaccctattcctaataatacaaagcaaaaatacatataatttcacattaaaatgtgattatagatgtgtttcccaaatacatttggccttctaatccaaatttcacaagatactgtgattttcagcagcaataagctcgttcacataaactacttccgagtaaatccaaagacatttaatcttaatcaggcgaacgcaatccttccgctagtacgggagaaagcattgggataaagattttggaataaatggctatttccgtcccgaaattccgggagaagcttttttacggagtgattatgaatgctaaagttgtggataatagggtttattccccttacttaattcatttcttttatggatttttaaagcttgcttgggaataaatctgagtaaataattgtgttgtatagaattctgtaagatgatttcaattctaacctttatatttaactagataaaataaaaaatcccacggagtacgcaggatttaagatttttcttcggcttatagccttattgtgaattgctttcagactgtaaatataaataaaaaataattatgtgcaacttaaccttaggtattgaccttggcacaaactcaattggatgggctattagggacactacagaaaatgataatcaaattattaaaaatggggtgttaatttttgataaaggtgtgggagaagaaaaaggaattgaattccctaaggtaaaaaaacgtactgaatctcgtgggaaacgcaggaattaccaagccgaaaaatatagaaaatgggaattactagagtttcttattcaaaatgagatgtgtccgctaagcattgacgaactcaatgagtggcgaaaatattctaagaaagacaaaagaaaataccctcaaaccgaaaagtttctcaactggcttcgctttgattttaacggtgatggcaaacctgattttcatttactgggaggagacaagcacgagagctattacctctttagaatgaaagctgtaagtgaggaggaaaaagacaaaaaagtattgcaagaaaaccctcaaattttaggtcgtgttttttatcatttggtacaaagaaggggttttaaagggcgagatgaagaggaagcaaaaacaatgcttcaaggctctaaagatggcactacaaaggggcgaaatgaaatttccgaatatatagacatctataaaagtttaggtgctgcactttaccattaccaaaaagagcattccaaaaactatgaaaaagtccgtattcgccaacgctataaccttagaaaagattacgaaaatgaattaaaagaaatttgccgggtacaaggactaagtgatagcgattacaagaaactgcaaaaagcgatcatttggcaacgtcctttgcgaacacaaaaaggattaataggtttatgtacttacgaaagaaacaaaagaagagcacccataagccacccactatacgaggaataccgaacttggatctttattaacaaccttaaaattgaagctccggaaggagaagcattggatgcgtatcttaaagaaaaaatctatcccttattcctaaaaagcggaactgattttaagcttaaaacaattcttgaccgtataaataaagacgggggaaaagtacattccaaatttgctgatcgcccagacaccaaagtattatctgctaaattgctaaaaaagcttgaagaggttctaggtgaaagttggaaggaagattttaattggaatgctttttttgtacgtgaagcacaaccttcaaaaaagcaagatgaagtttatactgtggaggatatttggcacatcctattcacctttgacaatgaagaaaagcttaaagaatttgcctcgactaaattaggcttatctgaagaagcatctacaaaattttcaaagataaaactgcaacaaggctatgcctccttaagcccttcggctataaaaaaaatactgccctatcttcaaaaagggttcttatacccaaaagcggtttatatggcaaaccttcaaaaagtgctaggaacatacgaagtttcagaagatttgatcaatcattttgccagcgaaatcgatactatttatgaaaatgccgctacagagaaaaaattaaacaatattttaaatagtctttttcgaactgagcttgttttagaaggcgattatcatttagctgaacatgaagatttagatgatgctgatttagatttaattaaacaaaaaataattgaaatacttggagaaaaaacttggagcgaaaccgatgaaatcactcaaaaacaacatttcgattatgtaagaaaacagtataagcaatttttacaaaaaccgcttcaagcaaaaaaagcaggctttatagagcaacctcgcattcacgatcagatatttaaatatttgcaagaacattatcctgaacaagtccctcacgaaaacataaaatacctttggcatccttcagaacaggaaaaataccccaatgcgtctacctatcaggaaatcaacctaaaaagcaaaaccttttttatcaaagaagctgaactggatcgttttttacataaaaatccggatgcggaggctgaaggtatttctcttgaattattaggcgatccagaacctataagtaagggatttaaaaaccccatggctttaaaaacattacataagctaaaacagctgctaaactttttgttacatacccaacaaattgataagcatacccggattgtcgtagaaatagcgagagagctaaacaacgctaattatagaaaagcattagaaaaatggcaaagcgaacgggaaagagaaaatgagtcttataaaaaacgtattacagaaatcaataaagaatgtaataccagttttgacataaacaacaaatcccttatacgtaaaataagactttgggaagaacaagaccgcaaatgtctctatactggggaagtcatcaatatgtgcgatgtgcttaacggggaatattatgacatagagcacaccatacccgccagtattagctttgatagtgaattgaagaacttaagtctggcgaataaagacttcaacaataacattaaagggaagaagtaccctacccaattagacaattatgatgatgcttcaacatttaatggcaaacgaattgagcctattataaaaaatatagaaagtctttttggtaaacgaacagtttataaaaagaaagtcaagaaaggaggggttgaaaaagaaattaccgttgaaaaatgggctaaaatcgctgatttagaaaaaaaattggacggtttaaaaaacctaagttatattgactcgaaagatgccaaagattataaaattcaacaacgtcatctattaaaattcaaactggattatttaaaacaaaaactgcaaacctttactattgaagaatataaagcaagttggcgaaacagtcaactacgggatacccaaataatgacgaagtatgctgttccctatctaaaaaccgtttttaaccgtgtagaggttcaaaaaggaaatgtagtgaacgattttaaagaaatttataatgtaaaattgtttggaaataagaaagaccgcaccaaacacagtcaccacgctgttgatgctgccattttaaccttgataccaaaaccaacagagcgtgaccagattttaacaaaatataatctagctaaagataatggtatcgcaagaacttatcacgagcagcctatagactggaaagactttaaaacgtactacattaaacaaattgaagaagaaacactcataaataatctaaaagaacaacgtacccttacctcgacttttaaaaaagtaaggaaacgtggaaaaatagtgaaaaaagaaaatggtaagccaatatgggcaaagggcgataccattcgagggcaattacacggcgaatcattatacggtgccataaaacaggcccaacgtgatgaggataacaaaattgtatttgacgataacaagaaaatgattttagaagaagaaatcaaacttgttattagaaaacccttgacatatgccaaagatgccgcttccccaggctttaaaacccttaaagaaatagaaaaggtaattgttgaccgagctttatttgaaatgatacaaactcaggttgataaagccgaaagctttaaaaatgccttagaaaaagggatttatatgcttaacaaaaaaggaggtaaagttaacaaaatcagacatataagatgttttgacaggttgaagcattcaaccgctgtaaggccgcacgaccacgattttgtttcagataaagaatataagcaaaccacctatgcgcagaacggggaaaatgtattttgccttttttataaaggagaagtaaaaggaaaagaagagcgggctattaatgtcattgggatttttgatcttgctaaactcgatatcaaggatgaaaaagatttttataaaatcccactttttaattcgatcaataagaaaaaaacagaactccccttatatgcagttttgaaatccggtcaaaaagctattttctacaaagaaaatttagaagaattaaaagatctcaacgagaaagaactgtctaatagaatgtataaaatgtaccagtttgaacagggaaaaggcggggataaaataaaattcaaacatcatttaatttccggagcaaataccgaaatagtaaatggcttaccaaaaggatataaggaagcctctgaatatggctgtttcgatgagcaaccgctaatgagacttacagccggtaattggaatttcgctatcgaaaaccaagattttgaaatgaatttagatgggaaagttaaattttaaaatctaacatatgatcaagcgcactctcttttttggaaacccctcatacctgagtacccgcaacgaacaacttgtggtcaactttccggaggaagataagaaggaggcgagcatccctattgaagatttaggctatatcgtgctagaggacccccagatcaccatcaccaatgggctcctgatgaaattggttcaaaataaaacggctgtaatcacctgtgataaacaacacctgccctgctctatgatgcaacctttggtgggccataccgagcaaaccgagcgtatgcggcatcaactcaatgccagccttcctcttaaaaaaaacctgtggcaacaaaccgtaagtgcaaaaatttacaatcaggccttacatttagaattcagaggaaaaaatgcattaaaactcaaacgctggagtacggatgtaaaaagtggcgataccggaaatctagaagcagttgctgcagcgcattattttcaaaatctatttaatgaagtatttggatttagccggaatcagaagggagttgcaccgaataatctactcaattatggctatgccattttaagagcagtagtggcaagagcactggtaagcagtgggatgctaccttcggttggaatctttcaccgcaacaaatacaacgcgttctgtctcgctgatgatattatggaaccctaccgcatttatgtagatgctttagtttatgatattgtggaaaccggctgtaatattgaagaactctccagaacacttaaaaccgaacttttacgtattcctgccctggacgtttatattgatggcaaatggagccccctgatgaatgcggtaagccgcacgacgagtagcctgtatgattgctttctgggaaccagccgtaagatactctatcctgaatatacagtcaacagattgcgtgaatgatgcaggaaaacaacttctcaagacttaaccaataccgatctatgtgggtacttgtattttttgacttgccaacggagacacgcacggaacgtaaggtcgcagcacgatttaggaaaaacttactcgatgatgggtttgcgatgtttcagttcagtatctatatgcgcttttgcgcaagtcgtgaaaatgccagcgttcatatacgacgaacaaaaaataatcttccaaaaaaaggaaaagtctgtgtaatgcaaataaccgataagcaatttggaatgatggaactctttcacggtcaaaaagaagtagaacccgaacaaccttcacaacaacttgagcttttttaattgctaatgtcatcctgagcctgtcgaagggagacacgtgcaatttgcttatctagtcaaaacagaatgaaattttttatcgtcctagcagtcgagatcatctttaaacctcaattttttaaatcctaaaaattaacataaaaaacaggataccagctttttatggcgggtatcctgtgaatcctcactaaaattagcattctgaaagcaattcacaacttgcaattcaaggaataagaaggtataacacctgtgaatcctcactaaaattagcattctgaaagcaattcacaacctaggctcatttatgaaaaacaccgacttcctgtgaatcctcactaaaattagcattctgaaagcaattcacaactgaactcgcataaatccccatcattcaaaacctgtgaatcctcactaaaattagcattctgaaagcaattcacaacttacagtcctgtcagctcaggacttagagcctgtgaatcctcactaaaattagcattctgaaagcaattcacaactattcgtgttcaaataaacaaccagtctaccctgtgaatcctcactaaaattagcattctgaaagcaattcacaactgatctgttctgtttatttcagaattgtaacctgtgaatcctcactaaaattagcattctgaaagcaattcacaaccagacggagagcctacaccatacgcgaagacctgtgaatcctcactaaaattagcattctgaaagcaattcacaactacccattcgttttttagaataaatgatatcctgtgaatcctcactaaaattagcattctgaaagcaattcacaaccgaaaaggattggcgtaataatttcggagcctgtgaatcctcactaaaattagcattctgaaagcaattcacaaccgtgatgccgcgtaccattaatattgagccctgtgaatcctcactaaaattagcattctgaaagcaattcacaactctggatctcgcaacccgtttagatggagacctgtgaatcctcactaaaattagcattctgaaagcaattcacaactaaaaaataggccagggcaaacaacaaaagcctgtgaatcctcactaaaattagcattctgaaagcaattcacaactaatgctgtccgaaccattcagacagtttgcctgtgaatcctcactaaaattagcattctgaaagcaattcacaacttgtactcttccgtttcttttttgccttgacctgtgaatcctcactaaaattagcattctgaaagcaattcacaacatttacggttgagttttttgccatccgtaacctgtgaatcctcactaaaattagcattctgaaagcaattcacaacaataggttaagcataatttaaaattgatcacctgtgaatcctcactaaaattagcattctgaaagcaattcacaactaatgatgcaatgcgaaaaaaatacggtaacctgtgaatcctcactaaaattagcattctgaaagcaattcacaacccagagcctacacacgcgaaaaaccctgaacctgtgaatcctcactaaaattagcattctgaaagcaattcacaactcccagactataaagcgatagaagataaatcctgtgaatcctcactaaaattagcattctgaaagcaattcacaaccgcaataatggaattagtaaatcaaccggacctgtgaatcctcactaaaattagcattctgaaagcaattcacaacctataagatcttgtctggctatttcattttcctgtgaatcctcactaaaattagcattctgaaagcaattcacaactaattgttgaaaatggtaggcaaatcatttcctgtgaatcctcactaaaattagcattctgaaagcaattcacaactaaagcgtggagtatctacgctatggatgacctgtgaatcctcactaaaattagcattctgaaagcaattcacaaccttagcgcctcgggcgtgtcgcatagtgtcctgtgaatcctcactaaaattagcattctgaaagcaattcacaactccagaaacatttttactggttctgataaacctgtgaatcctcactaaaattagcattctgaaagcaattcacaacttagcacgccagacacccgcatgatctttgcctgtgaatcctcactaaaattagcattctgaaagcaattcacaactttgcgaaggaatttcaaaacggttttaatcctgtgaatcctcactaaaattagcattctgaaagcaattcacaactaggagacggtgccgctaaatcattaacgccctgtgaatcctcactaaaattagcattctgaaagcaattcacaactaaaagccataaagcaatgctagaaggtaacctgtgaatcctcactaaaattagcattctgaaagcaattcacaacaggcattgcacgctagaatgcacgacggcacctgtgaatcctcactaaaattagcattctgaaagcaattcacaaccttagtaattttgctattcctgtctatgttcctgtgaatcctcactaaaattagcattctgaaagcaattcacaactctagttcgttgtcataagtacccagaaagcctgtgaatcctcactaaaattagcattctgaaagcaattcacaacagaatcggtttgaattcatcttgacaacggcctgtgaatcctcactaaaattagcattctgaaagcaattcacaacttgaaaatgcgcggttaaaaaaacctaccccctgtgaatcctcactaaaattagcattctgaaagcaattcacaacttagtatttactttaaactcacgcaatcccctgtgaatcctcactaaaattagcattctgaaagcaattcacaacttgcgctgggaccgcataacgctatagctccctgtgaatcctcactaaaattagcattctgaaagcaattcacaactacttatcattcgctttaaaatcgcagacacctgtgaatcctcactaaaattagcattctgaaagcaattcacaacttgaaaatcctgtgaatgaaaaacttcttccctgtgaatcctcactaaaattagcattctgaaagcaattcacaacccaaagcttacggcgctgaaggtcttttcacctgtgaatcctcactaaaattagcattctgaaagcaattcacaactgaagttatagatacacacgcttacagcggcctgtgaatcctcactaaaattagcattctgaaagcaattcacaacgataaagacacgcttgcaaaaaagataaaccctgtgaatcctcactaaaattagcattctgaaagcaattcacaacaaagctactgatacaaatgggaaagtacgtcctgtgaatcctcactaaaattagcattctgaaagcaattcacaactttccgatcttcttatcactccaatttcttcctgtgaatcctcactaaaattagcattctgaaagcaattcacaacctaggaaatgtttctggaaatcacggttatcctgtgaatcctcactaaaattagcattctgaaagcaattcacaactccgtgcttttaatagctgtggaagctattcctgtgaatcctcactaaaattagcattctgaaagcaattcacaactatcagatatatcataaaccctatctaattcctgtgaatcctcactaaaattagcattctgaaagcaattcacaaccttgagtaacccctttttgctttctcaatcctgtgaatcctcactaaaattactattctgaaacctccaaaaacaactttccgattcaaaaacaaacaccgattgaaatcctataccttcgtcaagcaacgactaaaatccaaggttcagcggagctaaagcaattaataagctttccaaacttatagtaaatactattctaaaattaaacatctgacgagtatagatttctgtaaatttctttagaggcataatccgtatttttagctttctagccaaattagattttcgatgaaaaaatgtatactattaattttacttttttgttcttttttatccttttctcaacaacaagagtttacccttgtatcctggaacattagagactttggaaagaccaagaacagtaaagaacttgatcaaattgcagaaatagtaagggatgtagatcttattgcggttcaggaggtagttgcgggttatggtggagcgcaagcagtagcaagactcacagatattctaaatcgaaaaggctcaaaatgggattacgtaatcagtaatcctacaaacagttctaaatatgtcaccgaacgttatgccttcatttggaaaactactaatataaaaatcaaaaacagaggcacgttaatcgtagcgttggattctgaagtagagcgcgaaccctttactataaatttctatttagatcaaaaggtcttaaaggtcataaactttcattcgagacctcataataaaaatccagagaccgaaataagtgccatctcgcaccatattatcaacgctataaaaggccctgtactttttgcaggagattttaacgttgtggagcaggatcccgtatttgatgcattaaaaggtaagggttttactcccgcattagtcggccaaaaaacgacacttaaaagaacttgtaccggattgaattacctgaattatgcaattgacaatatattttattcgaaagaaataatttttctggaaagcggagtgctggactttgtattgacttgtgatcaattagatcaggctcgtaaactttcagatcacttaccggtttttatcaagtttagtctgtattgatttactctccccaaataaattcttgaatgattcctttcatatctgaaggcaacaaagcttgtttaatctcatagttctcaactcccattgcctgaaaccaatcttgccaatatttaaagatcacgtcttcctcatagggatttttagggtctggattgatacccaaaaccaaaacctctaaatcttctaaatttttatttgcaggtataaagccgtacttacccccagttattttttcttcccatttactggaattgagtctaaaactttttacggtttgcggagtaagataagacgttagatgctcttcttccagtaatgtatttttatgataaatatatccatctgtaagaaggacaagaatatttcggtgattctcttcaatacaaaaatcgtttactttgttcttaaaaaacctccagacatcagaccctacataagcatcatctaaaatcgcagcctcgtaaataaattttggtatgctgtcatacgcatcagaaacagatagaattttatcctttgttgcattatcccgtgtaaattttagcttcaagtcctctaactttttgttgagcttcttatcagctggctctgggtcaatgtagagttgtatttgatcattaatctttaaagttcgcttatttctcaaatgaacttcgaaagactctgcgatagaattgatatatcccaaatccctaaggtaaaattccattgctgcatctggatatttatctggattgatgcggtctgaaaggtctaataatatacttagattcaaatcgggtctatttgaagatagcttcactacagattcttgttccttatctaataccttaatttcctttgattctttcttacaagcttgaagtaagagaatcaataatgtgagtgtaaaatagtttttaattcccattagtttacaagtttatacagacgcccttcgtagtcttcattatctatattgtattttaccagatgaagcttttcttgctcttcacagcttttgtaaagttcctcgcgccttttgattgcatcaaagttatcagctatcgctaaaaaccatccttttacatattctgcgtggtaggttaagtaatgtttatttgagaagacaaatccgtcaatagtgcgttgtaaatccagtattttcccctcaaaacctgaaatttcttcttttatgggaggtagcttttcttcaattttcaacaattcaagttctttgtttttaatctcctgtcgctttgagcgaataaaggatttgataagatcaaagttttcatactctttcataataaaatcgaataccaaaccccaaataatgtagacgataaaacctgcaaaaataatcccccagaactcaacggaagagaaagctatagaaagatcaaaagctggagaatctggtgttttataaaaatcgtaaagtttctgttcaataagatacgccaggattgcatcaaaaataaaggtgattgcaaacaacatgaatatcttgacataactcaaaacccctttttgtttttgaaacatatggatcaaatatcccaaacccataaaggcaaaaggtattgtagctacaaagacagcctcaagccatccgtctgctagtgctttagaaaatgcttccgcatcaaaaatggcttcccccaatttgtccgaatcaaaattcttgaagaatgccgaataagaagctgaaatataaaataccaacaggtaaagggttatcggaagcaaaacaaataaaccgatgtaaaactgggctttaggtcgtttatcaacttcaagtccgtaaacttctggattgcgttttacctcaaccatatcattcttaaaggaacgtattttctcttctattgaagtaatgttttcttccagaaggctgagggccgttttgcgctttttgagttcggtttcctgtcttcctttttcatccagatagggagctttaagttccttttgcagctggtcattttcccggcacttccccttatagtccatataaacttcttctagacaggttctaaaaacccggtggtttccttctgcctgttttgaagagccatatccgctctcaaaaaacgtcaattttactttggttgtatcttcaaccgctaccggtttttcttcgacaagggtttcattttttactgtaaatatgttttttaacggactcataattactcctgtattaagttcatcaactcctgcttagggaggttttcttttgctttttctaacagaaaagcagtaagtgcttctatattatcttctaaaaatccaaatttcaggcagtactttttaagcgtggtgagttcgtcaggttccactttatgatctgcccaaatcatcaaagccaaatcgtagagatacgatagtttctcttcggttgaatctggaaccatcgagttgtgggaaggattcagcagaatcgcatcaagctcagctttggtcactccacgctcttcggcaaaatggtaaagcattttcatctctaaaacatcaaaattatcgtctgagaatgccatttgatacaggcgcagaaaatggctttttaattcggtagatatcatagtttaatttttaggtaggttttcacaaggaattccgtcattatcagaatccaggttttcaaggcaagaaggattttcattgaattcttgttgagcctgggcttgactgttataatcagagcattttctagtaggacaatccgattcaggattacacgcttctattcccaaaatagaaactattactagcattaaaagggagcaacccttttttgatttgggcttcgattttgaggtggatttgctcgtgtaatgtccctgaacataggttccgtcttttctataatagccttttcggtatcccattgattaataaataaaaagttgaaatattgatttaaaagatttccggtttaatagtttgactatcaaagctctttccgccggcagatataattacccgttcttctttaagaatataatagcctggtctacagtgattatatctaaatcttaaagctttcaatccacctaaaaatcctttttctatagttatttcatagacataatgtgagcaacttttcttaaataaacaccgtctacgactagtctttggaattacaaaccaataaagtttgataagtatgagaagaataatacgcattagaaattccgagagaatactaccatttgatgtgctgtagaataaccttgttctcccccgaagccaaaacatccctgagtagactgaacataactacttacgctttcaagtctttcatatttccaaccaccagcagtctgatttcttatcaaggtttctaactgctcggcaacttgttttgtattttctttattacgatctattgaagcaataaagggcatgactttgtattccatttaagattattttgagtctataaaattttactattagaattatagcaacaggaaaatgaataagattatttcaaaaaatttttatgcacataacctgtggtttcattactaaggactttcactctcaaccaagactccaatacctccagaacttcgacttgttgatcttcttttaatttctcaagtatttttgaagatgcagaaggcttctctctaagatttagaacgggtgaattaacgattgcctgctgccctattgaaaattttgatgcggtagacttgcgagttaccgtggtggatcgcgagggtgttgacctcacccggctgcacaccccgcaactcccgccattttttgcacaatgtttacaacccgtacaatttttacaggcgctacaatatgcagatcccgtacagccacgcccttcttcacaacaagaggttgcgacgcgagtatctgatagagtaacctgtgcgtttaagctaaatgaggccccaaaaaacaata

(The sequence listing continues in the following parts.)

1. A non-naturally occurring, engineered composition comprising:
(a) a β-CASP polypeptide, wherein the β-CASP polypeptide comprises an N-terminal β-CASP domain and a C-terminal adapter domain, wherein the C-terminal adapter domain comprises an α-helical domain having homology to the C-terminus of a Cas10 protein, wherein the β-CASP polypeptide comprises a plurality of residues capable of coordinating with Zⁿ²⁺ ions; and
(b) a plurality of Cas polypeptides, wherein (a) and (b) are capable of forming a non-naturally occurring, engineered multimeric CRISPR-Cas complex in the presence of a guide molecule, and wherein the guide molecule is capable of directing sequence-specific binding of the non-naturally occurring, engineered multimeric CRISPR-Cas complex to a target sequence in a target polynucleotide.

2. (canceled)

3. (canceled)

4. (canceled)

5. The composition of claim 1, wherein the plurality of Cas polypeptides comprise a Cas5 family polypeptide, a Cas7 family polypeptide, and optionally a Cas6 family polypeptide, wherein the Cas5 family polypeptide is a Type III Csx10 polypeptide, a homolog thereof, or an ortholog thereof; wherein the Cas7 family polypeptide is a Type III Csm3 polypeptide, a homolog thereof, or an ortholog thereof; and/or wherein the Cas6 family polypeptide is a Type III Cas6 polypeptide, a homolog thereof, or an ortholog thereof.

6. (canceled)

7. The composition of claim 1, wherein one or more of the β-CASP polypeptide and/or the Cas polypeptides has catalytic activity; wherein one or more of the β-CASP polypeptide and/or the Cas polypeptides lacks catalytic activity; wherein one or more of the β-CASP polypeptide and/or the Cas polypeptides is or is engineered to have nickase activity; wherein the catalytic activity is RNAse activity; wherein one or more of the β-CASP polypeptide and/or the Cas polypeptides further comprise one or more additional modifications that increase nuclease efficiency, target polynucleotide binding efficiency, or reduce off-target nuclease activity.

8. (canceled)

9. (canceled)

10. (canceled)

11. (canceled)

12. The composition of claim 1, wherein the β-CASP polypeptide and/or one or more of the Cas polypeptides is/are further linked to or otherwise capable of associating with a heterologous functional domain, wherein the heterologous functional domain is a nucleotide deaminase, a transposase, a reverse transcriptase, a recombinase, a methylase, a demethylase, an acetylase, or a deacetylase.

13. (canceled)

14. The composition according to claim 1, wherein the β-CASP polypeptide and/or one or more of the Cas polypeptides is/are derived from one or more bacteria and/or one or more archaea, wherein:
(a) the one or more bacteria each independently belong to the phylum selected from the group consisting of: Bacillota; and DTHG01000077 4 candidate division White Oak River group 3 (WOR-3), and/or the one or more bacteria each independently belong to the Staphylococcus genus, and optionally one of the bacteria is 6NBT Staphylococcus epidermis;
(b) the one or more archaea each independently belong to the phylum selected from the group consisting of MBU4492343 1/HEQ78297 1/Euryarchaeota; RLE40065.1 Candidatus Woesearchaeota; NHI92075 1 Candidatus Lokiarchaeota; and PKP54316 1 Candidatus Altiarchaeales archaeon, and/or the order selected from: PXF52022 1/RJS85311 1/Methanophagales; and MCD4797691.1/CAG0966219 1/RLG33181 1 Methanosarcinales, and/or the family MCG2727882 1 Candidatus Methanoperedenaceae, optionally WP 0972978485 1 Candidatus Methanoperedens sp BLZ2, and/or the genus WP 0972978485 1 Candidatus Methanoperedens, and/or the species selected from: 4QTS (Csm3) Methanocaldococcus jannaschii; and WP 012965105 1 Ferroglobus placidus, optionally WP 012965105 1 Ferroglobus placidus DSM 10642; and
(c) each of the β-CASP polypeptide and the one or more Cas polypeptides are optionally derived from a same species or from one or more different species, wherein optionally the β-CASP polypeptide is derived from a first species, and the one or more Cas polypeptides are derived from a second species different from the first species.

15. (canceled)

16. (canceled)

17. (canceled)

18. (canceled)

19. The composition of claim 1, further comprising one or more guide molecules, wherein the guide molecules comprise a guide sequence capable of hybridizing to a target sequence of the target molecule, and wherein the composition is optionally in the form of the non-naturally occurring, engineered multimeric CRISPR-Cas complex, wherein the at least one guide molecule is a crRNA comprising a spacer sequence flanked on the 5′ and 3′ ends by direct repeat sequences.

20. (canceled)

21. A nucleic acid molecule comprising a nucleotide sequence encoding one or more components of the composition of claim 1.

22. A vector comprising a polynucleotide comprising one or more nucleic acid molecules of claim 21, wherein the vector is a viral vector.

23. (canceled)

24. A delivery vehicle comprising one or more components of the composition of claim 1, wherein the delivery vehicle is a lipid nanoparticle, a viral capsid, an engineered retroelement vector, a polynucleotide-based nano-structure, or an extracellular contractile injection system.

25. (canceled)

26. An engineered cell comprising the composition of claim 1, wherein the engineered cell is an engineered eukaryotic cell or an engineered prokaryotic cell.

27. (canceled)

28. An organism comprising the cell according to claim 26, wherein the organism is an animal or a plant.

29. (canceled)

30. A pharmaceutical composition for treatment of a disease or disorder, comprising the composition of claim 1 and a pharmaceutically acceptable carrier.

31. A method of modifying a target polynucleotide, the method comprising contacting a sample comprising a target polynucleotide with the composition of claim 1, wherein contacting results in modification of a gene product or modification of the amount or expression of a gene product, wherein the target polynucleotide is a disease- or disorder-associated target polynucleotide.

32. (canceled)

33. (canceled)

34. A non-naturally occurring or engineered nucleic acid targeting composition comprising:
a Cas polypeptide comprising a RuvC domain and an HNH domain, wherein the Cas polypeptide is less than 850 amino acids in size, wherein the Cas polypeptide comprises one or more nuclear localization signals, two or more nuclear localization signals, and/or comprises one or more nuclear export signals, and wherein the Cas polypeptide is catalytically inactive and a nickase; and
a nucleic acid guide molecule capable of forming a complex with the Cas polypeptide and directing sequence-specific binding of the complex to a target sequence in a target polynucleotide, wherein the nucleic acid guide molecule is optionally capable of hybridizing to one or more target sequences in a prokaryotic cell or in a eukaryotic cell,
wherein the Cas polypeptide is a Type II-B Cas polypeptide selected from the group consisting of SEQ ID NOs: 189-269, or
wherein the Cas polypeptide is a Type II-C Cas polypeptide selected from the group consisting of SEQ ID NOs: 4583-8895.

35. (canceled)

36. (canceled)

37. (canceled)

38. (canceled)

39. (canceled)

40. (canceled)

41. (canceled)

42. (canceled)

43. The composition of claim 34, wherein the Cas polypeptide is associated with one or more functional domains; wherein the one or more functional domains comprises one or more heterologous functional domains; wherein the one or more functional domains cleaves the target sequence; wherein the one or more functional domains modifies transcription or translation of the target sequence the one or more functional domains comprises one or more transcriptional activation domains, optionally VP64; the one or more functional domains comprises one or more transcriptional repression domains, optionally a KRAB domain or a SID domain; the one or more functional domains comprises one or more nuclease domains, optionally Fok1; and the one or more functional domains has one or more of the following activities: methylase activity, demethylase activity, transcription activation activity, transcription repression activity, transcription release factor activity, histone modification activity, nuclease activity, single-strand RNA cleavage activity, double-strand RNA cleavage activity, single-strand DNA cleavage activity, double-strand DNA cleavage activity and nucleic acid binding activity.

44. (canceled)

45. (canceled)

46. (canceled)

47. (canceled)

48. (canceled)

49. (canceled)

50. (canceled)

51. (canceled)

52. (canceled)

53. (canceled)

54. The composition of claim 34, further comprising a recombination template, wherein the recombination template is inserted by homology-directed repair (HDR), and wherein the composition further comprises a tracrRNA.

55. (canceled)

56. (canceled)

57. The composition of claim 34, wherein the Cas polypeptide is a chimeric protein comprising a first fragment from a first Cas polypeptide and a second fragment from a second Cas polypeptide.

58. The composition of claim 34, further comprising a nucleotide deaminase or a catalytic domain thereof, wherein the nucleotide deaminase is an adenosine deaminase; wherein the nucleotide deaminase or catalytic domain thereof is covalently or non-covalently linked to the Cas polypeptide or the nucleic acid guide molecule, or is adapted to link thereof after delivered to a cell; wherein the nucleotide deaminase or catalytic domain thereof has been modified to increase its activity against a DNA-RNA heteroduplex to reduce off-target effects; wherein the composition is capable of modifying one or more nucleotides in the target sequence; wherein modification of the one or more nucleotides in the target sequence remedies a disease caused by a G→A or C→T point mutation or a pathogenic SNP, wherein the disease is cancer, haemophilia, beta-thalassemia, Marfan syndrome, or Wiskott-Aldrich syndrome; wherein modification of the one or more nucleotides in the target sequence remedies a disease caused by a T→C or A→G point mutation or a pathogenic SNP; modification of the one or more nucleotides at the target sequence inactivates a gene; and modification of the one or more nucleotides modifies gene product encoded at the target sequence or expression of the gene product.

59. (canceled)

60. (canceled)

61. (canceled)

62. (canceled)

63. (canceled)

64. (canceled)

65. (canceled)

66. (canceled)

67. (canceled)

68. (canceled)

69. (canceled)

70. The composition of claim 34, further comprising a reverse transcriptase or functional fragment thereof.

71. A non-naturally occurring or engineered nucleic acid targeting composition comprising one or more polynucleotide sequences encoding
wherein the Cas polypeptide comprises a RuvC domain and an HINH domain, wherein the Cas polypeptide is less than 900 amino acids in size; and
a nucleic acid guide molecule capable of forming a complex with the Cas polypeptide and directing sequence-specific binding of the complex to a target sequence in a target polynucleotide,
wherein the one or more polynucleotide sequences encode a Type II-B Cas polypeptide and are selected from the group consisting of SEQ ID NOs: 108-188, or
wherein the one or more polynucleotide sequences encode a Type II-C Cas polypeptide and are selected from the group consisting of SEQ ID NOs: 270-4582, wherein the one or more polynucleotide sequences are codon optimized to express in a eukaryote, wherein the one or more polynucleotide sequences is mRNA, wherein the one or more polynucleotide sequences further encode a reverse transcriptase or functional fragment thereof.

72. (canceled)

73. (canceled)

74. (canceled)

75. A vector system comprising the one or more polynucleotide sequences of claim 71, wherein the vector system comprises:
a first regulatory element operably linked to the polynucleotide sequence encoding the Cas polypeptide; and
a second regulatory element operably linked to the polynucleotide sequence encoding the nucleic acid guide molecule,
wherein the first and/or second regulatory element is a promoter, a minimal promoter, a Mecp2 promoter, tRNA promoter, or U6 promoter, and
wherein the vector system is comprised in a single vector;
the one or more vectors comprises viral vectors; and
the one or more vectors comprises retroviral, lentiviral, adenoviral, adeno-associated, or herpes simplex viral vectors.

76. (canceled)

77. (canceled)

78. (canceled)

79. (canceled)

80. (canceled)

81. (canceled)

82. (canceled)

83. A delivery system comprising the system of claim 34 and a delivery vehicle, wherein the delivery vehicle comprises lipids, sugars, metals, proteins, liposomes, nanoparticles, exosomes, microvesicles, nucleic acid nanoassemblies, a gene gun, an implantable device, or a vector system; and wherein the delivery vehicle comprises ribonucleoproteins.

84. (canceled)

85. (canceled)

86. A cell comprising the composition of claim 34, wherein the cell is a eukaryotic cell, a human or non-human animal cell, a therapeutic T cell, antibody-producing B-cell, a stem cell, or a plant cell.

87. (canceled)

88. A tissue, organ, or organism comprising the cell of claim 86, or a cell product from the cell of claim 86.

89. (canceled)

90. A method of modifying one or more target sequences, the method comprising contacting the one or more target sequences with a composition of claim 34,
wherein the composition further comprises a recombination template, and wherein modifying the one or more target sequences comprises insertion of the recombination template or a portion thereof;
wherein the one or more target sequences is in a prokaryotic cell; or
the one or more target sequences is in a eukaryotic cell; or
the one or more target sequences is comprised in a nucleic acid molecule in vitro.

91. (canceled)

92. (canceled)

93. (canceled)

94. (canceled)

95. A cell obtained from the method of claim 90, or progeny thereof, wherein the cell is a eukaryotic cell, a human or non-human animal cell, a therapeutic T cell, antibody-producing B-cell, a stem cell, or a plant cell, or a non-human animal or plant comprising the modified cell or progeny thereof.

96. (canceled)

97. (canceled)

98. A modified cell or progeny thereof of claim 95 for use in therapy.

99. A method of treating a disease, disorder, or infection comprising administering an effective amount of the composition of claim 34 in a subject in need thereof.

100. A method of identifying a trait of interest in an organism where the trait of interest is encoded by one or more target polynucleotides, the method comprising contacting the organism or a sample therefrom comprising polynucleotides with non-naturally occurring or engineered nucleic acid targeting composition of claim 34, wherein the composition is directed to the one or more target polynucleotides by the nucleic acid guide molecule, whereby one or more target polynucleotides, and thereby one or more traits, are identified, wherein the one or more target polynucleotides are modified by the non-naturally occurring or engineered nucleic acid targeting composition;
wherein the method is performed in vitro, in situ, ex vivo, or in vivo;
wherein the organism is a plant, non-human animal, or human; and
wherein for a plant organism, the method comprises contacting a plant cell with the composition, thereby either modifying or introducing a gene of interest, and regenerating a plant from the plant cell.

101. (canceled)

102. (canceled)

103. (canceled)

104. (canceled)

105. An engineered nucleic acid targeting composition comprising:
a Cas polypeptide comprising a RuvC domain and an HNH domain, wherein the Cas protein is about 950 amino acids or less in size, less than or equal to 780 amino acids in size, wherein the Cas polypeptide has no association with Cas1, Cas2, Cas4, or Csn2, wherein optionally the Cas protein is operably coupled to one or more nuclear localization signals and/or one or more nuclear export signals, and wherein optionally the Cas protein lacks one or more catalytic activities, lacks nuclease activity, or is a nickase; and
a nucleic acid guide molecule capable of forming a complex with the Cas polypeptide and directing sequence-specific binding of the complex to a target sequence in a target polynucleotide, wherein the Cas polypeptide is capable of forming a complex with two or more nucleic guide molecules, wherein each guide molecule is capable of sequence-specific binding of a target nucleic acid sequence, wherein each target sequence is different and wherein the target sequences are on the same or are on different target polynucleotides, and wherein the guide molecule or the two or more guide molecules are capable of sequence-specific binding a target sequence in vitro, in situ, ex vivo, or in vivo, and/or in a prokaryotic cell, eukaryotic cell, a virus, or a combination thereof,
wherein the Cas polypeptide is selected from the group consisting of SEQ ID NOs: 8899-9520, and wherein the Cas protein is operably coupled to or associated with one or more functional domains, one or more heterologous functional domains, wherein the one or more functional domains has one or more activities selected from deaminase activity, methylase activity, demethylase activity, transcription activation activity, transcription repression activity, transcription release factor activity, histone modification activity, nuclease activity, single-strand RNA cleavage activity, double-strand RNA cleavage activity, single-strand DNA cleavage activity, double-strand DNA cleavage activity, nucleic acid binding activity, transposition activity, reverse transcription activity, or a combination thereof, and wherein the one or more functional domains is capable of cleaving the target polynucleotide and/or modifying transcription or translation of the target polynucleotide.

106. (canceled)

107. (canceled)

108. (canceled)

109. (canceled)

110. (canceled)

111. (canceled)

112. (canceled)

113. (canceled)

114. (canceled)

115. (canceled)

116. (canceled)

117. (canceled)

118. (canceled)

119. (canceled)

120. (canceled)

121. (canceled)

122. The engineered nucleic acid targeting system of claim 105, further comprising a recombination template,
wherein the recombination template is operably coupled to, complexed with, or is associated with the Cas protein, the nucleic acid guide molecule, or both;
wherein the recombination template is a homology-directed repair (HDR) recombination template;
the nucleic acid targeting system comprises a tracrRNA; and
wherein the Cas protein is a chimeric protein comprising a first polypeptide fragment from a first Cas protein and a second polypeptide fragment from a second Cas protein.

123. (canceled)

124. (canceled)

125. (canceled)

126. (canceled)

127. The engineered nucleic acid targeting system of claim 105, further comprising a deaminase or catalytic domain thereof,
wherein the deaminase is an adenosine deaminase or a cytidine deaminase;
wherein the deaminase or catalytic domain thereof is operably coupled to, complexed with, or otherwise associated with the Cas protein, a guide molecule, or both or is capable of operably coupling to, complexing with, or otherwise associated with the Cas protein, a guide molecule, or both after delivery to a cell;
wherein the nucleotide deaminase or catalytic domain thereof has been modified to increase its activity against a DNA-RNA heteroduplex, to reduce off-target effects, or both; and
wherein the system further comprising a reverse transcriptase or functional domain thereof, wherein the reverse transcriptase or functional domain thereof is optionally operably coupled to, is capable of complexing with, or is otherwise associated with the Cas protein, the guide molecule, or both.

128. (canceled)

129. (canceled)

130. (canceled)

131. (canceled)

132. The engineered nucleic acid targeting system of claim 105, further comprising one or more nucleic acid guide molecules, wherein each of the one or more nucleic acid guide molecules is capable of capable of forming a complex or is complexed with the Cas protein, and wherein each of the one or more nucleic acid guide molecules is capable of sequence specific binding of a target sequence in a target polynucleotide,
wherein the engineered nucleic acid targeting system is capable of modifying a sequence of the target polynucleotide;
wherein the modification is: (a) insertion of one or more polynucleotides; (b) deletion of one or more polynucleotides; (c) conversion of a C•G base pair to a T•A base pair; (d) conversion of an A•T base pair to a G•C base pair; or (e) a combination thereof;
wherein the modification alters a transcription product of the target polynucleotide, a translation product of the target polynucleotide, or both; and
wherein the modification alters transcription, translation, or both of the target polynucleotide.

133. (canceled)

134. (canceled)

135. (canceled)

136. (canceled)

137. A polynucleotide comprising one or more nucleic acid sequences that encode one or more components of the engineered nucleic acid system of claim 105, wherein the polynucleotide is codon optimized for expression in a eukaryotic cell, and wherein the eukaryotic cell is a human cell or a non-human animal cell.

138. (canceled)

139. (canceled)

140. A vector system comprising:
one or more vectors comprising one or more polynucleotides of claim 137, and optionally one or more regulatory elements operably coupled to one or more polynucleotides, wherein the one or more of the one or more vectors are viral vectors; and wherein the viral vector(s) is/are a retroviral vector(s), lentiviral vector(s), adenoviral vector(s), adeno-associated viral vector(s), herpes simplex viral vector(s), or a combination thereof.

141. (canceled)

142. (canceled)

143. (canceled)

144. (canceled)

145. (canceled)

146. (canceled)

147. (canceled)

148. (canceled)

149. A method of modifying one or more target polynucleotides, the method comprising contacting the one or more target polynucleotides with an engineered nucleic acid targeting system of claim 105, wherein the engineered nucleic acid targeting system is directed to the one or more target sequences by the guide nucleic acid guide molecule(s) of the engineered nucleic acid targeting system, whereby one or more target polynucleotides is/are modified,
the modification comprises: (a) insertion of one or more polynucleotides; (b) deletion of one or more polynucleotides; (c) conversion of a C•G base pair to a T•A base pair; (d) conversion of an A•T base pair to a G•C base pair; or (e) a combination thereof;
wherein contacting occurs in vitro, in situ, ex vivo, or in vivo; and
wherein contacting occurs within a cell.

150. (canceled)

151. (canceled)

152. (canceled)

153. A modified polynucleotide or modified cell or progeny thereof produced from a method as in claim 149,
wherein the cell is a eukaryotic cell or progeny thereof;
wherein the cell or progeny thereof is a human cell or progeny thereof or a non-human animal cell or progeny thereof; and
wherein the cell or progeny thereof is a plant cell.

154. (canceled)

155. (canceled)

156. (canceled)

157. (canceled)

158. A method of treating and/or preventing a disease, condition, or a symptom thereof in a subject or cell thereof, the method comprising:
modifying one or more target polynucleotides in or from the subject or cell thereof by contacting the one or more target polynucleotides with an engineered nucleic acid targeting system of claim 105, wherein the engineered nucleic acid targeting system is directed to the one or more target sequences in one or more target polynucleotides by the guide nucleic acid guide molecule(s) of the engineered nucleic acid targeting system, whereby one or more target polynucleotides is/are modified, wherein contacting occurs in vitro, in situ, ex vivo, or in vivo; and wherein contacting occurs ex vivo in a cell obtained from the subject or progeny thereof and wherein the method further comprises administering cell or obtained from the subject or progeny to the subject after contacting the cell or progeny thereof with the engineered targeting system.

159. (canceled)

160. (canceled)

161. A method of generating a modified organism, the method comprising:
modifying one or more target polynucleotides in a cell by a method as in claim 149, wherein the organism is a non-human animal or a plant.

162. (canceled)

163. (canceled)

164. A method of identifying a trait of interest in an organism where the trait of interest is encoded by one or more target polynucleotides, the method comprising:
contacting the organism or a sample therefrom comprising polynucleotides with an engineered nucleic acid targeting system of claim 105, wherein the engineered nucleic acid targeting system is directed to the one or more target sequences by the guide nucleic acid guide molecule(s) of the engineered nucleic acid targeting system, whereby one or more target polynucleotides, and thereby the one or more traits, are identified, wherein one or more target polynucleotides are modified by the engineered nucleic acid targeting system; wherein the method is performed in vitro, in situ, ex vivo, or in vivo; and wherein the organism is a plant, non-human animal, or human.

165. (canceled)

166. (canceled)

167. (canceled)

168. A method of identifying a polynucleotide modifier, the method comprising:
exposing one or more polynucleotides to one or more candidate agents; and
detecting one or more modified polynucleotides by contacting the one or more polynucleotides exposed to one or more candidate agents with an engineered nucleic acid targeting system of claim 105, wherein the engineered nucleic acid targeting system is directed to the one or more target sequences of one or more modified target polynucleotides present in the sample by the guide nucleic acid guide molecule(s) of the engineered nucleic acid targeting system, whereby one or more modified target polynucleotides present in the sample are identified.

169. A method of detecting one or more target polynucleotide present in a sample comprising polynucleotides, the method comprising:
contacting, in vitro, one or more target polynucleotides present in the sample with an engineered nucleic acid targeting system of claim 105, wherein the engineered nucleic acid targeting system is directed to the one or more target sequences of one or more target polynucleotides present in the sample by the guide nucleic acid guide molecule(s) of the engineered nucleic acid targeting system, whereby one or more target polynucleotides present in the sample are identified.
